United States Patent Application Publication US 2011/0191912 A1 - sequence listing, part 2

SEQ ID NO: 1184 - DNA, 3000 bp, Unknown
  misc_feature (1)..( 3000): cDNA_ID_2131449_gDNA_ID_1620368_Annot_ID_154909 3000 nt of promoter + ATG
taaaatctataagaatttgaaaaaagaaaaattcctcggcaactaatttttgttttttgttaaactaatatatatcttgttaggttttagctttatacataatctcaaagaatctaaattttcaaccgtcaaataaaataaaatctttcaatttaacaaagaatcatatattagatattgttagcaagatataattgagatttctgtttaaataggttcagtgtgcaactttgttcattgagtagaagaaaatggcaaatttcgtaatgttcttaaattttcttctttctttaactgtcttccacacttttcagtcagttcagtctcatttttctctctataatgataacaacattttcaatgttcttaattatggagcaattggagatggattttctgacgattcaaaggtttgttttcattttggttatatattctagttacatgtattgataattcaaagtatttatagaaattattaattcatatttctttcttaatcacggtttcaggctttcaaagatgcatgggaagacacatgcaattacattggatctgaatcaattatggaaattcctgaaggaaacacatttcttctgcaacctattgagtttcatggcccttgtaaatccaagaaaatcattttatcggtatgcataatcatatatatatatatatatatataaatattcaatatttattttatttactaacaagattaaggtcttgataatatttacaagtttttaaaggggattttggtttttattattttgaaaatctattttttttactatacaagatttttgaaaatatatgcaatactaatacatttcatatttttgtttgtagatcagtggaaacttaattgctcccgaatctccatatgaatggaaatgcaacaaagatgattgtcatcagtggatcgaattcgcacatataaatggactttatatcgatggtcatggcttgatggtcaaggaacaaagtggtggtctctagattgcacccaatatcaaaaagtatgcccttacccttttttatattttttccaatgttgatcagtagcaccatttattttattttctattcatctaaacccatttaactttttttttctttataggcatgtctcaagagaccaagggtatgtaaaaaatcactgaacaattaagtcaatcatctctcatatttaaggttatataagtcgttgcacaaattttttttagggtgtggttatatcacattcgagtaatgtgcatataagcaacattatggtgaaggacagtccaaattttcaaatgtcgttggaagattcgaaatgggttattgttaagcaactcaccataaccgctgatggtgatagccctaacactgatggcattcacattcaacgttctcagaatgttatcgtatacgatagtaacattcgtacaggtgattcatcattgatctttatactgtttttttttacaacaagatcgaataagatgtttgtctctcctagttgggttagagttaactgttgataattttaggtgatgattgtatatctattggtgatggttcgaaatacattaatatatcacggatctcatgtggtccagggcatggaataaggtacttctcttccattggtctggttacctatttcaactttaactatggtcaaattagtataagtgatgtgatcacgttatttttcctaaacaagtatcggaagcttaggtcgatatggaaccaaggaaacggtcgaaaatgttgttgttcgagattgtacttttagagaaacaactaatggggttagaatcaagacatggcaggtaaaactgatttgtttgtttttgtactccctaatttatatattgttgttaaagtaatgacaatatcattttccatatgtttgtattatttagggaggaagagggcatgtgcgaaatgttttatttgaacgtataaaactacatggagcaacccgacctatcatcatcgaccaattttattgccctcattcacaatgcaaaaaccatgtacgtaaatttttcttctccttctaatgatttatgagtacctagtccttaatatctatctactcaagtgttttaaaatagtactttaccaaaagtattaggttggttgtcatttttcgaaactatttcataaaattaatccacattatttcgtgagttatgtataataaattgatgtttaattcatatatatgtacagacgaaagctgtggagatcaagaatgtaatgttcaaccacatacatggaacatcaatcaagaaaccctttgtgcaactcctatgcagcaaatcagtcccatgtagagatatattcatgaacgatattaacattcacgacgaaaacgaagaggaagaaaagaaatatcataaatcattgtctcgccacgatgatcatccttctgctgaatgcatcaatgttaaaggtgaatctaatggtgtaatgaagccaaaactagcttgcttggaatccaaaagacattgatttgtctaaaacaatttgttagtttatttattcttttcttgttttgattagaactatactataatgcttgtgttttctccttttgatttattttgagaactaaaatagtaaattaaaatttgtgttttggtgaaaaaaattcaatttgtataactaaaaaaattaataaactaacttatcatcaaaaaaaaaagaaaatccggttcgattaaattactcaacattaacattgatattgtgagcacatgaccacaaactcaatcgataactaaattgagcaacaatttaaccactaaaatttttgttgctaaaatagttatgaagataatgaatttatcagcaaataaatccggtttggttaaaccactcaacaataacattggttattgaaatccaactgatacggtgtcgtattaccgcagagatgaattttaacttcttcgtgttgttgagctccaatctcactattacgcaaaaaaaaaccaaatg

SEQ ID NO: 1185 - DNA, 2639 bp, Unknown
  misc_feature (1)..( 2639): cDNA_ID_1413191_gDNA_ID_1620368_Annot_ID_154898 3000 nt of promoter + ATG
gatcttgttcgtgttgggccaactgatgtagctgttaagtttttgttccctgtgtttgttgaattctgtattgaagagtttcctgatgagatcaaacgttttaagagtattgttgatactgcagacctcacgaaacccgcgacttggtttcctttcgctcgtgctatgaagcgtaaaatcgtttaccattgtggaccgactaacagtggcaaaacgtacaatgctttgcagcggtttatggaagctaagaatggattgtattgcagccctcttaggttattagccatggaagtttttgataaagtaaatgctttagggatttactgtagtctcttgactggacaagagaagaaatatgttccgttcgccaaccatgtatcttgtacggttgaaatggtgtctacagatgagttatatgaagtggctgtgctcgatgaaatacaaatgatggcagatcctagtagaggtcacgcttggacaaaagctttgcttggattaaaagctgatgagattcatttgtgtggagatccgagtgttttggatattgtgcgtaagatgtgtgctgatacaggggacgagttagtggaagagcattatgaaaggttcaaaccgttagtcgtagaagcgaagaccttattaggagagcttaaaaatgttaagtctggggattgtgttgttgcgttctctagaagagagatatttgaagttaaaatggctatcgagaaacatacaaatcatcgttgttgtgttatttacggtgcattgcctcctgagacaaggagacagcaagctaagctgtttaatgatcaagaaaacgagtatgatgttttggttgcaagtgatgccgttggaatgggattgaatcttaacataagacgggttgtgttttacagtttgaacaagtacaacggcgataagatcgttccagttgcagcgtcacaggtaaaacagattgccgggagagctggaaggagaggaagccgttacccagatggacttacaacgacattgcacttagaagatctaaactatctaatcgagtgtttgcaacaaccgtttgatgaagtaacaaaagtagggcttttccctttcttcgaacagattgagcttttcgctgcacaagttcccgacatggccttttcaaatctcttagagcattttggaaaacactgcagactcgacggttcttacttcttgtgccgtcatgatcatgtgaagaaagtagcaaacatgttggagaaagtagagggactgtctctagaagaccggtttaacttctgttttgcaccggttaatatcaggaatccgagagcgatgcacaacctatatcgatttgcttcaagttatagccaaaatatgccggttaatgtagcaatggggataccaaagagttctgctaagagcgatgcccagctattggatttggaaagtagacaccagattttgtctatgtatctttggttatctaaccaatttgaagagaacttcccatttgtggagaaggttgaagcaatggcgacaaacattgcagagttgttaggtgaatcgttgagtaaagcttcttggaagatggagtcaaaagaagagaaagtgaaaggtcaaatgaaggaagatagaggatatgaaagaccagcttcgttaataaagttagttaagaagtaagtatctgcaagattttgtgtgtgttttgagaatgtttttggtaattgtggattttgctgagagatttatgtgtcttgtttcaggcggaaagacgagaaattggtgtgaaggataatagtcataataatgtagcttcatagtgatcatttgcagagagacaagtagtggtttaattcgttattattgttaagcaaaagtttttaatggattctttaattttgattcgactgaagattttttgttgtcggaagatataaagagtcatcaaagagctctctgtgacccttatatgtaaattgcgtattaaattaatagattgtatacaagaaaattaagaagtattggcgtagtatacataaaaatataggaaaaaaatgtcagaaaaatcccaaactttcaaatttgggatgattaaatcataaactacgagaaagataaataaattataaagtttttttgttagtctattaaacattaacaaaaaagtgtttagtaggctaattgaaaaagtgtttagtaggctaacaaaaaaactgttacggtgttgaactctcgttagccgtcgatatcgttaaaaaataatttgttttacttttttgttgacttttttatcgacggaaaaaactgttctgttatctaaaagggccacagaaacaaaaaacttaatttagagatttaaaatattaataaaattagtttggaagtttatagtactactgaaaatatgtcaaagtttaccgtccggtaccacttagaaggttaaaaacgttattttcccattttcaaaataattcagattcattgagcctaacaaattatagaggtcaatgaaaaaagcccaatgggccaacccaaccaaaagaaatcatttgaggccttaagaccctctaggtttttcatagtcgtgtaatataaaaagcacttcgtcttcatcgtcgcgatcaactctgtcttagttttgagcagcagcagctatg

SEQ ID NO: 1186 - DNA, 1581 bp, Unknown
  misc_feature (1)..( 1581): cDNA_ID_2132128_gDNA_ID_1620369_Annot_ID_154931 3000 nt of promoter + ATG
aagcttaagaagaaacacgcggatttacgggagcagaagctagagcaggaaaaatcaggtactgagcttcctgatgatgacagtaagaaggaaacagataacaacagactaaatgatgatgacagtaaggaggaaacagataataacagacaaaaggatgatcgatctgttacgtacgaagagctaagggaacgcctccaccgcaaaattgatgagctcaaaggtggtcgtggaggttcagatagaccaagaagcaatgaaagaaggaagaagaatctgccaaataagagaaagagggatacagtttctgaggagaagactgtggaggagattaagtcagcagataaaggtaagggtaagttggatgtggaggaggctgctaaggaccttacatttggttatgtcaagattgatgacgatgaagaacacggaaaagagaaaaagaaacgaaggctttcaaaggcaagagaacttgaaagggctatgaagttagaggctgcaaagaaggatccagaaaaaggtgatgtaattgcaaagaagcactcatggaaggcagctacaagcagagcagctggtatcaaggttcatgatgacccaaagctattgaagcaaagcatccacaaagacaaaaagaggcaagagaagaacgcagagaagtggaaagagagaattgaagggcaacaaaagttcaaggtggagaagcagcaaaagagatcagggaatattgccgataggattgaacagaataagatgcgcaaaatcgccaagagagagaaaaagctcctgcgtcctggctttgaaggccgcaaagaagggtttatcaatgaaggtggaaactagaattcaagtcttccacacgccttttgtgttccaacatttcaacgatgtgatcctcacaaaggctgtgaagagggtttttgcacatctgaaatcgaaaaacatattttgggaattttcatctagtcaagtccctagcaatatttgttatcttcttgttcgttttactttgcagtttgtagacttttcagatgttccatttgctactcaatgtgttgttccttacagtgaatgctcttatcaggcaggttttagataaacttgtcacagaaattagcatatattgaatgcgagattacaaatactaggtaattcaagctagataatcaatgcaagttgtgttcatttagatttactttgatctgaagtcatatgtgagaaatcaaactaatccgagtagatttgaattattaacttttgttggatccgatttggcctggttcatactacagaaaatatctttcagaaaagttctagatctaaacaaacgtgtctgatttagaacagtaagctttactatgctaaacaaaaagcttggataaagccgaaaagagagtcaaagtaggtcggtgaaagagtctcgagacacgtggcacaagaaccagcttggggaatctcgaaaactctcttactcatcgccattcccacacgtatgatgaatgacgtgtgccaatggatcacattacccaaaccttatataaacccaccgagagacccaacaaaactctaccagacaaaacaatg

SEQ ID NO: 1187 - DNA, 3000 bp, Unknown
  misc_feature (1)..( 3000): cDNA_ID_3061048_gDNA_ID_1620369_Annot_ID_154953 3000 nt of promoter + ATG
tgatattatggaacgaatggagattctggattttcgaaatcttgaggtacttttcttcaatcaaggatttgttttaagatagatgttgttgaatctatagcttggtgtggttatgttgtctaaacaacttaaaagtttagtttttttacttaaactgaatcgttttgcgtatgtagattcttattctagatgaggcagataggcttttggagatggggttccaaaggcaggtgaattacattatctcacgcttgccaaagcagaggaggactggcctcttttcagctacacaaacagagggcgttgaagagctcgccaaggctgggcttaggaaccctgtgagagttgaagttcgagctaagtcgaagtcggaatcatcccagcaattgacaaactcgaaaaccccttctggtcttcatcttgaggtagcataagttcaatatataattatgtaataatatgtttcagagtagttagttttcctgttgtatccttcgttatcatttagcattactgtgacctgatttacgaaggatttccttctaatttgtaagtatccagtagttatacgattctcttcgtagctctattgtattcccttctcttggtagcaagtttgttgtattgaaaatacctattgatcatatgtgttgcatatgtatatacttctttttagtagaaaccgatgttctatctttacatgtcctaccgatgcgtttcttagcggtttatttctccttgtctctacagtatatggaatgcgaagcagataaaaaatcatcacaactagttgatctcctcatcaagaacagtgataaaaagcttatagtgtaagtttaaatattccacacagacttatataaaatgaagcatccttataaatagtctaagtaacgctgcagattcttcatgacctgtgcttctgttgactactggggactcgtactttcaaaaattcctgccctgaagtccatatctttaattcctatccatggggatatgaagcaggtaaattactatgatagattttaattttccttatcacctcattacctattgctatttaaaggttttgatgaaatatacttaacacatcagaatgcaagagacaaggcattagcttcgtttactaaagcatcaagtggtgcccttctgtgcacagacgttgctgcacgtggacttgatattccaggcattgattatgttgttcaggtagattccaataatgttttgtttacattattatgacatctttgttgcaatatttaagattcagaggttcgaacatgttcatgcagtatgatcccccacaagacccaaatatgttcaaccacagggccggcagaactgcaagattaggaagacaagggagggccattgtgtttttactgcccaaggtttagctttgaccactttatgttctcttgtgcaccccatagttacatcagaaagcatgaaaagctgaaaagttcacttgcatatatgtgtaggaagaagcctatgtagagtttatgcgcataagaagagtccctttggaagagagaaaatgctctgaggacgcatccgatgtcatcccgattgtaagaaaacctccatatctctctctctctgttgcacacaagaagggtcgctctgtctatctgtgtgttaatcacattgtttattactacaatgtgttcagatacgttcagctgccatgaaggaccgagcagtgatggagaagggattaaaggcatttgtttcctttgtccgtgcttataaggagcatcactgctctttcattttcaggttcattcatgaggctcagtcatttttctgtttctcaaaattctttatcgctctatcagttttgtaattgaaaagtttttttttttgttttgggtcttaacttacagatggaaagaccttgagattggaaagttagccatgggatatggcctcttgtatcttccttcaatgtctgaagttaaacaacacagactttccagtgagggtttcacaccagttgaaggtgtcaagtttgaagaaataaaattcaagtaggtttttctaccataatccctaaacatttatgatatatatccgccttctcccattcccttagtttccgagacactaaaaatctgaaacttgatacattcaactcgtctacacgtacaatgaccatttttagatttagaggaaacaagcttttgtagtgtgaagtctttgtacatccgtgtcttcaggaatcatatgctttctgagttgacaagttggcatttctctaaacctgaatgttttgaatcaacgcagggacaaatatcgggagaaacaaagacagcaaaacttacaagtaaggaaagagaaacggcaagaagagaaaaaagagaaaggcaagagaaaaagggttgatgcttctgctagtaatgatcctaagaaagcgtcgagaaagttaacggggaaacaaagacaaactattcaaactgctgaagatgaagaagtgatggatcgagattataagttgatgataaaagtaaagaaagggttaattaaagaagatgaatatgaaagacttacaggagatgatgatttattctgatgagaagaaacaaaacctgcatgctgagattggactaagcttagtgtctttctactctcatatcatatgtgattctgttaatttttttttttttttttgggtgagaattaatatcggatcatgttatgtcctttttcgttctacgagtctcacttttatatatgtttcctaataaatttagcaaataaattgtgaatatatctatagagcaaattcgatcttcataggagagtgtgcacgcttgcacatgctagtaaatgccctccataataataaattaacgactatcaccatcactaaggtatttcatgacacaacaaaaataaaaacaaaaatctctctgtatcatcgtcttcttcgtcttttgccgttgacttgtttgaattttcgcaaatccgtctctatccaacgaagaagtc

SEQ ID NO: 1188 - DNA, 3000 bp, Unknown
  misc_feature (1)..( 3000): cDNA_ID_3061056_gDNA_ID_1620369_Annot_ID_154940 3000 nt of promoter + ATG
accaccgacttttctgttttttcttcccaaaattacgtaatcatatttttcccaaagttacgtaatcatataaatgactgttaacaaataaacaagtcaactattaaactaatcattcaaattatttttggttttgtttacaggcgcacacacgatcggacaatcccgttgcacgaacttccgagcgagaatctacaacgagacaaacatcaatgccgccttcgccacgacacgtcaacgaacttgccctagagcctccggttccggcgacggaaacctagctccactagacgtcaccacggcagcttctttcgacaacaactacttcaagaatctcatgactcagagagggctcctccattccgaccaagtgctcttcaacggcggctctactgactccatcgtccgtggatacagcaacaatccgtcgagctttaactctgacttcacggcggcgatgataaaaatgggtgatatcagcccgttgactggtagtagcggtgaaatccgcaaggtttgcgggaggaccaactgattcaagtctactccacgtgtctttttcctattggatttaccttttattatttgagttggtgagtataataaagattgatcttctccaaaaaaattcgaaggtccctttcaatgttttttttttgtttgctttgctttgtgttgaagtgtgtatttccgcattaaaaatctaatgaaaattattccattttgaagttttatattcgcatattttagaagtgattacgtgtctaagttttattggttataataaataattaattctttgaagcgggagagatttcctctgtttttaattacgcgccaattatgtcccgcgtattatctgttaagcgcacgttagcagaaaatccattatcgttaaaatgcgcaattgacacgtaagcgaaccgatgcctgagctctcgtgcacacaacatagtaaagagcgaaaaaggttaaaacttttgttcactgtcagaaatagaaaaaatcgtcgatgcgcattaatggcaattcggccgagaactcgtaaaagagttcaagctgttcgtcgtgctgccgatggtagcgcttttaaaaaatggtattgctactttgttcaaagcttttggattcgtcgatctagatttctttagggtttttatctagatttgtgattactctgttttgggtttttattccagtgaagaatgtggtgttatgatagcgattgctctgtatgatatgcatgagtgcggtgagaaaagaagggaagtgaaaaggttcaagtacattgcgagtggcaatatcgataatatctcgaaaccaattgggagctttgaagatgaacccagatcaccatttgtcttcttcttgtacagtaaccaaagacttttactctgtttcttattacaattgtgttgaatttcttgagttaactagatggagataaatagtggactttgatccttaggtcaaaaaaggggactggtgatgttaatttataaggtcaatgtctttccttttacgttaaatgttggaccttttgttggttcttggtgaaataatgcaaaacaattgtaggaaaatgtcagtgagtgatttaaccatccagtaactatttttctttctctagagaggagtttagggaaaattacaatggagacttagtggatgctagcagaatatgtttcaatgtatggaagaacatgtcagcagaggtaacatcactttgttcttaaaatactcaaaaagcctctggcgtattttctaagctggatttatgcataattgttgcttctttccaggaccaaaaaccattcaacgcccgtgctatggaggttgattcggcacacagtagaaagttaaacgaagaagctaaaaccatttataaggtagactatatccctcgatcataaattgatacattggaagattctatggaggtttactcaatagattcgttttccttcatatcttcatttaattgctaggcatacttgagatagctgtagatttaaactaattaggcttaaggttgttgaacactgtgatgtaccattttgcaggcagatgaagaggcagattcaaaaactgttgggagatatgacaaggtcagagtcattgttttttttttaactttacaaaaccaagaagcctagcctgtgtttgcatattcaattgtttcaattcatttttgactactttgcagttctatgagagctacgttcaaattgaagaagaggaagactatgattcatctgatcatttcggacacgagttttggtaagaatatgaacaatacaacactaccatacccattgttcttggctcttgttttctcacctttatgttcattgaaacagggaagacgatactatgttggactactgagaatcctgatttagtggagaaggttttggcttttggtggtgtacatgttttagagaatttgttgggggatttatgtaaatatagaaacagactagagaggctgctgatcttatttccttcctctgtgactattagaggtgttctcgtcctttttttggtgacacctttttttttcaaaaaaaaatgatggtgaaaactgaatctaagtagtaatttttaactcttcagtaactatcttcctatatctattctctagagtgaaaacatttatattgtcttcgacattatgtggagtaattgttccttcacaaattttgtgttttgaagtaaaagttactagcttctgatcccaagcctgtatatactactacagtactactatactactatgggtgctgttcattaattaagttatagaaacagaattaccattatgggctttttgagcattgggcccatgctttggctgtaatgggtttcaaaccacgcgccaaaagtgcgtgtctactcttagttcttacacgataataaatctttattattattattataaatataaagtttggatatttattgaaccgagtggtttctttcgttgactcgcccaccatg

SEQ ID NO: 1189 - DNA, 3000 bp, Unknown
  misc_feature (1)..( 3000): cDNA_ID_2132171_gDNA_ID_1620369_Annot_ID_154944 3000 nt of promoter + ATG
tctctctcatctgttacatatcacaatcttttgctttaaattgagatccttcttcaaagccgtatctctttctctagtgtaattctcctctgaaattcagccttagttcgtctctttcgttctgggtttctctgtaattgtagcccaattccaatcctgggcatgtatttcaaagtgtttccatcttcttttgtcaaagttgaagactttgctcgttttgaatccgtccgctagtagaatcttcttctttgaatcgattttgatatctctgctttatgggtttccacacttttgccagcaatgtctaagcttccaagaacatgcctttgactagattttcccggtaaagctttttgcttttacttcttttttcctggcacgagaaattaatgggttcagttgatgaggttgagatatctaagactagggtttcatgtcctcctgctctctcaacatctcataagattctcatcagtgaagagaaacctaggagatggtccgagagttcgttgcctgatgtctctaataggattaagcttttgaaatttggttccccttctgctagactcaagagaatggctgaggaaagagatgaagtttcacgctctgtcaacagctcaagctctagcagccacgatgtggtgtcttcccggaaaatcgagtgggcttgtttgatgaaaatgggtaagcaatggctacagaacccgttgaacatggttatgtttttgtggatctttgtggttgctgtctccggtgcgattctattcatggttatgactggtatgttgaaccatgctttgcccaagaaatcacagagagatgtctggtttgaagttaacaaccaaatcctcaacgcattgtttactctgatgtgtctgtatcaacacccgaaacggttttaccaccttgtgcttctctgtagatggaagcaagacgatgttacaacgcttaggaagatattctgcaagaacgggacttacaagccaaacgaatggatacacatgatggttgttgttcttttgcttcacttgaactgttttgctcagtatgcgctttgcggtcttaacttaggctatagaagatccgagagacctgccattggtgtagctatatgtatatcttttgcaatagcagctcctacggctgcgggtttgtacactattcttagtccacttgggaaagattatgatcctcaaggagatgaggagaatcaagtgcaggctgtgggagaaggaccggttagtaatcgcaagttatctcttgaaaggagatattcatttgcttctaatgatgtgagtaatcctgaatggagagagggagttcttgacatatgggaagatatttcattggcttatctctctctgttctgcactttttgtttgtttggttggaacatggagaggattgggtttgggaatatgtatgtgcacattgcgacttttgttctcttctgtttagctcctttctttatattcaacttggctgctataaacattgataacgagatggtaagggatgcacttggatatactgggattgtgctttgcttgtttggtttgctctatggtggtttttggagaatacagatgaggaaaagattcaagttgccgggctataacatctgttgcgggagacccgcgattgctgattgtacactctggttgttctgttgttggtgctctttagctcaagaagtccggaccgcgaattcttatgaaatagtggaggataaattttgcaaaagaagagaagaaaatagtaagattgatgatgaggttgtcgtatctgcattgcctcgtgaagacggtgtgtttgatccgagttgcttgcctaagaagatgaccacgacgatgatagctagctctactcttagcccgagcagacagaaagatgaaacttgcttgggagagaaaggtgatgaagctctaagtccaccttctcctccattcatacacagagaagctagttagaacttagaactaacagattttaatgaaagtttgttaatgtaaaaccagatatactatatctaattgaaagtaaagtttaaattcgttttggggtttatggaatttacgagttataaacaatgtaaaacaggtttagttttctttgaattttcacgtaggaatacaagtgttgtttgaagtgtttcagttagagaattatgtttcttctcatcatctcatgtgagcttaaccacattacgttgatttggaccttaaagtgaattaaaaaaagaacaacttagcattagttgcttatgcgatcaatggtctcatcacgaccctgatgagaatcgtgtctaccatccacgtaaaatcaacagctgataaagtattaaaactttggtcaagcgaacatgtagaaacgattttcttgttcatatttgatgcatgtgtagcaactggagttttagccaatgttttgtttgtgtagcaattgcagttttcttataattcttctaatttctgcaattcactgaatttttcttacaatacaattttttgccttgatatacatacttcataatacatcaacaaaacaaagaaatgtggcagcaattttgttggtgttttatgcaatatgcatctcaatggcaattaaattccaacaaacaaagaaaactgataattatttgctttttatttaaattttgtagtgtaaagaaaatgattgaacatgaatttttcaattccaaatttcttcaattgttgttgtcaattgtcatacctatgaatatatgtatgtccatgataattcattagccaatatatccatttgagagatgttcattagctactatttttcctagttgataaggtcttaattaattatttatttaaattgtaaatggtctttattttgtgctgctatttctactaaaaattttattaaagaagaagttgacaaaaaaataaaagaaaaataaaaaataattgatcgcactgtcaaaccaaaaaaaattgaaaaccctaaattggttgaatgggaaaatcg

SEQ ID NO: 1190 - DNA, 3000 bp, Unknown
  misc_feature (1)..( 3000): cDNA_ID_2132179_gDNA_ID_1620369_Annot_ID_154947 3000 nt of promoter + ATG
tgagaccttgtggtgaatcttctccggaagatccttccaaagacccgtcatgatcttctgctgaaacggcgataacgcgtaaaccaccgccttcaatttcaccggctgctttcccattttcgacgaccaaatctccgatttcgataaatgcaactaggagacttttcaagccggctaatatgcatctctccgtcacaaaacgctgccgtttaagtgtaaaggcttttaatttcaatccacttaagcccaatggttagaatatgggccttttctttatgaatttgctaaaatccacgtggacggtagagatgctacgatgcagagagcggtctatggtgagggttattacacgagatcatgacgttaacacgggaaacaggttgcttcaaaagaaatcaattcattcgtacgggcctttaatccacgcgccttcttcgcatccccacgcgcagtcgtgtgtgatgatggctaatcctccaacgttaccgatctcagaccattccggtggtggttcccaatctcagcaacccgtatcaacaccggcgtttcgcacgttcctctctcgcctctcgtcgtcaatccgccaaagcctatcgcagcggcgtccatggttagaactcgtagatcgaagcgcaatttcacgtccagagtctctcaccgatgcgtattctcggatccggaggaatctcccttacttcaaggtaaactacgtgacgatcgtctccttggtgctcgcgctctcgctcctctcccatcctttctctcttctcgttctcctatgcctcttctgcgcttggatcttcctctaccttttccgtccgtcagatcaacctctggtcgtcctcggccgtacgttttcagatcgtgagacgcttggtgttttggtaattttgacaatcgtcgtcgtctttttaaccagcgttgggtctttattgacctctgctttgatgattggtttcggaatcgtatgcttacacggcgcgtttagagtcccggaggatcttttcttggatgatcaagaacctgctaacaccggcttattgtctttccttagcggagccgccacttccgccgcagttgccgccgcatcaactcctgcgtcaggtcgtgtttgaaggactctcttctctgtagacaacaaactcaattactatgattcttttattgtatttctgaatgcgactatgtaaggggaaatgtagaattgatcttcttggttttaagctgagaaattcttatgattcaaacattaaatggattcaacaatatctcgcattactcttccttagctctttttgtgacaaagattatggaatggttgattactattaagctttgagactaattgtgtttagtgtgtttagatgttgggaactaaaagtgtccgacgtaaaatggcagtgtcatcattccggctgttttaacgaatctcgtgtaaatacttttgtttttggttatggaaaatgacatgtgggataatcatcgagacaaaggagtaacgtaacaaagaagtttatcgtgaatgtttgttaaaatgcattatgaaagatttgaatattacttcaagagaaaaagtctatttcgttattggcagttagtttattgtttgaacgttacactctagtacagtgcataatatgctatgtttgttaagaaaaaaacaaaaacaataaaatgaaatcatgagattgttaaaccaatatgacccaacgtcccaattcatccgtgttctgactttaggttttctgcatctagatgttgtttgtattccaaattcatctttagagtttgagtctttgagatatgaatcttgatttacatttatatatattttttaaaatgaatggatttagacctacatatattattatgcaatagtcaattttcttataaataattaatattgttaagttattgagaaattcgtctaatacgaatagaaaattatttacccattttttagagtttggataaccaatagaagatacaacaaaatcattaatctggttacatataattaaataatatacatgtgaccttgagtttttgtttacttttgtttgttaaaagagtggccttggtattaaattgccaaactattcttactgatgatgattaatgatcatttgtgtatttggtaagacaggaaaaacttgggatttaaggaagaagcttgagacacaagcactagaacgtctagacgtgatatgaaatgacttgagttcaattcaactaaactttgttgaaattatgctaagtgttcggtgcaacaacttaattacctcaactaagtctttgctccctttcaatgtctcaacttcttctcaatttcggatggcgccaaaagaactagtaaactatttttcaagtttataacttatggcgtggaatataaaaaaacatgattacgcaatatagaaagtattcataaaactaataatgttttgatgggttaatatttaaaaaaatatcaagataactaaaacaacctttaaagggatactaaataatatcatttttactaacatccagatatttatttggcactcgaatcatttttaagaggtgtttaatctaatttctaaaccaacattatattttgaaaatggtatcatcatgatcctatgtccattaacatattttaacatatattttctgccaacatttttgaggttgatcaactcttaaaatagaagaaaactaaaccatggttttccatttgaataagtgtgaaaggaagcaagaaaacatagccaacgaactgataaagacacataaatatgttggtgaccggtaatttaatttttttcttttgaataatcagcacctaattcttccaacccctaaataatttagtaaaaaaattaaattcaatttactttaactataaaagggatatttccctcttcataattctctcaaacccttctctcatatatctcttaatctcataaacgttaatctcaaatttttcgtaatctcaaagcttaaacacactta

SEQ ID NO: 1191 - DNA, 3000 bp, Unknown
  misc_feature (1)..( 3000): cDNA_ID_1396308_gDNA_ID_1620369_Annot_ID_154935 3000 nt of promoter + ATG
atgtactattgtagacatcatgaccacatgttttataagagctagatcactagtggccatgaaaagacgaatctttcgtgttataagaaagaaaaaaactctacgtatgaacatgttctataagccgattataaaaagatatatgtccatatataataatgcataccgtcacttgtgctttgatctcttcgtccgacagagtaggcttcccgtcagtgtctttagctattataaacatgtcaagaaaatcttgaggttctttcatcttcccatttcgccattgcatgagtctttcatcaacaaaagggtcgttatacttacttacatttctcattgcgttactcacaaccttctcatggccttccaagtccaagaaccttagccacgggacataatctgacaatgcaaaggcgtaaagatgggttaaaaccgtaaacaaagattccacatgttcaatctcttccaaccctggtcccgatccatcttcacttcctttaccaaaatgccttataccaaacatcatcttccgagctacatttccactgtattgccgtaccgcaagccttaaatcaataaccacaaaagcattaccacggtttttgacactacggttattgatgtaccggactaagttatcagcctcttcggttctcttttgtagcatcatttggaagctcttcttgctcgtcacgtgagatgccaccactctcctcatcttcttccactgctctccttgtggctccaccgcaacggtcaagtacccgcggctgcagtactccgtgcccatcgttagcggtctagtggcgaaaacggagtcttgcttcttcagaatctctcttgcaattctcggggatgtcacggggatcacgtgagtattcgcaagacggatacatgcaatatcggtgttgagttctttcatgagagaatgtatccaccggaacaccggtttgttcctccctagtatttccggtaggtttccgattaaaggccaagatttcggcccgggagggagagagaggtttctcgtagggctaattaacatggttttcttcttctccttacgcttcatagttaatgcaagaagaagcaaacctataataaacgcgagcattggggtggagtcaagcatttttttttttaaatctcaatttggagaaattatttgagttcgaaaaggttttttcttatctatgatgaggaataagctatttatagccatgaaacaaatgcttttgtttaagtgtaatctatggaaaataaatgtgctttaaatgttgaagaaaacaatgttaaatgaatccacgatttttcaacagctcatatgtaagacatgtttttttctttgattattccttatcccttataaatcttgtggatgttaaattggtaatgcatcattatgaaatccttgtcccttttaggtagcgccatcattagaaaaaccacgatttttcaacagctcatatgtctaatgtattacatgttgtgttttaagtacatttctatttaattaccaactttttacttttccaaattcgtctaaatctaatctctaaggataaatttgcttacgattccttaatccttatccctttaaaatcttgttgatgttaaattgttaatgctgtttatgaaatctttatccccttttaggtagcgccacgttaaaaacaatatggacatggagatttgggcttataaaaactgtaaatatttggcccacttaaaaattgattcagcttctgtaaatttaatcctagcagcttccattcggctcgacatgcgtagcaaaaggaatacccacgactatccatcaaccatgaaattaattaggaggcgaattaaaacataatcaaattacataaggactaattaagaaaagctagagattgtgattagagaatagagattataccatgacttgctgaagccaatttttggcactttgcacacattacccaatctctttcagttgtctcttcgatcctttgttcccacttggctcttagtttatgtgtcgaaagatgggcatagctttcaatagtcagtttcgatttgcagcagtaacacttacttaccagttcaaaaatgtgataatgatcgcaatagattgagatatgacttatgagtgatccccaaactcacggcttcgattagtcctcgcttcgatgccataagctgagcctctaaacccgtaatagcggagtcatgaattgatcctttcatgatttgggaggtcgagatagaagagaagacgaaaaagggtttttatacgttactgctttaaagacactctttatttctcttttttttttttttttttttttttgggtctttgtcatcatcagtttactttacgttactgatttcaagagccgttgtggagaaatgtggctgcttctaattttgtatctaatttatgtacgctttgtttcacatttgacatctgatctctttttactgtatcatagcaattctttcttctatctcttttaattattatacttctataccttcatttgttaggtagaatgagtggttgtggactgagtgcttgatccaaacacgtggcttcctggtgggtcgctaacaaacaattgagatcacaagctttggtagcaaaaaaattgaattcataaaaagaatacgtcgtcttttagatcacaagctttgaacgttagcaaaattatgttacctaccaccagtccctggcttattatatagagagagatattcacatttacaatttcgatattgtttctctaagatcgtaaaatagtacaccaagccatttataaatttcttcactctcagattcaaaataatataaattagaaagtaagtcttacactctttgcattcttttttattacaagtttatccactaaagtaagattttcagttctaacaagtttcaattattctcattgtctttttttcaatgctttgtttttttcctaagatttgtgtgttcttgtttatcaaacagtgggaacagag

SEQ ID NO: 1192 - DNA, 3000 bp, Unknown
  misc_feature (1)..( 3000): cDNA_ID_2132221_gDNA_ID_1620370_Annot_ID_154963 3000 nt of promoter + ATG
atatataaatttgtttgcaatctagttattcttttataattttaatatttttatttaatagaagaaaatatattaagatgatttacctccacgtctaggcgacccttatcaacataattttggtcgattattatcggatttttggtttctctaaatgtaagactcttaaaaagtatattttttgcgtatccctttccattctaaacaaaaataaataaaaataaatatcacttaaataaactatatcaatattgtcacaatagatccagctttagtattgaaaaactatttaaattttttattaccggccatgtcttaattctagctccattatccgtcctaatgaaagtgcaattagttacttggacattctcaactatagattcttctccatctcttcctacacttcccacactgtattttaattttatagataaagaagaaaatgtaatatatatatatatatagaatatataaaattagtatatgtacaatgctattgatgaatcacacacatatataccttattccatgaccaggtccacaattcatccttgcgatattgatattcatacttccgctgttaatagctacacaatcatctcctggaaagttttataagaaattttaaaattaaataatcttaaaataccatttgagattactttttaattagtgagtgtgcaagagagatatctagctatatataccagttccaataactgtgtcgtatatatcgacatcacttgattctgagatattaattccatcagtgttaggactatcgtggggtgctacgagttttatcttcgttattttaactcttttgcattcgctaatcgatatatggttttttggactgttgaatgaggttattccagttatcatgagatcgttgcatctttgaaaatgcaattgctgtaagaaaaattgaaagaaaaaaagaattcatcatgaactttccaaaatattgacgacgatcaatgtatataaataaataaaatattttcattttagaattcagaatgaattttagtgagaaaaagataaactcacggtaggccgtttagaagcaggcagtccttgctggatatattgaatatgaaaaaaagaggaaatattaaattaacacttttgtttatatataattaaaaatcatatcttttattgtgtatataaatttctttcaagattgccaaaaaataaaattgtttcaccttccaaaaagacgagccacgtccatgaattgttcccgaaccattgactgttaaaccgattatttccttaaaactaacccatctaaataacttatagtccgaccaagctgctttatttataggtgcaacaatctttccgtcaaactgcataaatgaatacatatacacctttattaatcagataatttgcacataaaattgtaaaaagatttataaaaatatcgataattaccttaacttgtacggaaggagatttacaagggccttggaaagtaagaggttgtagtaaaaatgttttgtttgatggaataatgaatgtttttgaattcccaccactaccacacatagcgctccatgctttcacaaaagcctatttattttatcaaaaaatcaaatgtattagaattcttaataactcaaattttgtgacaaaacgtatgactacgttgtaggaaaatgaaaaacctaataatagttatgtatactcaaaggctgtatgatattatattggtttgaatttttttttgaaaacttacaaaattcagatattttcataatataaaacaagataaaattttgcaatataatacctttgaatcatcggtaataccatttccatcggcaccaaattcaagcacatcatagatttggccgtttacaagaatagaatgcagtaaagtcaacaagaacacaccacgtagtatgatttcctacaacatacaaaatcaatgttagaaagaaagaaaacatactaacttttataaaaaactttactaacttcttatcattgtgtgatgatgatcagatgtaactcttaccattgtgtgatgatgatcagatgtaatgtagtgtatatgtatgtgatgttgatcacttaaatatacacatacaaaatcatgggtatatcttattaaaacatgttcatggatatagttttaaactttacatattttatgcctaaaatcattagttattatggatattatttcgcatataagtgatataatctctcttttatataagatttagaaataaataaaatagaatttgaagaaatagtaaacaaatacaagttaaaatagaaatgaaaatacttgaatataagggggtactaagtaaaaaacattttggaaaactcaaaaatagaattaaatttggatattgtgatctcattgcattattaacttatatttaacaaatacgagtaatattctgtgtaactacacagccattgacattgaaaactaaaatgcttttctaattatttggtagtgtgatttgcaatatatatagacagtaacttgaactaaaatctgatatgatgaacttattaatataatgtattaatcggtttgatgtacgataaaatgttttaaattatccactagtagggttgcatacatggtacattcaatataaccctttcaacgacaagaacaagcactaggtttctgattttaagctctaaactatgtgatttaatttatttgtttgaaaaaaataaagtgtgctagaatatgggatcatgatcatttccattctgaaaattaacgatgtacatttttttttaaaagatagtgtatattaattagtttgttatagttttgaccaaaaaattaaaataaaattatcagttagttaaatttaaaatccaatctgaaaaagatatatatgtaacaaaatttgtttttttaaaaaacactctctgcgtctggaaaaaaaaaaaaagattaaaaaccaataaagaaagtttcggaactaattagggcttccttttgcttac

SEQ ID NO: 1193 - DNA, 3000 bp, Unknown
  misc_feature (1)..( 3000): cDNA_ID_3061081_gDNA_ID_1620370_Annot_ID_154973 3000 nt of promoter + ATG
ttcattggccttcgcccgtttcttgctgctcatgggatttctcatctcacaagcccgcctcatacaccagaacataatgggttagctgaacgaaaacatcgtcatatcgtagaaaccggtcttgcgcttctcactcatgcgtcattacccaagacattttggacgtatgcttttgcaactgcggtgtatctaatcaataggatgccaacggaggtcttacaaggcacgtctccttatgtcaaactctttcaaatgagtcctaattatcttaagctccgagtatttggctgcttgtgctacccatggctacgtccgtacaacactaataagcttgaagcacggtcaacgatgtgtgtgtttcttggatattcgcttacacaaagcgcatatttgtgtctcgacatagccaccaaccgcatctacacttctcggcatgtccagtttgttgaatcaagttttccgtttgcttctcctcgaacatcggaaaccgactctacacagacaatgtctcaaccgaccaccaccaatgttatcccgcttctacaacgaccgcctcatatagctcctcctactgccttgcccttgtgtccgatctttcactctccgccgcactcaccgtcgtctcctgcctctccaccttcagagcatgtgccattgaccgccgcttcatcatcgtcaaacgccattaacgacgacaatatttcctccacaggccaagtaagtgtttctggcccaacttcacaaagcccacatactacacctacaaaccaaaacacaagcccactaagcaaaagcccaaatccaaccaatacaaatcaatcccaaaattccacgcctcctacttcgccaactacgtccgttcaccaacactcacctactccgtcaccactaccacaaaatccaccgcttccaccacctccacaaaacgaccaccctatgcgtactcgagccaaaaatcaaatcacaaaacctaaaaccaaatttaacctcaccacatctctcacgtcttctaaaccgacaataccgacgacagtagcacaagctctcaaagatccaaattggagaaatgcaatgtcagaggagatcaatgctcaaatgaaaaaccacacatgggatttggtgtcaccggaggaagctaaacatgttatttcttgtaagtggattttcacgcttaaatataacgttgatggctctattgcaaggtataaggcgcgacttgtagctcgaggcttcaaccaacagtatggcattgactattcggagacgtttagtccggtgataaagtcaaccactattcgtactgttctagaggtggcggttaagcgaaattggagtattcatcaagtcgatatcaacaatgcatttcttcaaggaactctaaacgaagaggtgtatgtttcgcagcccccgggatttatagatcgtgatcggccaagtcatgtttgccgcctcaataaagctttatacggcctcaaacaagctcctcgggcttggtatcaagaactacgacgatttctcctacaagctggttttgtcaattctctagccgatgcctctctatttatctataatcggcataataccttcatgtatgttcttgtatatgtcgatgacataatcattgcaggagaaaacgctcttgtacaagccttcaatgcctcacttgccagtcggttttctctaaaggatctagggcctctcagttatttcttggggatcgaggccactagaacttcacgcggcttacacctaatgcagcgaaaatatataaccgacttactaaagaagcacaatatgcttgatacaaagcccgtgtccacaccgatgtcaccgacgccaaagctctctcttctctccggaacggctcttgatgatgcaacggagtatcgcaccgtccttggcagcctccaataccttgcgtttacacgcccagatatagcttttgcggtaaatcgcctttctcagttcatgcatcgtccaaccaatgaacattggcaagctgcaaaacggattcttcggtatctcgcgggaacaaaatcgcatgggatcttcctccgctccgatacgcctctaacaatacatgccttctcggatgcagattggggatgtgatctggatgcatatctctcaaccaatgcctacatcgtttattttggtggcagtccggtatcatggtcctcaaagaaacaacgaagtgtcgctcgctcatctacggaggcagaatatcgagctgttgcaaacaccgcctcggaactacgttggctctgctctcttcttttggaaatgggcatatcacaaaccacagtcccggtcatttactgcgacaacattggcgccacatatctatgcgcgaacccggtgtttcattctcgtatgaaacatgtggctcttgattatcactttgtcagaggttacattcaatccggagcattgcgagtttctcatgtttcgactaaggatcagctagctgacgccttaaccaaacccttaccacgtccacgttttacggagctcaatagcaagattggagttcaagaattacctccatcttgagggggtgtataaggagttgtatatattaaggatataattgtcattagtagttgtgtataccctagactaagtactatatatgttgtaacacattcatcataataagacaattcactctcttatcacagattttacaagatgaaccccaaaatcagaaaacccaataattcatcttcgaagaaggtcacagtttccgttctctctgttttcttagtgttcgtcttcgttaatactttcttctacccaagtttttactctgactctggctcaattcgacgcaatctcgttgattctcgagaaagtttccattttccgggaaattttcgtaaaacgaaggtttacatgtacgaattgccgacgaattttacttacggagttatcgagcaacacggcggagaaaaatctgatgacgtcaccgggttgaaatatccgggtcatcagcatatg

SEQ ID NO: 1194 - DNA, 3000 bp, Unknown
  misc_feature (1)..( 3000): cDNA_ID_2132260_gDNA_ID_1620370_Annot_ID_154978 3000 nt of promoter + ATG
gctacagaacaagaagtttcttccatatatttcggttttcttagtttgttgtgatgtagatatgatctccgtagatattctaagatagtgtttgtaatctatttaaacgcttgtaatttcagttctgaacatatcgaaaatacatttctcttccattatgatctctgaatctatagacagtagccctaggaatcgattttgatgttgttgttgttgttcatgctctagggatggatcgcgattatatcagcgaattgccggattctttactaactcagatactcttagagcttcgaaccaaagattctgttaagacaagcgtgttatcgaagagatggagaaatctttggttaaacgttcctggactcgaattattcacccttcaattcacatatcctgatcgcgaagaaatctttgtaaggtttatggacagatttatggagtttaagtgcaggtcacgcctgaaaaagttcatgataacgtatgtcgattgtaaaggttatcgagatcgattaatggagttgatcggtacactggttgatcatggacttcagcatttgtatgtttttatgcatacttttgacagagttgatttcaaacgtcaaaacatttacaagagcaagacattggtctctttgaagcttcataacgtagagttaaagaattcagactttgttgtttctctaccttgtctcaagatcttgaaactggagaatatttgtcacggtgaggatggtcctttggttgtggagaagctcatctcaggatgttctgttcttgaagatcttgagctgattaggccttttgatattaggacacataaagttcttctgcttctgcgtgtgagctctcagactctgaaaagctttaccttacattttgcgatctataaggatcgtacagatttttcagttgagattgatgctccaagactcaagtatatgactgttgaacagagtcaatctgatagcattgtggtaaagaacctgagttccttgttcagcatcgacattggtactaaatttaatcctttgagacatgaggatctaaggatgcgtaatgttttctacgattttttaaccgggatatctagtgtaaaacatatgatcatctgtttgtggagtctccaggtatgtgtttatataacaatttaatgtattaattctcaatgaaacatatctgatttgcatttattcttcttgcagaggttttctccttattcaaaacccggactgattcccaaattccagaacttgtatcatttaaaagcacagatgtggagctcatcaacacacttattggaagcgtttcttgagagctgcccaaatctgaaaaacctcatcttggtaagaagaatctgtgattttggcaaaagaacattgttgaaacatatcgtaaaaactcagcttgttcatttcgcaggaatataatgttgaattggatcgagagcaagtggactttaccaacgtgcctcaatgtttaatatcgacgctggagtatgttgagattaaagaaccgaatgagaaaagtacgattaaactagtgaactactttcttgagaattcagcagtcctcaagaaacttactctacgtttctcatattcatcttctatctacctaaagagctacaagaagcttcttacatcaacaaagctttctcccacatgtcaagttatctttggttgttgaacattgtttcagtgacgttattcctgtagtttggctttttgttgctttgatttcaatttcaggacagagtttcagtttaattatagttttctcttttttttttaataaaaatttttattttcaacataataattgtagtttatatacattttaattaataattgcatttctctggttgtataaaattctaattgggttttggattcataatttatttgctattaaaagcttacgttactgttggtttaatgagttcttcagaatcctaccttgatcgttacgtttctgtgtaatttttggcagaaatttattaaaagctttccttactattcgtttggtgagttctacagatatgctattaagaacttcactgaaagatttcttgagtttaacagttcaagatgaagaatgatcatcacagccgttgatagcgggattcaacatctagatgttgagacacaaaatcctagtcctaggtatgttatagatggaatacctatgaacatttctaagagcaggacattggtgtctttaaagcttctataagaagggatgtagaatccggagttttgtgtttctctaccttgtctcaagatgaagcatcttgaaaatataattttatacggaaaccatggtcttgtgaagaatctcatctcagggtgtcctgttcttgaagttatcatttctaaacatgtatctgatgtcagtgagagcatgaacattatcattatggtttacgatgttaaaaatcttatggtgttaattataatgtcttgtacagagttggattgtctcatatgcttgaaaagtcgtattgatctctgtttcttggagtagtttaatcatctttgcattcaaagtggtttcgaaaagtcccatggtcaattgtttaatatgttggtatggttgacttcaaggttctctgttcgaaacatttgtccaaagaaacaacattttgttttttagaaataacatttgtcaaaagacttttcttctaatccaagaagcttctttggctcgccaatattgactcaaatattttcacctttatcaattacgtaccatctaagaaagcagttgaagactcgctcgctacatcatcctggtcaatttctgatcgaaatcgtatcttgcattcatttttgtgttaggtgcatatttactttattcattcttgatcacttaagtttttgtgtgtgtttctggttaggttgtaccctgcagatttaattgggtaatctatagtttcacaatgatgttttaatattataagctttgtgttttttttttactctccagtgtacatcaaca

SEQ ID NO: 1195 - DNA, 3000 bp, Unknown
  misc_feature (1)..( 3000): cDNA_ID_3061070_gDNA_ID_1620370_Annot_ID_154982 3000 nt of promoter + ATG
tatatatccctcaatgtcttaaacatttgaacagggattcaaaaattgatcccttttctctccaggcagtgaaccagttatatgaagcagtagatagatgtgaggaagtactcggaaaacaacgatacatctgcggaaacactttcactgaagcagatatccgattattcgtcactctcataagatttgatgaggtatatgagtcaacttgtcttctttgtttccaaatagaaaatccatcaggttcttgacatcatctttttctgcgttccaggtttatgcagttcacttcaaatgcaacaagagactcttacgggagtacccgaatatcttcaactacataaaagacatttaccaaatacacggcatgagtagcaccgtaaacatggaacacattaagcaacattactacggaagccaccctacgataaacccattcgggatcatccctcacggccccaatatcgactactcttcgcctcatgatcgcgacagattctcctcgtgaaagaaacaaacatcaaatgtcaatacttgtgtgtgtgtgtgaaaacgtttcaagtcatgttatgttctacattttgagaagtgaatgtatgtttggagattaacctagtttttgaaacactttgacacagatcattctcttttatttaagcttgttgatatgcttattgtgttgaaagatgataaagagagagagggagagagagtgtgagcatgaaagcttttaaatgacgtttgagtatgatcacaccattttgcaaataagattaataaaaccatttctttttgtatgatcacaccattaataaaaccatttctttctaatgtttttttttttaatctatttcttggttttctactatagataaaacggcttctttataaagtaaatttacaatgatttgcctttttcgtccaaaaaaaaagagggatacatttaaaatggtttatgtttgtctatgtattttagttgattttttattcggtaaaagaaaaataatttacaattatatatggattttatctattattaagaaaaatcgttaaaataataatttttactcgtgtgcattttaaattttatcaatattctcaaaattccctaaaagtatatttttgacctatatatgtagacatcattgaacaattatgtattgtacattcaaaagattgtgcaggaatatacactgtaataagatccttattcggctctatatattttaaaaagttatttatcccttattttttcacaattatttatatattacttaaactatgtaaatatctaatgaactaaataatagggaatcttgcaaaatctgtcatatttcactctatttctttcaatttctgtcatattctaaaacttttttcaaaatctgctacattttggtccacgtggaattcagtggacgaaattacccttaaggtgggtcagcgctctgacgaagatggtgacataacaacttttggccgatgtgatgatataagacgaaaaatcatggtggaagcataaaggattaggggacagaatagtggagaacagctggcttctactgttgttattgggtatttaaaaatgacttgtttaaacaaattggttatccaaaattctgcgggggacaacgtaatatataatacattaggagacatgattacctgatatcgggggacaacgtaatatataatgcattaggagacatgattacctgttagcagagaacaattggagcaagacttttgttttagtctccagatcttgtccccgaatagaaattctctgttgcatctacgttttgtcctcgatttcatcatcttgctctattattatgaatcatacatcttatatgcaattgttctcatttaagaattttgaattttatttagattttcgccatctattttggtccacagattagttgagcgttattgttttcacagagatgctgaaaccatctatttttcgccatcttatatgataattttgaaagatgataaaatcggggacaagatctagatacaacagataatttatgatgaataaaattgggaaacaaatttaattgaaagttatatatagagaatatgtgcaggttgtcaggggaagtgatagaaagacaaaagcttttcgttttgtctttggaaaaataatggtgtatggtcaaaatgcacggatttcgaggaaatagagataaaatatagaagaaatggtgaggataaaattgacatttcccatctaaatgtggcatgagttgtaagacctagaaaaataatgacacattatataaggattttaaaaaatatggcataggatataatttttcctaaataatataccaacaaacaataatgttattaaaactaaataaaaagtaaaaatacatttggcaaacaaaagcgtgtcgctgtttcctccgattatggttttgagaaaaaaagaaagaaaaaacaaagtcttcgtcgtccactctcaagctcaacaaagttcttgggtcctcctctctattattaccacttcttcaccaatccttttcgaagagttttgtattcacgacatgagaaagatcccaacactactgatcggttagtacttctttcttctctgtctaataagcccccaaatttcccaagatttttcttttgattttgattagtaactccattgtttcactcaatttctttagctcttttcatgtttccttttctgggtttatcacaattttcaatcttgctcattattttccaataaagctctaacctttaagatacataagctaatttgtgttcttgagactttggtattagtccctctggtttgatgattattttcttaatgttgcttgcttcagtctgtttatatttagattaagtttatttgatgagctctcttcttgtttatgtactttcaaattttagtctttttaaaactaatgtacatgattcagttttagtataggttggtgattgtgtatcttcattagtagaaggttaaag

SEQ ID NO: 1196 - DNA, 3000 bp, Unknown
  misc_feature (1)..( 3000): cDNA_ID_2132264_gDNA_ID_1620370_Annot_ID_154979 3000 nt of promoter + ATG
cactgaaagatttcttgagtttaacagttcaagatgaagaatgatcatcacagccgttgatagcgggattcaacatctagatgttgagacacaaaatcctagtcctaggtatgttatagatggaatacctatgaacatttctaagagcaggacattggtgtctttaaagcttctataagaagggatgtagaatccggagttttgtgtttctctaccttgtctcaagatgaagcatcttgaaaatataattttatacggaaaccatggtcttgtgaagaatctcatctcagggtgtcctgttcttgaagttatcatttctaaacatgtatctgatgtcagtgagagcatgaacattatcattatggtttacgatgttaaaaatcttatggtgttaattataatgtcttgtacagagttggattgtctcatatgcttgaaaagtcgtattgatctctgtttcttggagtagtttaatcatctttgcattcaaagtggtttcgaaaagtcccatggtcaattgtttaatatgttggtatggttgacttcaaggttctctgttcgaaacatttgtccaaagaaacaacattttgttttttagaaataacatttgtcaaaagacttttcttctaatccaagaagcttctttggctcgccaatattgactcaaatattttcacctttatcaattacgtaccatctaagaaagcagttgaagactcgctcgctacatcatcctggtcaatttctgatcgaaatcgtatcttgcattcatttttgtgttaggtgcatatttactttattcattcttgatcacttaagtttttgtgtgtgtttctggttaggttgtaccctgcagatttaattgggtaatctatagtttcacaatgatgttttaatattataagctttgtgttttttttttactctccagtgtacatcaacaatggctacaccaatggaaaacgaaaatccgaattttgctagaaccgcaacatcgttccgaaactttgtttcaaaagatcctgactctcagtttccagcagaatcaggaagataccatctttatatctcttatgcttgtccatgggcttctagatgtcttgcaatcttgaaactcaaaggacttgacaaagctataagcttttcggttagtaaagacgacacatttagtttcgatttttacagaacataatctgatcagtttgttcattagtctgttcaaccactttggagaaataccaaagaaaacgacgagcatatgggatgggtttttccagattcagatacagaggttcttggagctgaacgtgatcatatcaatggtgcgaaaagcgtaagagaactttatgatatcgctagctccaactacacgggcaaatatacggttcctgtaagttcttttaatcatggtgtggtctaatcttaagtcttattttgttacgtcactaaacattttcggatatttagagatattgttggtttctttgtttttggtaggttctttgggataagaagcttaagactatagttaacaatgagagctctgagatactccgaatgttcaacaccgagttcaatcatgttgcagaaaacccttctctcgatctttatccacccaacctccgagccataatcgatgagactaacgaatggattcacgatgggataaacaacggtgtttataaatgtgggtttgctacaaatcaagaaacttatgatgtggtaacgtaactttgcgattttcttatcaatattgtaattaaaatttgattccaacattttaattatttgtctctctttgcaggaagtgaaacgattgtatgaagcattggaccgatgcgaagacatactcagaaaacaacggtttctttgtggaaacactctgactgaatcagatatccgattattcgtcactgtcataagatttgacgaggtgattttacctcgaattgttctgttttcggattttcatatatacgttttgttcaatttaccatatatcttttgagaattttgctttgcaggcttacgcggtgatcttcaaatgcgataaaagactcgtaagagagtattatcatctctttaactacacgaaagatatctaccagatcgcgggaatgagcagtacagtaaagatggatcatatcaagcaaaactactatggaagctttccttctataaaccctcttgagatcatcgctcatggaccaaacattgattactctttgcctcatgatcgacacagattctctttagaaagtgactataccagacttgagttatttgagagtgcaagttttgtttgtgaattgaaattaattgaaatttttgattctctttaaaaagtgactattaattaaaatttttggtagttttttttaagtgaaacactaatgcttattttgttttccttttttacattcttaataataagttttgtttcgtccaacaaaaaaaaaaaaaaccatttacaaaataaagttacagaaaacacaaacgcttcgtcggagctcagcttcccgcttcagaatcggagttgaaatcgaaaattttgaaagtttttagaatctcacttccataacgcttctgaaaaaaacactttgaaaacttattggaagctgtagatttcattttggaagtttacgcttccatttaaattttgattattcacaaataaataagaatcacataattatttttgatagtttttgttttacaaaaaaaaatatgattttgcaatttagaatattttgcatactagcctttctattaaaggaaatcgctaaccgaaatcgaaagtcaggaaaaataaaaactaataaaccaaaactctctaccggagaaagagggtttgaaactttctatttgtcgtcgtgaggctgtcgaataataaagttgactttatgcaaatttgaactaatgactttgggagcgaagactttttacaaaagaatgtaaagagcgattaaaagcttaagatccacgaaaaatccacttccc

SEQ ID NO: 1197 - DNA, 3000 bp, Unknown
  misc_feature (1)..( 3000): cDNA_ID_3061077_gDNA_ID_1620370_Annot_ID_154975 3000 nt of promoter + ATG
gccagagtaaatgagtttatcctggcgtttccagagtttgtattctggattgggagaggtaacaccatggacagtgactgtggtgtgaggttcttcgatcgaaccatcaacgtaaccggcgaggtcatacccatccaatagcgcatgaacttgacgacgccacatgagaaagtttgttgatgtcagctttgtgacattggacatgttcacattgaggagagaggtagaatcagcaacaacaacggtttctgaggaggaagacatagccggaaatgatgaagcttgaagagcaagcttgtagagaaagaaggggagcgagaagaagaagaaaggtcgaagagagaggcggctcttttgttttaaaaaaaaaaaaaaaattaggtcttttagaatcactgctctgataccatgtgataagagagtgaattgtcttattatgatgaatgtgttacaacatatatagtacttagtctagggtatacacaactactaatgacaattatatccttaatatatacaactccttataaaatctactaaaagattccttttttgtttcttcttcttcaccaattcttcagttgaagaaagagcttaaagatgtacagtatcagaggaagaagaagagattgagtttcgtgaaagttgtattttcgagtaaaagatattatcgggaatatagaaaagttcatcttcacgagacatcgcgtgttgtgttgtttgtggaaattgacgtttgaagttcaaattaaaattaatcacattaaattagtccaaacatatatctcttgttctgtaataaattctcgttgacgaacgattatagtatgctttaaaacaagttaatgtgtgtttactactttcattttctttttcgttaactgacttttattaatgaaatgttacaagtctaacaaaacagcccaattacaaccaaaaaaaacttaatacaaaaaatcccaaaaaatgtccacaaagatggaaattaagtttttgttagggaaaattaagtccaactattttatacatttacaaattttaagctaaaaattggggaaaatatgcccaaattttcaaaaaagtttcaatttattccaccaaaccttaaaaataatttattaccttagaaattaaaaatattttattgccctaaatccccaaatatattgggcccgatagcagaaatccccttattattaaaagtgaagtacaaattgaaattttgtctaatttgacctcaattttgatttcaattttatattttgttctttgctattcaaaatcattaagggtaatttggtcttaacaatctcttagactttatatgatccgattcaatgtaaaccattcaataaaattaatttccttcaatctaagttattatttgatttaattcaaaaaaaaatcccaattattttttagttatgtttaattcaaaaaattgtatttataagtttaggatatcaaatttattcaaatatttagtataagaaccaaataaaccgattgcccgcggtaaaccgcggcttaagtcctagtgtattttataacaaaggtaccaaactagtaattttatctcatatatagttattaatttacgattctaatgagttatattcagatttattattttcttattttgttatttatcaaattttgttaattttatactaatccgacttaaaaccaaaattttattattatttttattgtgtttattaacttttttctaacatctcaaaactttcattaaactgtacacagataaatacaaagtatatatatttttttggacaaaaaatacaaagtatatatatgcccaaagtggtaggagaagctttgatgaagaatgaaactcctacacccgtgttggatcttttctgaaaacagaaacatatatttgtttgggaaccaattggtttactttagagaagagagtgcggtaaacttcagtatccaataccgaatgacatagaggagtgtgccaatcatgttaaaaactaatttttgtgagaaatagtgtttaataccttaatcattattttatttttaacatcagattattaactcgtaaagagatgttacaaatatcgtttcaaccatataggtggtacagagaaagtttaacacaaagagttaatagattgagccttcttggataaggtatcagcagcggcatttctttcccggttaacatgtgccaatgaagagaacgggagcttcgcaatccagtggcgaatatcgtagagaagggcttttatcttatgatgatcacctctaatattaatcaaatttactaactccccattatcattttcaaaccacacataccgtaatccttgagtccaagtcacttgaagggcatggagaaatccgagagcctccgcttggagaggggagcttgattgttgaagatttgcacatcctgatctgagaaactggccattacttgagtatttgtgaagggtcttccttgagtataaccgctatcaaagttgcattttatctatccaaaaggcggcagaagccattgtctacatcggcctcctgattgggtacgtggcgaatgtagactctccgtgtttttggtttagagactgtgttgctttcaccattgactcccttccttacttcacagttgggactgcgataaccttttcaaacccaaaaaagtaaaaggaattcatagagatttttctatagttttatggacatatttattgtttaaggtttatttttattttttggcccaaacccaaaaaggtaaaagaaagaaaccctcgtaggatgtcacgaacccgatctatttaatgatcatctctctaaataacacttggcgtcgttggcgatatcttcggcgacaatctgcagtcaaaacaatcgacggagacggttagttcatcatttatccttggattacttaggaagttttgatcgactttgaaacatagaaattaggaatcgatgttgttgttgacttgtgttgttcatgatctaggg

SEQ ID NO: 1198 - DNA, 3000 bp, Unknown
  misc_feature (1)..( 3000): cDNA_ID_2132238_gDNA_ID_1620370_Annot_ID_154972 3000 nt of promoter + ATG
gtcccaaatttttcggtatatgtgattaaaagggtttaaaagtcttaggtaaagaaacattaaaagccaattcggttttattgtttgtgttatgttactagagtaccttacactatttcgtgtctttgatcttaattttaaatcgcatggatgatccctagctagaataattgtatcataagcaaaatgatcaagagtggggctcacttgtctaatgcgttttttgcagcatctctaaccctactctattttttctctaaaactctattttagaatacattggcttcaacttctctctatatgttactctaaaatatagtaaatggtaggattgttctagatatatagtaactctattttatttacactgcctctattttagagtgatacattggaaagaaatcatgctctattttagaattacattgagatggtctcaatgattttttttatatcttatgaatgccattatgacttgtgatctgtgtgtggatataagtaaagtctaactatacaggtggggtattaattgatttcttgatgatttttatagttgatatatatgtgattatttttgtctaactagcagctagctatgagaacattaaattaatttattgtcttataaccgagaagagtactatatacttctgttggcccggtctcgttggtttctctgatgcatattgcgtaacgggttttggtgttttcgtggagagttaaaagcggttaagaaagagcttcacatacatgatcagtgattagcaagttttgttgcctcgcaattggttatatgagacattttaagaatgctaagtggttatttgattttcttgttttagttgtatgatattttattgtattgacatggattactactgtgtctctttgtctagtttttgttttgttttttgattgtgtaaccaactacccagttttgcagttaagattatatggattaatttaaggctcactcaaatccggtcaactattctaatcttctttgtagatcaatgattaataatggaatcaattatgattaagtaaaacacaatgaaaccattgaatcaaacgttcttacagaaaaaaatacttcttgtttttcctcagcaaatagtttcctcaaaaaccattaccttccatgggcgcctccttctccctctttaccgacgttggaccgatcccgcctcagtatcaagtgttcatcaacttccgaggcgaaaaacttcgtgatgggttcctagggtttcttgtggatgctcttttaaaagagaatgtcaacgtttttatagatgatcatgagcttagaggcagagatcttgatcatctcttcagtaggatcgaggaatcgagagtcgcattgacaatcttctccaagaacttcaccaactcaagatggtgcttagatgagcttgctaagatcaaagaatgtgtggatcaagaaagtcttacagtgattcctatcttctttaagatgaaaacagacgatgtgaagaaactgaaggggaattttggagacaacttccgggacctgaagttaacgcatcgcggcgagcctgaaacttatcggagatggaaagatgctatactgtatgtttctaagaaaactggcttgtcttcgtcacgatacaggtctggactttgtccctttgcttatgttctttgttggaaacttggaatactctgtttcttgactctgttcttggttagttcaggacataagcttgttcactgacagatcttttgaactctgttatgacagtcgccagaatgatttggtcaacacaatcgtcgaggaggttaagaaagttctaaacgatatcgccgagatcgaacgacaaattgctgaagagaagcgcaaccatttggcggcaagaacagatgaattgattagacttgttgtccggttcctaagtctgtttcttctttttacaatagtttttggtccttatgttttaggccttctcacttttttctcttttcttgtgggtcgtttgataatcaatcgagctgtggaaagtgagtggtgaatggtaacgtttgcgtttctatgagaatacgtaaacgcaaagaatctgagactgagagtttcattttggttacacattgttgcattcgatatttttttctatgaaataatttgatttcgattagtttgaccttgcatcaattattgataaaagtgattacgattaataacactatctcctttataacctaccacctaagacttttggtcaactactagatcaatgagacttccacatgttttatttggttatgatcttgaaatagaagaaaaaatacaaatctaaagataaatgtttctttcaaagtaaccacttttcactcttttgctttatttttcttgtgcaaaaagttcccaaagtctccgcttctctattccaaacagttaaaacccaaagaaacacatagtctcttcgcttgaccaaagctcaaaaaaaggtcagaataattcatatgaagttgttgagtgtccctaaaaacacgagatgtctaatgaagtcatcaagcagctcggtagtcgtggtcgtgcttgaccaaagctcaataatggatccagcacgaccacgactaccgagctgcttgatgacttcattagacatctcgtgtttttagggacactcaacaatttcttatgaattattatgacctttttttgaaaaaaaagtagttaaatctaaatatctaatacaagaatagtttaaggatagtttacatttgttcattgaatatagatgaacaaatatctaaatatttgtcctatatttccaatttttccataaaaaataataaagaagacagttgccaagagttgacttttgaaatgaatttttcctaaaaaagaaataaatgctttgacttttgaaatgaattggtccaaaacaagaaatgaatcttttacttttccagcttcttcttctccatatattcatgaagaaaaattaaagcaagaaagtctcaactctcaaccctccc

SEQ ID NO: 1199 - DNA, 3000 bp, Unknown
  misc_feature (1)..( 3000): cDNA_ID_1830914_gDNA_ID_1620370_Annot_ID_154967 3000 nt of promoter + ATG
ggtttgtagagagattggagaagaatgttaaagggggtgactttttttgaagatcggatggattttttttttctcagagatctcaacagggagagaaaaaagacaaggaagacggtcacttcatggttaaaaaagtttgttggaaaatgaactaaaaattctaaatttagcatcaaagacacgacgagaaagaaaagagacagggtcaaagattttgtttttttttttaaaaagaaatatagttcactaattaaatcatggttaattaccttcttatttgctaagaaaatttgagacagttaactaaaactcacttttcttcgtaagcattgtaggaattcggtactattcaaaaagagggaaaattccaaaacaaaaacacaattatttattaattagacgtttaatatgtaatactttatggttagaagaaaaatatgcatattaataaaaattgtgcaattttatcttcaaaaaactaattgatgttattttcatatcaataattttacaacaaaattttaattttaattttactcttactagttcaattaatcattaatatttaagtgatgcaacattaattttattttatttttaaatttactgtttattaatattttgtttctgtattcatcccaaaagattttgtttttctaaaatagattattttatttttaaaattcaagagaaaacaaattaaccatttttatgaatagataaattttgagaaatacaatgactttgggattgagattttgtcgaaaatacttttattggtgaagaatttaaattcaaatagagagtttctcacgacgaagaagaagttcatatcgatgttcgttgatatcatatccatcacaacgaaaaaaaatcgtgaacggctatcgaattcgatgttggaaaaagagggcaaaaggagattgtttaacggcgattcacatagcgattaatcgagaaaatctagaatcaaaaattgaatcctaagagaaaacgtctctttcattttctcctaattttttatgttgaattttaaaataaatgaatatataatagtaaatgaaattttaaaattaatgtacataaaattaatttctttatccaaaagtgtaaaattaatgccacgtcatcttaaaaactaataattaattgagatagtacgtgcataattatcatatttttttatgatatcgttattatgaaaataaccacatttaaatgtttaaatattaaactacacagtttattaatctttttcatccaaccaaaaactattagatattaaacgtccaaataaaaaatgagattttttcctttcaaaatatgtttacaaaattgggctttttttcttttgaattttgattttatacttctcaacctagcaaaaattcgatgtcggttataaaaataaatctctatcaaaaatttgttacgtagaggaatacgactaaaggaagagaagaaaatagggctatattaatttatatacccagaaaacataaaaataaaaaataaacttataattttttttataattagttctctttccacaacttctataagttggactaaaataccctttcgctcataataaactaattaacaacataagaaaattgttaccgacatcttttatatgattcagatgatattgtttatcaaatatataagtaagaatatattatgaattaactgataactgttatgttaacaagataacaaaatatatagcaataagtttataactatattgtgttaaaccatattgtatcgcgataagtttataaatatattatgttaaattatcttgtaccaataattttttgttgttcattatgttttgttatttgttaattattttaatatgatgtaattatattgatttgatatgatatacatattattttgatataaaatttaatacttatccattaaaataacgtgtgcataatcaaaatccggattattatgattaaatcctcttattattaaaagagaagtacaaattgaatttttgtctaatttgacctcaattttgatttcaattttggattttcttctttgctattcaaaatcattaagggtaatttggtcttaacaatctattaaactttatatgatccgattcaatctaaaccgttcaataaaattaattcccttcaatctaaaccgttcaacaaaaataagtaaataacaaaaaaaaatcccaattattatttagttatgtttgttttaaaaatttttatttataagtttaagatatcaaatttattcaaatatttagtataaaaaccaaataaaccgattgtccgcggtaaaccgcgggttaaatcctagtagatagttaaaatgtatagcaaaatagaatgcgtaagattaaaattttagtttttagaaatttactaaacaaaatacagaaaaggtgtgttgacaactatttaaaatttaaatataatcaataagatatagttaaagttattaagtgtatagcaaaataaaaattgtaagaataaaattggatttaaaatttttttagtaaattaaatattttaaaaatagggattatcatttactgtttagaattcaaatatcatcgataaaaatttatactattgttttataaatccgcttatctagacgggcctaacctagtaaatatataatacacatcttatcattcggtcaaaatattatgaaaacatcattaaaatttgatgattacattccataagtaatttgttaaagcattatgcattttcctgttctatggacattaatttgaaccatacgactccatctaattcacttgttctcggcagctagcattcgaatcctgacttttcaaatacaaattatcggtcaagatgggtgtgcgttacgttcatttacaaatcactaaaaatgagtggtgaataatcatttggacaatacggatacattcatcgaagttgactccattatcctaccgtcgtctcctaacaatcgaagcacaactttgca

SEQ ID NO: 1200 - DNA, 3000 bp, Unknown
  misc_feature (1)..( 3000): cDNA_ID_2132235_gDNA_ID_1620370_Annot_ID_154971 3000 nt of promoter + ATG
gtttcaatgtcttgaggacaaatgagtttgagttttgtgatattagcccatgacaaatcttgaattttgaatgatattgggctggtttgaatttggtccattagttttcatcaaaacacaagaggggtaaaacggtctttgactatttgctgtattagaggagggctgtattagagaggacagaagaaactaccctatcagcctattttttaaaaaactgtctagttctcaaattatttctctaaaaactgcctagttctcaacttatctcattatacttctaatctagaagggcatatttttagtcataactcatttttcactttttgttgtttacttacacatattaatgcattttaactttatttgtctttgcccatcaataattcaaagattattattctatggtttttattgtccatgcacttgtttttaactatttttagtcagttttaatcatttctttatacatttttagactttgaatttcagtcacaatagtttatatatgatctgatttgtgttgttaaaaatttatttataaattattccggtaaagttttcttacttaaatattgaactacattttgtgtgatatatagttgttaaaaaatcatttttatacattaaattatatttttattttgcctatggcatcaaaaacctttggcacggctctgtgtacgccgaatgatgaatgtgtaagtgacgaggaagaagatgaaggcactgggcttactaatgggctgcgtccgagacagtcctcacgtgtaaggaagcccaataagaagtatttggattaagagagacttcgtctccacattttcaagttctgcaaataagtgtggaagtggtctccctaattgttaggaaccattatcacctctttcccattatttcccaaattgtaggactggtgttcactccattgcattgttgttttgttcttctatttaagaaatgaaaaagccaaaaagaggcaatatcgattgcccaaaaatctgagtctcattgttctttctttcaagctttcttttaccttcggtactaaaattgtgatacgacgaggtcatatctatcaccgaaccaggtaactattaagtggataacgtctctgttgaagcgaatggccatgaaacctttcggtaaaaagtcctggtttaagataatacagattatagttctatcataattttgtcagtttgcactgtaaccatttgctttaaaaatgtgaagatttaaaactggtttgtcttgccttattgattaaaaagcaaaaatcattaataagatcctctctgattcattttatttcttctacattgggatcttcatacgaattgggcattggcaagacacggccgagctgcagaatatctatagccaccggcaatggattgactagtgtcccttaagttccgtgaagttaattaagaaaatagccggctttacccgggacacatatgcatactactcaactatttttttaaaacaaatattttaacaaagatttaatgcgttctaaatcccagggcatttttgtgtgttaacgtcttccgcaaggtacctccgaccagtgaccaaccaccgttctatcgccaactttagatttcgaggggtcaatgtctgtatagatggcttcaagcggaacaggggaaacttacaagttacaacacctcttgaaaaaatttatgtactcgaaatttcgggtttgatcttctccaagaggttcccaaagtcaaatagtgcttggaggaactagtgaagattgactgcaaacataaccgcccacacctcagaaagtcagagataatatttcgtgatacttcatgaatgatggaaacttggggtttaattaggtcccaaatttttcggtatatgtgattaaaagggtttaaaagtcttaggtaaagaaacattaaaagccaattcggttttattgtttgtgttatgttactagagtaccttacactatttcgtgtctttgatcttaattttaaatcgcatggatgatccctagctagaataattgtatcataagcaaaatgatcaagagtggggctcacttgtctaatgcgttttttgcagcatctctaaccctactctattttttctctaaaactctattttagaatacattggcttcaacttctctctatatgttactctaaaatatagtaaatggtaggattgttctagatatatagtaactctattttatttacactgcctctattttagagtgatacattggaaagaaatcatgctctattttagaattacattgagatggtctcaatgattttttttatatcttatgaatgccattatgacttgtgatctgtgtgtggatataagtaaagtctaactatacaggtggggtattaattgatttcttgatgatttttatagttgatatatatgtgattatttttgtctaactagcagctagctatgagaacattaaattaatttattgtcttataaccgagaagagtactatatacttctgttggcccggtctcgttggtttctctgatgcatattgcgtaacgggttttggtgttttcgtggagagttaaaagcggttaagaaagagcttcacatacatgatcagtgattagcaagttttgttgcctcgcaattggttatatgagacattttaagaatgctaagtggttatttgattttcttgttttagttgtatgatattttattgtattgacatggattactactgtgtctctttgtctagtttttgttttgttttttgattgtgtaaccaactacccagttttgcagttaagattatatggattaatttaaggctcactcaaatccggtcaactattctaatcttctttgtagatcaatgattaataatggaatcaattatgattaagtaaaacacaatgaaaccattgaatcaaacgttcttacagaaaaaaatacttcttgtttttcctcagcaaatagtttcctcaaaaaccattaccttcc

SEQ ID NO: 1201 - DNA, 3000 bp, Unknown
  misc_feature (1)..( 3000): cDNA_ID_2132313_gDNA_ID_1620371_Annot_ID_154986 3000 nt of promoter + ATG
cattgaaacacttaattaaaggaatacactactatgaaatatttatgtaacaaaataaaacctggattatgtaccaagtttctatattataatatatcaacttttcccatatagattttagtcttacattttactaattatgtcttttagagttattttactttattttttatttttggggtgaagaactgcaagaaaagtctttcacagttggaaaagctcctcgttaactttataatataaggtttggataaaacaatctgtaagaaataactttcacactttcatagttgaaaagatacctagttaaattctgatatattttgttggatataaaaaacttcaaaattgatgtacatattcaaagtatcatcttgatggaagcatgagttgtagaaagcttgcgtgtcttgttgaaagaagataaacacaaattgaatcacggtttcttgttttcttgatgttgcaattacttgtaatagttcaaaagtgggatattcaccaagtagttattgctttccacgtgaattacttttcctatattgatcttttttatattattattcctatattgatttattcttgcatttttgtaagagaaaataatcctaaacaggcaaatttaaatagctaaaatgatcaacttaaacaatttcttattgtttaagtattcgaagtctacttttcatacgatagaagtgtctactttagttatagattagttactgatctacctgtctatgctatgaatttgctattgagcaagtctaccaattattatgtaaaccaaccatttcgtacgtcaaattttgtagttattaaaatcttgttttctttttcagtaataatggatgaaatattttctgtaattcatgaaaacttctaaatattttaattattttcacaattaaatagttagtgaaataatttaatgaatggacaaagtttatcagaggttatgaatattaaagctgtatactcgtgctactaacaaaaattctatactgtagaaggatatagaagatccacaagttaatatgaagatgttgtatatttattatattgatatgtacagatttagttctatcttagattaggaaaccattttattatgtaaacatatgtaacccaaagcttatcattataagagtcaataacatattcttccaatctctatctctcatcaagctgtacatggtataagaaccacaatgatctaacgatcggatccattcctcgatctaagccaagagctctttatttttatttttttttgtgtttaagtcaagtgcttccaagttccaacattcaaattcttcatgaacctctgaatctaagcaaaaaaaatgcttagtgcttgatttgaaaaatttgcaaatttgcaaaatatgtgttttaaaagttgctctaaaaatggtctcagtcgtaaggttgcatgttttttttcctcactttccaaagattgaaagataaagtaggtgaaaaattgtacgacgtgttgtctaagagcagcaaaaactactcaatcggataaaattacaagaataatcgagacatgtaattgtaatctagtggtttgtgtgtgttttgtttaaaccattcaagttcaaatattgataaacaaaattttatatgttgttaaagtattatagacaaaattacaaggataaaatactagtcaacgtaacttaatatcaagtcttttttaaataatttttcaaatcaagtctttatgatgtcgcttttcatggatacctaatcatgtctttattttaatgttgctagttgctacaaaagataaaactactcaaattaaaaaacgtttagtgtaaacaagccataaaacagaaaaactaactttcgtataaatgcatcaatttactactaaaactacagtttttttgtttttgaacaaagactaaaactccatctaaaaatcataaaatataactattgatgaaggggaaagtaaaaagaaaaaacacacttttacttgtcaaaaagaaaaaaaaactttcatcatgaaataataactggaatctatttggggtacacaaacacacttcaatccttcaaaacaaacccaaagtcatatcccaagtgactcatcatgcgagaaatatgatatagacagtcttattattactttcccccgaaatcatagtatcaatttgattgagagttttataaagcatgtcttgttgaaaaaaagatacacacaaagtgaaatggttgatctctacaaggccacatacatgctagaaatttggtcactacttttgtctttctggcagtggttagagactgggatatttaccaactaaatgatgtcttttgcttaatttgatattttagttttaacgtacttttcctgatttgaattagtcattacgttttataagagataagtattattccaaaaagaccactgaattttgaaaataaccaagatcaatgcacctaatgaatttcctacccaaacaaccagttttgaaatattctcactataccattgaatttaaaatacaagcaggattttgaaaatttacatagaagacttgttcgtgtttgttgtaaatttgcttatcaagacagattaagcaagtctctggttaattgacgtaggaatagataacttacataagttatatcagttttttttttttggtcgtcaagttatagcagatttgcaaagtatatatgttgtaaatatataatctaagatatattgggctatgaggcctctcccgagcccacttagattgtatagctacactaggttaaatcatgttgttgtatataaggcattgcctctcttacgtatcaacatgaaacgtctttttacatcttcatctcctttttgacatggtatcagagcaaaacctaaactactaaagggtttttgtttcttgattctgtgatctgtcaattccgctgcaagttatagttgtttctaaaattcgtttgtttccacttctttgacaaacttttctcacgatg

SEQ ID NO: 1202 - DNA, 3000 bp, Unknown
  misc_feature (1)..( 3000): cDNA_ID_3061117_gDNA_ID_1620371_Annot_ID_155003 3000 nt of promoter + ATG
aggtttgtgccgtttgcaaaccgatggccatttctttgcacattgacatttccagtagaaatcgtctcttgcgatatctctccattgtttgcaaacacccatacatgacgcgagatcttcgccttctagcaatggaaacacattcttcaatacttcttcactaaacattcttcaacaactactgaaatcaaaattgagatcacaaatgcttcaatttcaataaccgatcaattacgataaccggaacatcgaaaaataacaaatcaaaactgaaatcgatcaaattctattgaattcgagacgattaagataattctacagggaaaattcgaaagatcgaaagaggaaacgatcatcgtcgtcaaaactaatcagaacgatgaagattatgtagatcgacgatatgggaaatgaactaacctttgaaacatgatctggagttgaaatctggatcggattaagtatgattttacgaggaaattgaagaaagtttcatttgatcgattaggattttggtaggctgtaaaaaaagaaacattatgaaaactaaaaagatttaatctgataaatgaaataagaaattaaattggtaatgtaaaaaggccttagcccatatagaagcccaattaaatatttagtcgagtaacacgaaaataatttagacactaaaaaacaaaatggagacctcaacggcccggcccaaagcccattagactatgagccttctctcatcaatttaagaagcttaatgctagttgactttgctaaaatatatagatttgcttcataaaaagtggatgaattttcttataagaagccattatcaaaaagaaacaaaaattatattcgaatcttagtttcttgaggtaaataagaaaagaaatttttttgatgttaatgaaatatttcaaaacatctttagggatgaacccaagaattgttcgcaaaattaaccctaatcttccacaaaacttattttaatattacacacttttaatttaagaatgacgttatcacttaactcaaatatgttattgattatgccgtatttttttgtttggagtatgacaatttgtgaggacatatatattgagttgaataaaacgaaatgataaacgtgaaagaggacaaataagtgacgagcatgggagacaagagcaaagaggtcagattgtgggatcagtagtcacactcttcactgacttgtgttttagtatcaggataccttatttccccacacacaaaaaaactctatacttcttttttccttctctttgtgttttttctttttataagaaaacatagggaataaagcgaaaggaacaagaaaactacatcacatggaaagtagatattttcagggaaaaaaaagtggatgatttgacgtgaattttgagtcttttcttcatacgatacttcttaatatatagaaaagaaaatgatttttatagataggcaacacttacatacgatacttcttaatatatagaaaagaaaatgatttttatagataggcaacacttacatgtaattaaactatatggggtttatgttttattaaattgtaatttgaaaatctgatcattaatgactggtctatagtggtagggtgtagggtgtagtgtagtaccagtagttagctcaacttttaggggaaaaagattgcactcttctgattttgtgtatttgagtttgattcctactgtatgatggttccttgttccggttataaaaacaatttggtatttgaatactcgatactaattaaacaaaaatatctgcagtccaaaaatgagattttttattcactaagaattatggtgattgttagtttaaatgtcatttattaaaactagaatttgttcacacaataatttacgtaattatgtgtgatttttttttttttttttttttgagtaagagtatgttggttggaaaaataaaaaagataaaagaaatatttattatttttaagtaatacaagatgcaataatttgtttaaagtgttgttttttatttacttaaaaactattgtggctcatcagcccaaaaaaatgtgcaaaaaagtaatacaaaattaaagaacgtaagaatgtagaaaacaatattaaatataatagactacactgaatttctctttgaaatagtcgcatgcccctcaatttaatctatgttaaagcttcaagttaaaactttgtttgcttggattcatggtcgattattctgatatctaaagctagaagatacttgaaaaaaaaaaaatcgaatgtatactgaaatcgaataggttgtggtcttttcttattgactttgttaattactgaaatgtaatttggtttattagttgatgttatcaggttttactaataatatagatatttatggataggataatgatagttctaattataagacaatctatcattactaaacaaactcatgtatgtacctcattcataacatctatgtggtcgactacaaaaaaatgaaaatgtgccttaaacattctaattaattaatttggattttttggatttttttcaaatacatggaaacatatataacaaaaccaatcagtttgaccttaaagtagataagttttgttaatttaatatcctctgttctttttatttgatgttttaggaaacatgtttgtttgaacatagaaaaatttccaggttcacaccgcagtccaggaaataaaaacaaagagctgagatttggagaagtttcaatcctatcgaatgcttactctgttttaagtgagaaaggagactatgacgatgttatttcaacgacagatacgagagatgttggtgtaatctcatcaaaagaagtttcaatagggacacagccggccacatcagagatgttgttgcgcgagtctttgccccgtgtatctaaaacagctcacaaagtgatatcagttccttctactcaatcaactaggattcctcctaaagatcagagtaaaagaaacaaatccaaaaatcgttaatg

SEQ ID NO: 1203 - DNA, 3000 bp, Unknown
  misc_feature (1)..( 3000): cDNA_ID_2132362_gDNA_ID_1620371_Annot_ID_155006 3000 nt of promoter + ATG
aatgataatgttaatgatcaggatgcatattgactaaataaacttgaatacaattactaatatagtatgtttctacgttatatatatgcccacccatatggctcccatcaaaattcatcattaatcaaagcttagtaataaaatatcatttaagagggataataatcatgaaactcttagaaaaaatgatatatgtagagtttttgatgataataatggtgatatgggtcgtgcccatgagttacggtcatggagcgatgattggtaatgcagtcgaagcacctgatgtagcggaagcaccagggattaatgacccaagcaaggcactcgacactaattggtatgacgcacgagccacgttctacggtgacatccatggtggcgacactcaacgtaagatcaaataataatgtttttttttaacctcaatacgattttgttttttgttaaaattatatgatttttggttacaacgaatctaattattgaatgcaaattttcattatcaaaaaatctctatatgataacatgtatatataaaaccaacacacatgtaagaaaaaaattcaaagccaaaattagtttttgtgattaacacatacataatcactttttatcattatatattcattagagggagcttgtggatacggtaatctattcagacaaggctatggtctagccaccgcagcgttaagtacggcactcttcaacgacgggtacacatgtggggcttgttatgaaatcatgtgcacgcgtgatccacaatggtgtttacccggatccgtcaagatcacagcaacaaacttctgtcccgcaaattacagcaaaaccacagacctttggtgcaacccaccacagaaacactttgatctctccttagcaatgtttctcaagattgccaagtacaaagccggggttgtcccagttagatacagacgtattccttgtagcaaaactggtggtgtcaagtttgaaaccaaaggaaacccttatttcttaatggtcttgatatacaacgtaggaggagctggagatattaagtacgtgcaagttaaaggaaacaagaccgggtggataacaatgaaaaagaactgggggcagaattggaccactattacagtattgaccggccaaggtttatcgttcagggttacaacgagtgatgggattacaaaagatttttggaatgtgatgccaaaaaattgggggtttggacagacttttgatggtaggattaacttttaggagaatgatttgagttttattatatgtgtcttacacataagttatgtaatacgtacttgcaataattaaaaataaagaagatactatttatccataaaaaattaggatgtatccacaatctatatttatactattatctttcacttctacatgtaacctcttttaaaaatcgtatgttgtttgtggtttggaggcataggaaaattggtcgcctccaaggggaaccggctgacttttgatggaaagatcaacttttaggagaactatttgagtttttttactttttaggataagaaggaatacaattaaaatgaattaacagatgtattgggttcaataactaaaaataaatgagatatgctttattatgtgtagttgatggagtgaagttttttacttctatgtttccatctttttatttttttgccatggaatcaatttacagatttgttttgtgaacctaattgtttaaaataaaacatttttagatttttttctatgtataacatgatttaaaattttgaaatctcatacaaattatttaaaatagtgaataatatttggctaaaacacaaatataaaataaaactaaatagtatagaacgaacattagactaacaaaggatcgagttaaaccgatccgatcccaaaaaaaactataccctatgcgatataacattggcaacccaagcaagcaaggtaaatcatagtagtgatgttgacggtaaaggtggtggtggtggtgacggtaatgatggtggtgatgatgacaatggtagtgatggcactaacggtgaagttgacggtagtggttgcggcgatacagttgtggcagtgataaatgatgatggtgagttgatggtagatgtgatggtgtaaaaatatatgggatagttataataagagttggagttgcagaaaaacaaaattaagaattggaagaggaagagcgtgtgttatgtgtattgccttgtacgtagtttttgaggtgttagtttccaaattattaaatttatttagattatagttgcaaatttccctaatcttaattcgagtttatacttgtaatgtgtaatggatttctaatagagttcctttcttttgtacttagtccattggacttttaaagaaatgaaatggcctacaagaaaagaaaagaacattgctaacatttataattggatatgtcattaaattagaagtcaaaaggattaaaggaacatgagacttctttactcattctacatttcataccttgttttacaacttattatcatcataccatgaattcaaaatatatacaggtgatggcaatatcatcacttcttaggattgcagattttgactacataaaattcaatacaattactaatttatcatgttcactaagtaaatatatgcacatttggaatgatttaaaaaaatattacaaataaccagtaaaaagaaatgggactatcacttcacatttcatgacttttaactacctataaacatcttaccattttatccaaaatacaaagatggctatgttatcaattcagattgactacaaaaaatttcaatacatttggaaagattttaaaagatatgactatagtcaaatatatgtctacttatatatacccactcatgttgttcatttattcccatcaatcaaagctaaaagtaaaacaaaatcatcaaagagggataataatcatgaaattgctagaaaaaatgacatatgtagaatgttttatgataataatg

SEQ ID NO: 1204 - DNA, 3000 bp, Unknown
  misc_feature (1)..( 3000): cDNA_ID_3061089_gDNA_ID_1620371_Annot_ID_154997 3000 nt of promoter + ATG
aagttttaacttctaaattggttcttaactttatcactttctctcctttgatgttattgtttaaatcctcttcaccttcacgctttctaaaccatattaacatataatcacgttagattatctagcattgaaatttagcaaattttgttttctattttcttatttccatatgttacttttgaaaaattaacaaactttttttcttttttctttttattcataaatataataaaaataataaaaaaatatagaaattaaaaagttaattaaagtcatggctaaaaaatgtaaaccaatgagatggttaatcctgattggtcgtttaaaaacttatgtggacgcttttagaagcgaatagcctcaacttttatatagtatagataaataccttgcttatattcctatattcttgaacatattaagagtttataataccttgcttttaatcttgtgagctgattaatttatgtgatgattttaactatagtatatttgatagtatgatattgaaaaattaaatccgccatcatagtcgttcaatgttcgagcagaaggctgacctattgacaaaggctctcgggcgaatcaagtttaaagaaatgagggagctcattggtgtgaaggacatgggacaaggtgacttcaagtttaggagggagaatgttggattaagcttgaagaaagctgatgaagaaagtaatattaaaccgagttatggtttagttcctaaccgagttatggtttagaaagtgatcatctcaaatctctttaggagttatctaaatctatgttttcctattaggattaggactaatgctttcatataaatagatgtgtcgagttctaatatcaatgtgagagttgtattaagagattgagagagaaagcttaagttttgtgtaagtttcttaagctataaagtgagttatacttttatattcttgagttcttaaacaacaaccaaacctagattctataaactgagagtaatcaggcgttgaaaaaataaagactactggaataagagcaaagatattcaaacatcaatgtgtggtttaagtttgaaaactaccctctttcttttcatagtaaattgaaatttctaaccaaaacgaaaaaaaacacacacacaaaaaaaaaatcagagccaagagactaccaataatcaatatccaacacatttcacatcaactcgttcattcaatcttttgataaaatccctcccatgttacccaaaacacaattcaaaagatataaatcaccaaaaaaatatcgatattgattcgtagaacaacaaaataactatacacgtatagcatcaacatcaagtgaaaaatctagcatggtaagaaattcgactcatacaaagaaccaaagcaatataaaacaaaccataatatcagaactatatatttaataaaaagtccttttgatatggtgtgaccgagacttgtatttatagctaaatgtttaggacaaaccatcggaagttttactttttaattttttttatacaaatatttgtatataaaaaacaatttaacatatatttgtatacttggacgatttaacatttcattgtattaggaatataatagttactcctcaaaaccatattaacatgtaatcacgtgaaataatctagcaattaaatttagcaaattttcttttcaactttcttatttccatatgtaacttttgaaaagttaacaatttttttttgttttttctttttaatcataaatatagtaaaaataatagaaaataatatagaatttaaaaagttaattaaagtgatggctaaaaaatgtaaaccaatgagatggttaatcctgattggtcgtttaaagctcacgtggacgcctttataagcaaatagcctcaacttttatatactatagattgcataattcttcttgtgataatattattgatcttttctacaataatacaatttgttgtcttgtcttcattgtttagtccacataacaaattagggccgagcattgggatatgcgagttgggtttgggtaaaagccgattaggtacggattctttgggtagaagagtttagaactcaatatattaaataaaaaatatatgttcggttttggttcgggtcctttcaggtttaggtcgctttgtatatagatttcagaacaacttaataaattatcggataaatacccatattttcgggtaaatactcgcatttcagagtaaaagtttgggtattcaagtaaaatattaagatatttttgggttcagattttcgagtataggagtttaggatccaataaaataaatctaaatttttattgtgtttagaatctaattttttgggttggttcggttcagatattctgatccaatttttttccccagccctagaacaaatcataagtgcataacgataatgagcagtaaggtacttagtagtttgcatatatggacgaaagatattatttgtatcaagtgtggtacaactatgggcccacgaatattcagtatccagttttgtacaagcccatgtgatccttgcaggccaattgacaattttaaatatatttatagcaacaatacaaatatatatttttcagtcaaatttgaaaattgcaaccgaaactagagagcagagtagagatcaacaactggatcaaaattttgaatttttataaaatctatagaattaagaatatataatatgttaaaactgaatttactccaaacctatattgtacaaagctgattagaattagtaatcattttagttccacatttctagcttttacgaggctattcggggcaactataactggccctatttggctcatcagtggcccattaaagatatatatgagttacattcataattttaaggaaaagaaatagttggtgtatgctcctcgtaatatcatcttatctataacaactacaagaagcttacattgctgctactaaaatacaaaattgttggaagtcatttttcaagatatcaaa

SEQ ID NO: 1205 - DNA, 3000 bp, Unknown
  misc_feature (1)..( 3000): cDNA_ID_2132303_gDNA_ID_1620371_Annot_ID_154987 3000 nt of promoter + ATG
gatttaccaactatattcccttaatttgatattttagtgttagcattagttttactcaatgttcaaaaaagtttataggtgctaagcaagcggtgatccaatgcctagtacctaaaacgcttaatcgggatttatacaatttttaggcggttaaagcgtttataacataaatactataaatataatattacatataataaacatataaaaatatctattagaaaaataaataaatatgttaatacataaacaaaacatttatttgatttatatcataccttatatgaacatttataactatatgtatagaaacaaaacttagttgaaaattgataaaatacactaaaaacaaaatctatatgattttaggtggtcaaagtgcatggttgtctagacgttttccgagaacctagcgcctaatggaggtttacgcgaccgcctaaatcggtttttaaagcacttcttttactacattgaattactctctttttctaataaacaacattgaattagtctttgcatactatatgctaaaactattccaaaagtaaataatcaacacaatgcacgtaaactttttaatattattctagcagtagcagtccatctaaaataaaagcagacgtttacatagaagatttgttcgtgttagttgtaaatatgcttgtcaatgcagattaagcaagtcttccggtaaacgtaaacttgacgtagtcatagataacttatataaagtatgctctagttttacctacgtcaaagcaaatttgcaaaaaattgtaattctatctatgatatatctagaagacaaagatataaatatgtcataaatctgctcatttcaacagtcttgcatggtctataacgtgggcagttgagttgtctaaatctgctaaaatatatttgtttggcttcttgtatataatttttgtatggcggttttgtagttactgacaagttgactaatgataatttatttgttttcaaaacaaaatgttattagacaaaacaagtgtttttaaaagcagtctatacactatacagttgcctaggtcccgattagacgtttagacgatgcatagatgaccgctttaatcgtctaaaattacataaattttgttttagacgatgcatagattggactacgttagtaatatacaactacaaataatttatttaagacctaaaataattgaaagaaaaaaccaaaaatgaggtaccacttgtaggagtatgtaatcttaactagtatgaacaatgagaagtcagacactcagaccttaaataattgaaagacaaagccaataatgaggtatcacttgtgggagtatgtcatctttactagtatgaacaatgagatatatatataatcgcagaaaaacatattggtgttattttcgttagcgactgctccgatctactaagatggtgtatgtgaatgtcggattcgcacactcaagtatttatttattttgtgagaaagattatttttgaagacaaaaattaaatgtaaaagctagagattaacactcaaatgactatagtatgatttagaaaaattgtgtgtgtgttagatagtcccaaacctctactacttatactaaaacatcgtatttacatgggagaccatagtttctccaagatgtataaatttggagaactcaccaatttcgaatatactgcttcgccctatattagctactataacaataacattgataacaaaattgctccgactgacgctggaaccaaagaagtcaatataaccatggtggaaaccggaccaaaaaccggtaatcgagatggcttaaccaatgttcctaaaccggatccacgacaacagattcctatttctccaaccaagtcttgtcactccgaaacaagtaataacagtacaacttctttcgcatttcccacgtaagtcgttctctaatcttccatgccaatttgctcggttaaaaccagactggttggactgaaaaatcggttttaattaattgagttgtgcttatgaggtctattggtttatttttaaaatcctttgtagattaggagagtaccaacaagagcgaaagacatcactaaacacgaagagtgaaagtggaaaaagagaactatcaagacttgactcgaagaccggattgtacccggatgattcgaaacagggcggtgctggtgctggtgctggtgctggtggttggctttcttgttgtctctgtttttcggtgaaaaattgaggttattactctttgtcatgtcaattatttaggtcatagctgtccaagagacgcgagacattagacaaggtaattaccgattgtatcctatatattcctatgtaacgaaattcagatactacgtaatcttaatgtgtcgatggaatgaaaaaataaagtattctgtaaatattttctatatattatttagcatatatacgctttataaattataaatttggtccctcccaaatacatgaaaacaatgtagtgataaaaaaaaaacaaattctgtatatatgctatttttataacataacaagcatttttcttagtcggttaaaatttcaagtgtttaatacttttatataattatgaacgtaagttataatttatgttttttttggtcagtccattattgattattccattcacactatatgcaacctatattcttcctatgaaacttttgatcgtgtgttaaataataatacaaattttatttcatctaataggtgggtggggactctctaattacgttctttgacatctactcatcaacatttggctaatctttctaaaggaattccatctaccggtcatttttgtttaaatgctctcttgtaactaaaagtccgtaccaaacttgtgtaatttcattaaacattaattatttagtccattccatgtcaaatatgacttatatgctcttgtcctataaattttaaagcaatgaggattcaccaagtatacatgcataacaaattaagagcgagcaataatg

SEQ ID NO: 1206 - DNA, 3000 bp, Unknown
  misc_feature (1)..( 3000): cDNA_ID_2132317_gDNA_ID_1620371_Annot_ID_154992 3000 nt of promoter + ATG
cattttgacaccttatccaaatgtgtacatattttggtagtttattttcagttatattttgaaaatatttttaatattgctatattaacaacaacgtctttgataatataaataagtaagagaaaatgacacatcatatttgcaatatgtttcatacctaaatttaatccgatatatattttctttcttattaaaataaaatgttaaataacgtaaatgatactaaaaatttatataaaaatatttatgtgaaagaaacaaaaacaaattataatagtacttttgcattactaaacagaaatatatattaaaaattaataacaacaaacctcatttaaatgattactaaaccaaaaaataaatttaaaaaatcgataacaacaaacccccgcgtaataggggttaataaactagtatgaaccaataaaacttcaccaatgagaagcatattaaagtctcatcatgtgatttcccaaaaatgtataactctcgaacatgaaactacaaaaaaatagatattaactgaaacccttttaaaatgaattctatgtggtttttttctttcgagaaaaacttaatctgtcattttatatgtccatatataatataccaattcatacataaaaacaaaaatagttaaacaaaatatagatacttttttttatcaagcaagatgttctaaacttaaatatgtagtttttctaggtttagaaccaaccgttaatagtagttatttgttaaaaccgttaatatataatacttgaccttgaccatacgtaaatcatttcccccaaagatttcaaactagaactagaagtacaaggttcaacttccaaaaggaacgaccaacgtaaaataagttcaagatttgtatgtaactagttgaaaaaataagaacaactaaatatagaaatagaagatttaagagagttaatgatgagattaaaatcgcagaaacactttctgatgcattattataataacagctccgagttaggctcccagccattgaatttttcaaaatttcttacaaaccctttttttttgttataacttataacagaagtctaaattgtttttcctaattcataaaaatctctaatggagttaagttagtttttattaatatatctaaaaagtagtcattattaatgaccacaaggatttggttataacttataccagaaatccacaaagtttttcggttttaaaaattataactaactctctaatggagattagttagtttaattacgtttgttatcaaacgaaaaataatcattattaatgaggacacagctttgatcaattttcctcacatcattttttaaaagaagaaattgttcttttcaaccttttggctcttgaagaactctcagcttgaacttgatcaaaggtgatgagagctcttctattggttacaaatgttccatttgttgaagaaatctgattacataaattgattgatatctcatatttttttctggagacaggtacacaaatggaccaggaaactaaaccaggctatgaaccggatcggattccacattcggtttttgcaacctcggtaactccaaaacaagaatggagtatccaatcgaacgagtctttgttcagtattcacatgggagaccatagtttctccaagatgtataaatctggagaactcaccaatttcgaatatactgcttcgccctatattagctactataacaataacattgataacaaaattgctccgactgacgctggaaccaaagaagtcaatataaccatggtggaaaccggaccaaaaaccggtaatcgagatggcttaaccaatgttcctaaaccggatccacgacaacagattcctatttctccaaccaagtcttgtcactccgaaacaagtaataacagtacaacttctttcgcatttcccacgtaagtcgttctctaatcttccatgccaatttgctcggttaaaaccagactggttggactgaaaaatcggttttaattaattgagttgtgcttatgaggtctattggtttatttttaaaatcctttgtagattaggagagtaccaacaagagcgaaagacatcactaaacacgaagagtgaaagtggaaaaagagaactatcaagacttgactcgaagaccggattgtacccggatgattcgaaacagggcggtgctggtgctggtgctggtggttggctttcttgttgtctctgtttttcggtgaaaaattgaggttattactctttgtcatgtcaattatttaggtcatagctgtccaagagacgcgagacattagacaaggtaattaccgattgtatcctatatattcctatgtaacgaaattcagatactacgtaatcttaatgtgtcgatggaatgaaaaaataaagtattctgtaaatattttctatatattatttagcatatatacgctttataaattataaatttggtccctcccaaatacatgaaaacaatgtagtgataaaaaaaaaacaaattctgtatatatgctatttttataacataacaagcatttttcttagtcggttaaaatttcaagtgtttaatacttttatataattatgaacgtaagttataatctatgttttttttggtcagtccattattgattattccattcacactatatgcaacctatattcttcctatgaaacttttgatcgtgtgttaaataataatacaaatttgatttcatctaataggtgggtggggactctctaattacgttctttgacatctactcatcaacatttggctaatctttctaaaggaattccatctaccggtcatttttgtttaaatgctctcttgtaactaaaagtccgtaccaaacttgtgtaatttcattaaacattaattatttagtccattccatgtcaaatatgacttctatgctcttgtcctataaattttaaagcaatgaggattcaccaagtatacatgcataacaaattaagagcgagcaataatg

SEQ ID NO: 1207 - DNA, 3000 bp, Unknown
  misc_feature (1)..( 3000): cDNA_ID_2132313_gDNA_ID_1620371_Annot_ID_154991 3000 nt of promoter + ATG
cattgaaacacttaattaaaggaatacactactatgaaatatttatgtaacaaaataaaacctggattatgtaccaagtttctatattataatatatcaacttttcccatatagattttagtcttacattttactaattatgtcttttagagttattttactttattttttatttttggggtgaagaactgcaagaaaagtctttcacagttggaaaagctcctcgttaactttataatataaggtttggataaaacaatctgtaagaaataactttcacactttcatagttgaaaagatacctagttaaattctgatatattttgttggatataaaaaacttcaaaattgatgtacatattcaaagtatcatcttgatggaagcatgagttgtagaaagcttgcgtgtcttgttgaaagaagataaacacaaattgaatcacggtttcttgttttcttgatgttgcaattacttgtaatagttcaaaagtgggatattcaccaagtagttattgctttccacgtgaattacttttcctatattgatcttttttatattattattcctatattgatttattcttgcatttttgtaagagaaaataatcctaaacaggcaaatttaaatagctaaaatgatcaacttaaacaatttcttattgtttaagtattcgaagtctacttttcatacgatagaagtgtctactttagttatagattagttactgatctacctgtctatgctatgaatttgctattgagcaagtctaccaattattatgtaaaccaaccatttcgtacgtcaaattttgtagttattaaaatcttgttttctttttcagtaataatggatgaaatattttctgtaattcatgaaaacttctaaatattttaattattttcacaattaaatagttagtgaaataatttaatgaatggacaaagtttatcagaggttatgaatattaaagctgtatactcgtgctactaacaaaaattctatactgtagaaggatatagaagatccacaagttaatatgaagatgttgtatatttattatattgatatgtacagatttagttctatcttagattaggaaaccattttattatgtaaacatatgtaacccaaagcttatcattataagagtcaataacatattcttccaatctctatctctcatcaagctgtacatggtataagaaccacaatgatctaacgatcggatccattcctcgatctaagccaagagctctttatttttatttttttttgtgtttaagtcaagtgcttccaagttccaacattcaaattcttcatgaacctctgaatctaagcaaaaaaaatgcttagtgcttgatttgaaaaatttgcaaatttgcaaaatatgtgttttaaaagttgctctaaaaatggtctcagtcgtaaggttgcatgttttttttcctcactttccaaagattgaaagataaagtaggtgaaaaattgtacgacgtgttgtctaagagcagcaaaaactactcaatcggataaaattacaagaataatcgagacatgtaattgtaatctagtggtttgtgtgtgttttgtttaaaccattcaagttcaaatattgataaacaaaattttatatgttgttaaagtattatagacaaaattacaaggataaaatactagtcaacgtaacttaatatcaagtcttttttaaataatttttcaaatcaagtctttatgatgtcgcttttcatggatacctaatcatgtctttattttaatgttgctagttgctacaaaagataaaactactcaaattaaaaaacgtttagtgtaaacaagccataaaacagaaaaactaactttcgtataaatgcatcaatttactactaaaactacagtttttttgtttttgaacaaagactaaaactccatctaaaaatcataaaatataactattgatgaaggggaaagtaaaaagaaaaaacacacttttacttgtcaaaaagaaaaaaaaactttcatcatgaaataataactggaatctatttggggtacacaaacacacttcaatccttcaaaacaaacccaaagtcatatcccaagtgactcatcatgcgagaaatatgatatagacagtcttattattactttcccccgaaatcatagtatcaatttgattgagagttttataaagcatgtcttgttgaaaaaaagatacacacaaagtgaaatggttgatctctacaaggccacatacatgctagaaatttggtcactacttttgtctttctggcagtggttagagactgggatatttaccaactaaatgatgtcttttgcttaatttgatattttagttttaacgtacttttcctgatttgaattagtcattacgttttataagagataagtattattccaaaaagaccactgaattttgaaaataaccaagatcaatgcacctaatgaatttcctacccaaacaaccagttttgaaatattctcactataccattgaatttaaaatacaagcaggattttgaaaatttacatagaagacttgttcgtgtttgttgtaaatttgcttatcaagacagattaagcaagtctctggttaattgacgtaggaatagataacttacataagttatatcagttttttttttttggtcgtcaagttatagcagatttgcaaagtatatatgttgtaaatatataatctaagatatattgggctatgaggcctctcccgagcccacttagattgtatagctacactaggttaaatcatgttgttgtatataaggcattgcctctcttacgtatcaacatgaaacgtctttttacatcttcatctcctttttgacatggtatcagagcaaaacctaaactactaaagggtttttgtttcttgattctgtgatctgtcaattctgctgcaagttatagttgtttctaaaattcgtttgtttccacttctttgacaaacttttctcacgatg

SEQ ID NO: 1208 - DNA, 3000 bp, Unknown
  misc_feature (1)..( 3000): cDNA_ID_2131758_gDNA_ID_1620372_Annot_ID_155022 3000 nt of promoter + ATG
tgacaaaaaaaaaaaaaataaaaaaaaaataaaaaaaaaaaaaaaaataagcataggatataacatcaataaaggggcagaaatcaaaagacaacaatttttttttttttaaagagtcaaaaaaccagtacacataattggacatttatgacaaaattgttttgggacatttataactactaatagtttttgctaaggtattcgtattatgaggttaaactaaaataaagatgatgttactgattttttttttttaattaatcctaactttgattttaagataagttaaaaaatatgctatatatccgaatatgagaaaaatccaagagaataattagtttactatgctgctggcaatttttttttagtttactatgttgctagtgcttgctaccacacttgtacgtgttcaaggcgtcgtggatatattatacaccatgaaatctaaggttaggtgttttttgctaaatcgttacgtcattgtttcttaaaaataagaattaaaggttaagttacgtctgtttattttgtgtgtgtttgtttataatttgtttatataaaagaaattggaaagataaatgagcaaggtgatttcgatcattagtttcagtccatgtctttgtctctatggtcggccatcggccttagaggcgtgaaagtcttaaacaataatagaacttcattcggaaaaaagaaaaaataacccttaatatttaaatgtaatttagatcatacagtataaataacttcttataccaaactaaaatgaagatggtagctgattaacgaatttacatgcggaagacttaaataatcgatagattagtttatgaaaagacttgcataatcgatagattagtttatgaaaagacttacataatcgatagattagtttatgaaaagacttgcataattggtagatgcaaagttataagaaaactgataaatctgaaacgaggcttgagttcatcaaaatttcctgtgacagcgattattttaatgttactaagacgattgggttgttgggattgttgtagataaaccaggcaataacataatctaccaataacaatgtattgtatttccttttagttgagaaattaaatatttgaccacattatctgaattttcttgtcgtcttaataactaattatcattattcatttttggcaggatctttttttctttgttaaagggtctacttttttttttgataaagcagtcttttatttttaaaacatgcatcacaaaatttaccttcatgaatcaattccctgtgagacaatgatatgatttaaagtttacatgtaaaatattctataccgtggaaaaacactcatttcattgttatataacgaaaaatatgaattatatggacgcaaaataactatttactagatatatcgatgttatagaaataatattatattaaaaaaaacgatatatacggtttagtgttagtgtaagtttatatttttggcacttgttgaaaacgttatgataacttgtttattatcaacctaacatgttttatacggctataccgcataaagtgtagaattaattttacctctttatatgacacaataatatttaacatgtaacaagagcaaggggttacttgtcaaatacgcctatgcactaaacaatgataaattggtcattctcctaatttaaaaagtcactttatcattcttctctaataccaaacctttctatataatcactcttaaaccggccgataacttgttttccaaataatctaaaacttatactaaccaaatttaactaaaatagtaataatttcttacaaatatcaaatcaaaaaatttcaaatccctgacttgtcaaatcaaccatgtttcggactgagaccaaagtctctgcaattcaatgacacatgtatattatatagtattgtttcattaatcacacatgtattttgaccgttaacatgccttgttctttacgtatgttgcactgcaacaacgctttgtcgttaatttacctaacttagtaaaaacaaaatacatgtcttagattatcagttattcaaacttgtcgttatgtaattgttattgaagtaaacagaaactctggtgcgatgcaggacgttactcaaactgagtcacttcgatcggatgtcttaattcaagcaggacaatctagctttgctactgaaatttgatgacacgatgatatatatctatttccaaccgatgaagcacactggagatccgtttggatttttattgtttttacttttttacactatcgtaatcattctttacatatttcctttttattttctccttagaagagaaattatttgtatacaaaacttagaaggctaaataagcatatttattcagtataatcactgtaaccacaccttattcaataaaattcttattttgaatctgtctatttatgtatatgatattgctatagtgatgacagatgagtaaacattaaacatacacgcaacatagctatcttgaaaactgtttgatgatttgagacaaagagaccaaaacaaatggaaccttcttcacatatctatcacacgtcctcatacaccacccatattctgccatgtgttctcactccatcaatattaattatttttagggttaatagagatggtttagtctcatgctttttgtttattactttttttctttggtcagagctttttgtttgttagtaaggactttaaagatagagagtaaaaattactcttttgttttgtcaacataataagcagtttttttctacttcattttgtctccgtatttcatcaagaaaagacacgtatttagatagatgatggaagggcggtaccaaatctccttgacttgactttgcatgtaccatatatatatttgtatatacataaatcataattcatgaagaaaccaaattttctctgtaatcaagttctcaaagcttattagcttctctctctagttctctcacatataacatttgaaaaagatg

SEQ ID NO: 1209 - DNA, 3000 bp, Unknown
  misc_feature (1)..( 3000): cDNA_ID_3061152_gDNA_ID_1620372_Annot_ID_155029 3000 nt of promoter + ATG
caccaagatcattttatattaattgcgcaatatttgcatacccttgagatcggcgagtattgacgtgaactaatcattgtatttttaattttgcttgataaaagatttacactctaatcattgttaattttgattgaaattaaattatgtattaacaatcaactatagtctacataacaatgtgtttgatagagtgataagactcgccagcggaatcaaagtttatactgattcatgaaaagttaaaacttttggataaccaatcatctacaagaatttttaaataaccaaataatcttagtctagtctagtgtagctctagttgtcatcatcctacacgtacgtggttttaggtcataaattgatttttaattgttaatcattgttaattttttctactagacgtatattttctttcttttggttatttactagattttgacttgaagttgaagctccctgattaaataataataataacgatcatattatctctacctaaaaacttctctaatttttgtagttggatctacttgacctcacatcaaaattagctacaaaactatgtcgcttgcaattaaaagaacacatagtgagaattgatcataatactttaaaagtactgtgactatttggtattgtcaatatagtgtccgaccttaattattaatattctaatttattttccaatcatgtctctagctacaacattcacagttccactatgcattttccatcttttatgtctaactaaattgtaagaaattatatagctacaaattaattagagtctactttcttcataaaggctaacatatatctgattttaaatgtcgagcacatcaaaacaaacaattcgtggcatgaacaaattaaaaggttgaccagttaatgtattagtattgttttgttgtcgattggtctcttaactttgttaagctccaaatggaaaaaaactgcgacaccttatttgttcagccgggttgtattgttgactcgctcttacgctttttagctaattaagtgctcttttatttgctagattagcggaagccacgtttactcttttcattttctatttccattactccccaataatttcatgataaaactcaaattaaaaaactcgtgtatccgtcacctattatctatagtattttttaaaaaatctatttacggttgaattgagtttttttttttggaaggtctctattcggtcgtcgaagtaaagaatgataaggcagttagcagttctatttcgaagaaagatcggatttgtggataagctatagttaatgagttatatatgataaatcgacttgttatggatttgtggatagctataccagccactaaaatataactgttaagtgacaattatatagcatgttaatctatatagaacatatgtaatagattcttgcaagaacaaagattttcaatttttaccaaactacaaggtcaacttctacataacatatcggataaacggataaaagtatatatccaaaccctactacaaaggaaggggtgagacttgagagtttgtggaaaagaattgaaaggggggtagttggaactgagacattaacgtgagcgccttgattgagagatattatcgtcattttcgatcaaccaaagccccttaacgaccagtcttccctcctccaacgtgtcacgttctataacaaatactttttgactttggccatttgtggatcttttttaatattgaggcaacgtctattcatgttcactaaattagtacatttgtttttattctcaaattttaaataaccttagagctagtttgaactttgttgacccaaataaaataaaagatataacgacctttaaaatataaaattaattaaagtaagtggagacacacatatttgattattttgagcaaaatcaggagtttagtgttagaaaatagttagattaacatgctatatagataaatgaaatgatataaaaactaaccaatgggatgatttactacctgaagattttatgacttgtataaagaaaaaacattaaagtgagtatttacttcctagttaataatttgaaattccaccttaatggtaattttctaaaaacacaggggcaaattatagaacgttaatgatgcatataataacaccttttatttttgtgaccaacgttattttcacaaatatataaaaaataattttgaaaatttgagtcattaatataattcagattcggacccattttttgtctgaacaaagagaaaaaaaaaaagacaaaaaatttgaatttttgttgttggtcgaagagaaagaagggaagaagaacagagaggattattcattactcttttatcttcttcttctttcccaaaaagttgcatcttttcgagaaaacaaatccgcattaatctcctcaggagaagaagaaaatcttagggttttaaaatttccccaggaaaaaatctgtttttttctttcttcctctcctgttttccctctgacaaactaacctgagaagcagagactctctgtctttgtctcttccattgacctcgtaagtttcgctctccctctttccttttcaattcattttctcttcttcgtttctgggtttgtgtaaagatcaggtttttgttgatttctcgtttaagtcagaatttttgtttgttctaaagtttcaatttttatttccttcttcaaatccattcatgagaaatgtatgaggagcctcgagattgttttacaaatgttgattcgctgaatttctgatttttagtttttttttttctttcccaagaagctctttctctggttccgaggaagtaatgcatggttaacgaggcgtgtgatttgagagattaggttttatggaagcttggattgcgtgaaatgcttctcaattaaagactcagcacaagagatttctgatttatttctggtgttgggtttttagaaagttttcaactttgattcagtttttgaggtctgtgattgaggaatg

SEQ ID NO: 1210 - DNA, 3000 bp, Unknown
  misc_feature (1)..( 3000): cDNA_ID_2131812_gDNA_ID_1620372_Annot_ID_155037 3000 nt of promoter + ATG
tatcaaatgataatcaccttggactctctcttggtccattgaagtccatagaaggtagcagcagcagcaacaacgttaacccattgcttaatgttggagtccctagaggaaccacagatatgaacatgaacaactatagctcacatgctttatcaactgatgatattaatcttgatcttactcttggtccatctaagtccataggagatagcaacaatatcattaataacaacactaactcatccttcgatgggaatctgatcattcccgttcgtcctcgtgtgtctagataccattttgttgctgggaacccccttgattcaatctctagaaacattcctccttctattacttttcctcatctaaacatcaatctttctcatgattcgttttctttacaagagaatggttcgggctctagtcactcataaagtctcatctcaaatgggaaagaacaaagtcatgggtgcctgaagatgatgataaacatcagctagaagaatattggggtcgtgattattatcaatgtatctttgttttttgttttttttcagttttctatgcattatttagtatttcgctttcagtttagaggtatcttatagctattgaagtttttgttctcatttttttcattcaattgtttttttttttctctttttgtttccttcttgtcttataaatgttctcttttcctatttgtcaatctttgattacttcatgaagccttttatttttcaatgcctaaatctcatgatttttgtaaagatttctgcaagtttctggtctaattatttgtaagcgaatttgatctttcataatttaaagagattctgagttttgcttgaaatcctttgttaacgagacattatatctattcaacttataatatattagtctttccgatcttattattagtgttgtaatctcccaaatttgtttaacacatgtcatcatctttcaggattttttaaccaaaaagataattatcttttttatatatatcaatgttaatgaatatcgtctagttattgaacctatatacataatatgtaatttaagaaaccatatttagaaaaatggaatataatctagagtcttgtataataaaaggttgtcctactcacaacttacagtttccagtttgtgataagagaaggttttgtttaaaaaaaaagaagagaaggttaacatacttagaaaaattgggtaacaaaagatttgcaaaactggaattttaaatatttcggaaagtatctgagtgatgcagaattgaaaatttcgggttctctatccttgcaacgactatcgtctgtatctagaaatgaatggatttcacttcatggcctagggttacatttcccagcgttattttgatttgggtttgtgagatgtctcatataaaatatgatggaacattaattattaaaaaattgttttgtgcaaataaaactttaaagtcgtttttacaatggataaatacctagctagtaaaccgtattatgtgtggtgaactggtgataagtcattcgttatggataaataatgtatgttgaaaatatatttgtccaatagtttcatagactaattaaagaaaaatgtggcgttatagacttatagtcaactattcatgttatatcatctaaatatatatgactgaaaatgcatttttaagaatatcaaaactggtattctgtaaagttcatgcaccatcagtatttaaaattgtattcattttgggtatttcctagtaattagtaagtatatcgaaagtaaataaaaaggaaaataaacaaaagaaaacatagaaagtaagaaactgaaaacaacataattaaggaaacaaaacacaatttctatctatcattaagtcaggataagaaaaaacaagaataagtagtaaagctgactaagacatagctggagtttgtatgtacaatgactcaaaatttaacattctatatacaatggtgtgtttccctttctttgtatttgcaattatcatatatatatatattagagaaaataagtgaaaaataacatcattccatataatagaaaatataatcttgtattacttagcttattaatacatttttttacatatcaattaatattttttacatattaattgctatatgaaataacatgaagttaccagtttgcaacggtcgatataacgaactgaagcgtaacatttttaaaaaaattgaaatgagttagtgttttttttaatttacttttacacataatgacgtatactataacaattatagatatattttagctaagtagataaattttagattatacaaagccagttggtatgcacacaaaattattattttggaagacaaaatgtataagatcaccatggttagaaaaacaaccatattttctatctttcattggagttatatataacacatcatgtaaacaaaatctagtcaaatttgaaatatattaattaaattggtgtatttttaacatatgaagtatcattttagaaaacagaaagaacaaagtcaagataactagagacacacgtacttgaaatcatgagtaaataaatattagattatacaaagccagttggtacataatgcacaccaaattttaatttggaagacaatgtataaatcaacatggttagaaaaacaaccataacttttaaaactatggataattattcatagtagttatataacacataacttcatataaacaaaatctagtcaaatttgaaatatattaattaaattggtgtatatttaagaaagaaaaaaaaaagtcaagattgttaagaggcacaactatttcttttaaacaaaaaacaatgaattcaaagtagatttactgttacaattaatgctatttgctcttggagattttataccttagcgagtgcaacacagtaattaaatctctcaatatataccatacgtctccggagagaagaaatcactcacttctaattctcatcaaagttttacaaaaaaa

SEQ ID NO: 1211 - DNA, 3000 bp, Unknown
  misc_feature (1)..( 3000): cDNA_ID_2131826_gDNA_ID_1620372_Annot_ID_155040 3000 nt of promoter + ATG
ctcttggtccatccaagtccacaggaggcagcaacaatagcactaataacaacactaactcatcgttccatgggaatctaatgactcccgtgggtccttgtgtgcctagatacagtttggttgctggaaaccaggttgattcaagcaatatacatgttcctgcttatccaaccaccgatctttgttatgatttttttgctttacaagagcatggttcgggctctagtcactcaaaaagtctcatctcaaaggggaaaaacaaagtcatggtgcctgaagatgatgaggatatcgggatgataaggtggttgcccaagaaaaaaagatcaagaggagagtagtaatttatctatgtccctttgtgtttttcagttttctgttttctattgaggcctatgttcacctcttctttttttcatgcaattgtttttctctttttgtttctttgttgtctttttgatgattttgatgtttcgattaattcatcaaatccctttttcaattcctacatttcatgattgttcttaaatttttgagattttcagaagtcattttcgtaagcgaacttaattttttcaaaggttagagagaatctgcaatttgcttaaaaacattagttaaagagacattatctcttcattgacaatttgttagccttggaaaattgaaaaaaaaaaataagaggcagaaagaaggtctatctgatcttctattgttgtaattgtaacctcacaaaaaaaaaaaaaaaaaaaaaaaaaaaaaaaaaaaaaagaggcagtggtttccttttgacgattagggtttcgctggttccagtttgcccggttttcttccttgacccagatccgatttactagattgtattacaaatgtaatcatctttcaggatatttgtaacaaaaagatacaactgttatccaataaaactgttattttttttatgtattaatataatcttgtaatcctagtaagaatttataaaacttaaaaacctgtaaggctgtaactgatgtttgcatctccattctccaaagatcttttctattgaacaaaaatcaaaactatttttgtttctcttgttcaagagaaatctccttttaaagataatttcctgaagacatttattccatagtatgaagatcgaggtctagaagttgatagtattgaaaattgtctattggatcaactggattgttttctcaaacaaatgaaagtcaatattgaaaaacacaagtgctttttcttccaagcaggagattgataattttgcatttggagcttgtgcagatcatttatatattaatttaagttcgtgaagatttaggtttatggttgtagatacctcacacaaagcttacatagtagttacataggaataataccgaacatcgtcgcttcatttgagatgttgggttgatagacccaacaataaaatcatcctaaaagaagtaagctacgtacttattatttataaaggcttgtcctcctcccttccttaaagccaaagccaactctttaagtctcgctctcactgcttctggcgaaagctcaagttgaggatgacctctcagaaaatcatcgcttccatttccatattcctcagattcaatcttcttaaagcacatatacaatagcaaaacggaatctagaattttatattataaaaatgttgccacgatttttaccaatatcttattcaatgtcgaccaaattaactattgaaaccctaatatcactgcttttatggaagtttgtttttcttgttcaatcatcgtggtctagaagttgatagcattgagagttgctatatgatgaaactttatagtttttgctagacaatgagagtcaatattgaatacatgaggaatatgaatacttctcaacttgcaaatttgtatttttacttcgcaaattaacaatcttttatgaaattttaaacaagttttttgaaaacatcaacatagatggaaaatctgactaggaatttcacagaaatatgtaaaatcgatttctaagttcttgttgttagttttagatgttatatattaatgttcaggagataacgtcatcaagcggggatagctcagttgggagagcgtcagactgaagatctgaaggtcgcgtgttcgatccacgctcaccgcatttttctttttgtttttgaaattttatttctcgttgcaaaaccaaacgacgccgtataaatataaaagaacaaattgacttggagcgacgttgcttcgttagaacgttaggtcgcacgtgtaattgacttctctaagaatcaaattcattgggtttcagaaaaaaaaagttataaactttccatagagaataatacaaggtcgaaaaatgacaaattcttaattctttacatgaaatttaatatttctgaaattataatacttggttcacgtataaaatcatccatagataagtaataacaccgtccatgcatgaaccaatattataagattctaacaggtaacagattacatataacacatgctcaacaaaatggcatagtcatatttatgaggaccgagaaatgtggatcactctgctttctttgtaacaatttagaacttcgttcatacatgatacatatcgaaatctacaatgtctataattttttttttcttgacatatatatgtatttaccgttgtataaaacattaaatatctggatttatgatacagtttgttgtcattacaaaattaatcttaaaacgataccttaaactggagaaatagtcatactttaattttactttgaaacgaagtcaacgaaggttaagtaaaattgttaatggtgtcaccgcgaagttcgtccaaaggcacacagtctccaacatgtatctcaataattaattaacataatagcccctttattaagcaaggatttgacttttcaccactataaattcacaatcaacaattctcattatcatcaaaacaaaccaactttccttctctaatcaaaacaagaaagacacaaag

SEQ ID NO: 1212 - DNA, 3000 bp, Unknown
  misc_feature (1)..( 3000): cDNA_ID_3061146_gDNA_ID_1620372_Annot_ID_155031 3000 nt of promoter + ATG
gataatatgatcgttattattattatttaatcagggagcttcaacttcaagtcaaaatctagtaaataaccaaaagaaagaaaatatacgtctagtagaaaaaattaacaatgattaacaattaaaaatcaatttatgacctaaaaccacgtacgtgtaggatgatgacaactagagctacactagactagactaagattatttggttatttaaaaattcttgtagatgattggttatccaaaagttttaacttttcatgaatcagtataaactttgattccgctggcgagtcttatcactctatcaaacacattgttatgtagactatagttgattgttaatacataatttaatttcaatcaaaattaacaatgattagagtgtaaatcttttatcaagcaaaattaaaaatacaatgattagttcacgtcaatactcgccgatctcaagggtatgcaaatattgcgcaattaatataaaatgatcttggtgcgggtaataattctacacacacacacccgtaagtattttcataagatcatttcataaacacaatattgaatttttttaaaacatgtctacattcaatgtttacttttgatttggagtattattttcgttaagttaaagtagactacttttgatgtttgcggtccaattcattaaaaaagacaatgatgagatgtgtttgcttaaggtacgtgattatgaatgtacataataatgctcgtgatttttaatgtggcatgtacaaatttgcatcttcttattatcagccttcttacgtccaaacacattaaagatcactatattatgcttgtgttgtaatacattcaatagttgtctatttataacatcagcggctgtaaattgtaatcggcaattgagttactaccacttcgctaaagttattgttctgatcataacaatattttcatttttaatttcgattggtaattttttttttttttttttaacctgagtgaccaaaactcagattaaccttccaaacttcgttaaaaaaaaaaaaaaaaaaacttccaaaattcatagaaatttggatttttatttgaaaacattgactactagtctaaaatgtttgaattagcagtacaaaatgctctaaatttatttaaaaaggacattcaactttttttttttaaatcactggaccactactgattaatttccatcgctatatagatgccttttttattattactaagaaattttttaaactagaacattttcttaccaactaccgatgacaacaaatagatatgcatctttttataagcgcatttcgatatttatgcaaggcaagttaaactttaaaaaaaaatattttaacagaaaagtcaaactcctaatctttttttctactccttaacccctttaaaatttatatacccctacttaattaaatggccatatacaatacaaaatattacaccaaatcaaacttttttatatattcaaatttcaataatgtaagatttctctagttctaactatagacaattatatactttttgtttattttccttaaaaatgtagacatgcaatgcgaggagttaaatgctttgcatcattgagcatgatggaaagggtaatatcttaatttattaaaatttctgacatatccacaagggaatgtccccatttacactcatgtctcttcatgtctatcccaattcgtttgtcctaaagtctctgacattcttcttcttttaccttttctcttaaaaaaacatgcttctgtcttttttcttgttttgtggttgtagtggcgcttgtattcgaagtacgagagaaaacgtaattcgccagttcgcctaattatcaaatttatcagtttgggtttaaactttgaattgttctggacttgttgtaaccgcatatgtgatatatgtgcatagaggacacatcaacaggacttgaatcaacgtcttaaagattgatctactacgctaattaacagagaaaacgacgaaaaatgtttgaaattttagttttatcacacagttaaagttatcagtaatattcccaagcagaccaatcatttcaaagagtgaatggttccaaaataaaatcatattctaactggaattatggattaagttatatatacgcatcatcatatgctcattaaaattttggtaaagctattatcgcatgcgagttcaagattttagcgatagttacgttgctagctcaataaaaagaaattcgttggatctttatatcaaataaatcacgattattgaactttatgaattgaagcaacgtctgaataaggaagaaacatgtaattgtagtctataccgttccatttaaataatttaaatgttggataagatactttctttaaatccatatgcatatcttaaaattgtccccacgaaccggtgtcgaccacaacttttgattttaatacgtgtgagtgaatgttggctagaaagtataaaacctaaaagtgggccaaagtatcttttacaaaattgggtttgttgaaaagtttggtaaaatcaagctaaatataagatgacaactgagtttatgcttttaaaatttcacactactcattagcccactcaacattactcattgtgcgatgtgatattaattacaatcagtagtcaaatttaaccccccaaaaaaatatcaacgcattttctaatttcttcttatttttggtagtttaatgggcttgtaaacataagcttagtaccatgtaaacaaccacaattatgctaaagattgttgctgatcgattagccctactattctaaatctttgtatatacacaatttgttggttatcagattggatccatagtgactttgtacactccaatcattaatataagttaatgggcctttataggctttaaaaaatcagcccattagtatatatcattaaataataatggaaaattagaaaagactgtgaagcgagaggaccgttaagacgacggacgcttatctggaaggagagtc

SEQ ID NO: 1213 - DNA, 3000 bp, Unknown
  misc_feature (1)..( 3000): cDNA_ID_3409203_gDNA_ID_1620372_Annot_ID_155028 3000 nt of promoter + ATG
atgacaaagtcccaaacacttacaggttgcaaatccccaggacattttgatattttccaaggcttctaagaagggtcggagcgaaggtaagggcattggtgtactagtaatttatacaattttgtttggattagattgatgcacgtgcttttactctaacttgtaatagcttatctggcaaaaattacggttaagtagtgtatctgagatatagtaatgtagaacaatatgggcctatgataacctcctttgttgttttattgtcggtattataattctcgtcatatatatcatgactactaactttctgttgtgtggagcttgatattgatgtattgagtgttaattttctttctgttccacttttcttgttatagttcatgtttcttcgtgtgtaacctatagcatcaaaattttgcgaatcttatggattatctctagttagtatatattggaaatttgccattttgataatttttttgtctagtgaattgaatggcaatgatgcatgtcctgatggttgtccagtgatccagttatgatatatttcaatcttccatttcacagccaacatcgatgattctgagcggcttcgtccagaagaactgaaccagcagaatatagaagctttagtagctgaaagcaacctggtacatcctgcaaccttctttccttatgattgtgttattatcgtcaacccctgtagaactttgccacagaatgatatagacttgggtagttaccaaatgggcatgagtacactatgggatgatcattctattttcttccgcagaaaatggagatccttccagttaacgatctggatgttgctcttcacaattttgtgaacaaggatgataaactagccttctactcatgcgttcagtacaatcttcaagagactcgtgtatgtactattttttacttcaccattcaatacaaagttctgcataggatattatttttatttcgtagcacgtccttgttattgcttttatgatttatctcttccctctttttgtacagggtaaacttgcaaaggattcagatgccaagaaatttgaggaagatgacttgattcttaaagtgggagagtgcttagaggcaagaagatatagattcagttagttctgccgcagattatgagaaccagcagaatattgatctcacttgcattattgttcgtgcaggaacgcttgaaagataggtccactcgacccactggttcctcacagtttttatccactggattgacttcagaggtttaaattctcttttttagattttccttgcctctgtccttccgttggtttctcacagtgctattttctacctgagattggtacagaatttgacaaaaggaagcagtggcatcgcgaatgcttcgttcagtgatgatgaagacacaactcagatgtctggtttagctcctcccactagaggacgaagaggttcatccactgctaatacaactcgtggtagagctaaagccccaaccagaggacgaggccgtggtaaggcctcaagtgcgatgaagcaaaccactcttgatagttctcttggtttccgccagtctcaaaggtaactttttgacagcacatttaaccagtttagggtaggattcacggacgtgcaaggaaatgattggcatcactagctagctaatgttatgtccctaatttgtctttcatagatctgcttcggctgctgcttcagctgccttcaaaagtgcttccaccattggagaagatgatgtagattctccttcaagcgaagaagtcgagcctgaagattttaacaaacctgacagcagttcggtatggactattccttacactgttattcatttgttcactaccataagaaagcccatgtaaaaacttgacaacatataacttttggcattcttatttctctatttgaagtaaattttgcgtttttacttttcctgattcttgtttgatatccactaaaggaggacgatgagagcactaaaggcaaaggacgtaaaagaccagctactactaagagaggcagaggtagaggttctgggacttcaaaacgtggtagaaaaaacgaaagctcttcttcacttaataggctactcagtagcaaagacgatgacgaggacgaagatgatgaagacagagaaaagaagcttaacaaatctcagcctcgggtttgttaatcacatctattttcccttctttcgctgcttattagcaggttttagtaagttgttgttaaccatttgagatcaaagctcacttaatagtacaatttgaatatgcaggttacaaggaactatggagctctaagaagataaatacatatcaaaccccaatctctgacatcacaacgaagcttcatttttctgttattttctagcgacctctcaagcggaacaacttctgaagaagagaaattagtactaacaagagttctgtgagatgatgtacagagaattttgtagtgtttttttttcttgctctttttaaggttacgttgttgatgaatgaggcaatatgattaacgtcagtaagaagtctaaaactgtagtaaccaacaagttacttagccaataatttaatccctaattttacatttgaaattcaaataatttgggacaatctaattaatattggaaattcgaataatttaactaatattacattttacatctaaatcatagtttataggaaaaaaaataaaacattataaaataaagagtaaaaaacttaaatgggcaaccagaaaagaaatatggataaaaaagagatggaattagagatacttcaaatccaaagctgtttcctgattggctaatcccaacatctcactctctatctatatcccatctctgattctcccacctctcttctcatccacaaaatactaacataaaagtcaaagtccctgagaccaatactttcaccaaacagcaaaacaagaagaacaacaacactaagcaaaaaagaaaagctcaagccgagagagaca

SEQ ID NO: 1214 - DNA, 3000 bp, Unknown
  misc_feature (1)..( 3000): cDNA_ID_2131772_gDNA_ID_1620372_Annot_ID_155025 3000 nt of promoter + ATG
gtggcaatcagttgcaacaagtactcgaagtgtatcactaaaatcctccctgtcaagttttacaatcatacactgacactcataagtttttcaaaaaacaaaatgaaaaaaaaaaattgttcatttcaataaagctttagacatctagttttcctatagtcagtatccattaatacacagctggcgcagcatatatatcagagttaaacatgtataaatatatccatgaaagagtgtaaagacaaatccaaaagctgacctagacatgatgccaagtgtttgcagctcagtaagtaaacctgaaaaagaccaaaacgaaaaatttacatgatctcatactaagaaaagtaatctcagataagaatcaagcacatatctttgattgaatccattcagcctttattactaaaacatactgaaaaaaagctaaaaccctaaagaatgtggatttgataaaccaaaatcgtcatttagttcctaaaaacaacagaaatcaggtctgaaattgattctatgaatagaaaacctaagtaacaaaatcaaaacccgaggatcaaaatcactcggatttgaaagcgaaaatgtacttcaaagttggctagaaaattagaaattaaacagtttcaatactataaaatgaagctccactaaaggatttctcctaaatccgaaagccactaaccaaatttaatcactaggactgtttcgagaaatttctttagttctcgcattttctcagctgtgtggaaaatagaaccctaacctggtattcaaacggattaaagtgaaccgacggagctccggtgaccggaaatagagagaatccgacggaggtaagcgagactatgattaggagagacaggcgcggggaatttcaaagcgagaggcgacagagagagagtgaatgaccaaaaatttagggagacgaaagttctaaaggaatatatatttacatgtatggtccctcttttagtttcgttttgtcttaatatacccaaactttaaaatgttatacggtttgattattcatgaaaatcaaacggttcataattggtttggttctggttttttccaactcgaggccactataaatgcttcacccaatcttaaaaatgggcttaaggcctcggcccattttattttattttgcttttatatattattaatatcatgataaatagagggaaaataactaaaataattcaggaaatatgccaaagagaataacagcgaatatgtatagagaaacggtctaaaaacaatttgatataataataatgaaagagagataaaagagtgagaagatggaatatgaggtggggagaggttagagagagtgatggttagaattgccatatgtaagagatgtacttattctaagaaatgacaaattactatgttggagtttagtgaacaaagaagctcaaaatacttttattacataacaacccaacaaaaatgaacatttcatgtgactcatgccaaacacatatcttctatcttccacttttttctattatataattcgtttttatatgctgaattaataaactccatgtgcttaagaatatatgaaataagtatactgtttactgaagtttttgtgtgtcgctaaaattcattacgtcactcacatatccaaattatcatgcatgaatccaaatcaagcatgcatacagattaaccctatttggtcttgttgtctacgagttggtaaaaaccagtcctaaatttatcgctttctcatttgattatattatatgagcacctatttcttctcgaaaaaattgcgtctatctaatgaatacaatgtctagtgttttgttttaacagtgttatgttcactgttgaaaccgttattctattcaagttaatgtatcggtaaaagtatatatacacatgtatatagtggtttattcttcaattaataaatattgcacatctcttagatacaattagcttatatggtacaatttcagttttctgttagtatttttgtttcagctgtttttttttttactaatttaacgggatcaataatgatgatatcatacattattgaatcgacaaggatcacattcaacatctagatgtttgtttgcttcttatattatatatatggtacaaaaagctctgaaaaaaaaaataagaagaaaaaagagttcaaaatccttaaggaaaaaaattccttcgatggcgaaagaaaataacaaaacgtattatcaagaaaaacaaaagtaccaaaacttgtttccttttttttcttaaaaaaagactctctctctatttatttgcttcgaacgtatctacgattctacgaatgagaccaaactattcaaactcattatgcttttacgtttgtcaaattacatgaacaccccttagcctcaagttttgactgggataccaaaaaaaaactaaacactgacttttaactttcattatttgtagaaatgattatagaagaaacaaaaggactcatttgtatttcaagaagttgtttttagtgtttaatcaaatactactggcattagtgttcattttgtttttagctaggtgttcttttttcccttgcaaactctatattaaagatagtgttttaggcatttcctaacatatagaaagactacaactgttctttgtctttacatttcttttgtattcataacttagaatgatccttcactttccatgtttggtacatgaatgttacatgtttgtgcttataattgctggtcgttgctactaatcaattactttcaatcgtataataattcttcttcaacatactaaactcctaattatatagtttcttattagtataacaaaaactcgcaagggtataatggtaatttgaatagcactatgtcatttcttttacatttttagaaaattcttcttcataattaagacaacgttcatctccaagatttctctccattgtcgaccttcacaaaataactatctctctctgtgttgcatgcgttagtactttcaatg

SEQ ID NO: 1215 - DNA, 3000 bp, Unknown
  misc_feature (1)..( 3000): cDNA_ID_2131778_gDNA_ID_1620372_Annot_ID_155027 3000 nt of promoter + ATG
gttctgtagtctaggaagaaattaagatagaagctcatacgaatgattacatctaatataaaagacacttcaaaacaattaaatcagttttctttaaaataggaatattaaaatattggttaattactaacctgaggtaatggtaatatgacgaagagatcgaagaagaacccattcttcttaacgtaaggtggagcaaccctcgtagagccacgtgtccctcctcctttgttggtatcgccgtcgctatctccgccgggataaggccaccggcgagcaatcttgaactgaatccaaatgttccaaaggtgcaaaagatcggtcatggagcgtaaggcagtgacggtaagagcaagccaaccgtcgacgaggagacacatacacgtgtcgctcactgatagggtatagagaaaaagtgggtctacgaatagacccgttgcgcatacaaggagaaagactttgttccattctcgaacccatttggatctcgggtcaagtattcgacccaacatcatccatttgttgttattacttgacccgtttcttcttcctccgcacgtgagccctatacgtgggtcttcttcttcctcttcttcctcctcttcttcgatttcttccatctcttcttcttcttcatcttcctcctccgtgttatcttcttctgagtaatatccaacgctgcttgagtcacgtgagaagcgtgatgcgcgtgtgaattcttgttctgtggccattgaaagtactaacgcatgcaacacagagagagatagttattttgtgaaggtcgacaatggagagaaatcttggagatgaacgttgtcttaattatgaagaagaattttctaaaaatgtaaaagaaatgacatagtgctattcaaattaccattatacccttgcgagtttttgttatactaataagaaactatataattaggagtttagtatgttgaagaagaattattatacgattgaaagtaattgattagtagcaacgaccagcaattataagcacaaacatgtaacattcatgtaccaaacatggaaagtgaaggatcattctaagttatgaatacaaaagaaatgtaaagacaaagaacagttgtagtctttctatatgttaggaaatgcctaaaacactatctttaatatagagtttgcaagggaaaaaagaacacctagctaaaaacaaaatgaacactaatgccagtagtatttgattaaacactaaaaacaacttcttgaaatacaaatgagtccttttgtttcttctataatcatttctacaaataatgaaagttaaaagtcagtgtttagtttttttttggtatcccagtcaaaacttgaggctaaggggtgttcatgtaatttgacaaacgtaaaagcataatgagtttgaatagtttggtctcattcgtagaatcgtagatacgttcgaagcaaataaatagagagagagtctttttttaagaaaaaaaaggaaacaagttttggtacttttgtttttcttgataatacgttttgttattttctttcgccatcgaaggaatttttttccttaaggattttgaactcttttttcttcttattttttttttcagagctttttgtaccatatatataatataagaagcaaacaaacatctagatgttgaatgtgatccttgtcgattcaataatgtatgatatcatcattattgatcccgttaaattagtaaaaaaaaaaacagctgaaacaaaaatactaacagaaaactgaaattgtaccatataagctaattgtatctaagagatgtgcaatatttattaattgaagaataaaccactatatacatgtgtatatatacttttaccgatacattaacttgaatagaataacggtttcaacagtgaacataacactgttaaaacaaaacactagacattgtattcattagatagacgcaattttttcgagaagaaataggtgctcatataatataatcaaatgagaaagcgataaatttaggactggtttttaccaactcgtagacaacaagaccaaatagggttaatctgtatgcatgcttgatttggattcatgcatgataatttggatatgtgagtgacgtaatgaattttagcgacacacaaaaacttcagtaaacagtatacttatttcatatattcttaagcacatggagtttattaattcagcatataaaaacgaattatataatagaaaaaagtggaagatagaagatatgtgtttggcatgagtcacatgaaatgttcatttttgttgggttgttatgtaataaaagtattttgagcttctttgttcactaaactccaacatagtaatttgtcatttcttagaataagtacatctcttacatatggcaattctaaccatcactctctctaacctctccccacctcatattccatcttctcactcttttatctctctttcattattattatatcaaattgtttttagaccgtttctctatacatattcgctgttattctctttggcatatttcctgaattattttagttattttccctctatttatcatgatattaataatatataaaagcaaaataaaataaaatgggccgaggccttaagcccatttttaagattgggtgaagcatttatagtggcctcgagttggaaaaaaccagaaccaaaccaattatgaaccgtttgattttcatgaataatcaaaccgtataacattttaaagtttgggtatattaagacaaaacgaaactaaaagagggaccatacatgtaaatatatattcctttagaactttcgtctccctaaatttttggtcattcactctctctctgtcgcctctcgctttgaaattccccgcgcctgtctctcctaatcatagtctcgcttacctccgtcggattctctctatttccggtcaccggagctccgtcggttcactttaatccgtttgaataccaggttagggttctattttccacacagctgagaaa

SEQ ID NO: 1216 - DNA, 3000 bp, Unknown
  misc_feature (1)..( 3000): cDNA_ID_3061227_gDNA_ID_1620373_Annot_ID_155047 3000 nt of promoter + ATG
tggttaacggtggcgtcgccgcactcaaggcagtaccaggagcaacagtcggtttgagggtcccatgaagcgaggtgataagggttgtttagagatttcttgatcttgaggagggtgtttttgtcattttggttacagagatctttagacaaacaggtcgtgaggaatgtgaacaagaacaagagacacaatgtcgctgtcttatccatggtgttggttttgaattttgatggaaagtgttagtgatacatatacatactatatagtgagtgatatagacttagagagacggattcgatttgatctctgtttccacatggaccgtaataatagtcaatacatatcatatagtcaagatgtcggcgttgaatatgtttgggtaatgcaattacgcgttgtatataattaggctataaccggtgcaagttatatctccttgaagcatttggaaatgtatactgaggcaatgtcttcaccatctaatacaacttctcaaaagttcatccaaatttaagtaacccaattgatctatccaacaaacataagatttgagagaaagtttagattttggttcatatttataagaaaatatcgaacaaagtttatggtcatcttcaaatcgatccgaccgttggaagagatttatcacaaacggctctattgagataagtgatttctgtttttctatgaacaaataaataaaataagttaccgaagaagagccaaagtgtgggcttaattcatctttcagatctcaatgaacgtgaatgaggcccaattagtttataatgggcactatgaaagccactagacaagtcttatgttcacaaatgatgatcaactgtatctgatccacaatgtaaaatgtctaatgttcacgccaagtctaaatgctttggtttcgttagacattaataaatcgtaattgtgaaccaaactaaaccgagaaaaatggatattatgtgacaagtctatcaagatgatgcataaaagaacataataatatagtcatcattactaagcatcactgaggcagcaaaagcggaccactaaagttggatcctttacaacttgataagttggttcataaaaattcaaattagccttcataaaagttttaaaaagaaaaagcattccagtttattcatagtttacatataacatagatgtaaaaaatgttagaaccatcttataacttttttgataaagaaacaatacaagaacttattccacacctttttattctttcttttgggaggttttgaatttcaggcaacttaaattcatctacgttggtaaaaacaattctttatcctcagaaatgtttattggaaattgtgtagaactcatctataacttgtctaaaatattaaacacatgattttgaagaagattgactacatcctcatgagagctcatttgctatggttgaaacctggacacattttaacaaatgcaagtggagtgaagaaccggttcttgtttgatactatacaaagggaaatgtcgatctaactgaagttagtttcatctctgctgttagggtcgatttagtctcggttcactgattctttttaccaaatagtttaataagctccagtgcgggcattagaaataaaaatggcgagataataaggtaatgatgttactcaatcaaataataataatcactccttagcctagcctgcccttttgctttttatgaaaaagtttcaaactccaaaaagctattttttagatgcttattccaatgaggcagaaagaaagaaacactaaagatatatatactcacaggggaaagttggtgttggaaatgtttctaattatcactttggcactaagtatattatctgtgagttcttgtaaatttatgtttacatgttttattttatatattgatgcgaaactatttttgtgaaaagttttgattaaagcatgagaaagtttcacttgatgttgggtttgagtgttttatccgggtttattcatccttgaaatcagtcatgcaatttggcaaatatgtggtgtaattttttacaagtgtgagagaatctactatttctacctttgtcactgctgaaaaatttcttaatgtacctaaaagtcttaagacaaacgaagaatctgctttcctatttaataaaacgaagataacaaaaaaaaagaatcagcttccctcttaaagaaggagaaaaacagagagaataagaagtaattttttagggttcttcctttttcattttgattcttctttttctttgagatagaattgtttctctttcgttctctctctgtgtatcaaacaaaaatttgattatggaataactcttaacttcttggtttcttaaattcttctttctttctttttttcatttctatggtacagcagcaaacagagaattttatggcagcttcttcaacatctttctcaaggtactgcttactaagttaaacgcatccttctttacatatatacatgttcttgaaatattgttggtccatataaaaatagctctctttttttgtaagttcgaatactatagatttatctctttcattgattttgtttgctatcttctttttctcttcatttactctctatttatcgttttcatattaatccttctcttacttttcatttgcaaaagataattcaagacattctgtgttttcctgcaaacacttgaatgagttcatggaacagaaccaagagacaaagcttatatttgcgtcgaccacttagtatatattgtttaaatcaggtaagaatcctttcaattatcttggttgagattgaaagtaaattactaaatactaattataaaggttttaaatcagttctgatgagatacattagtttctttacatccaagaaacaggttttgtctaatcattttttcctgcaattctcagattctgtttttttgtatgtcaggaacagaattgaaacgttttgaaagaaacaggagaatcttttggttcaagtaatctaaaaccatg

SEQ ID NO: 1217 - DNA, 3000 bp, Unknown
  misc_feature (1)..( 3000): cDNA_ID_3061209_gDNA_ID_1620373_Annot_ID_155054 3000 nt of promoter + ATG
agcctgctgcgatgtctgttgcaggttatttatgcccatcaactgtctctctgtcattggctccaactgattcgccagaagctgtttcaacacatttttccctatgaccattctttttatgttctatgtagaaacagatgcaatcggtgaagacaaagtgaaatttgacctcacctttagaagttcggatgaacgaaatccaccgagccacaagaaacatctctcagctggtgttttccacatgccagatagcaagtgaaagacatcattcttagctgcattgctctttatcctgaaaagctcctcatagtgagccatcacaccatcgactattattcgaagctcagaatcacctgcatgcgcattcagagcagacctcagctcgttcatttgcttgttcttttcttccaaccaccgtgaatgttcagcatcaaacgccaaagcacctgaattaaaaaatttatacatgatcaaaacaaacccatgagattcgtcatcttgtaaatctaaatctacaccagtgctaattagaataacagtttttgctatcagaaccatgtcagtctgccactgactctgataacccagtgtattgtaatgggatgagatatgatgtactaattgatcagtctacaccaagtcaacaggaagttgatatatgaacttaacttatacacaaattagaagccaaaaaataaacataattaaaactaatggagaataagcaaccaaccatttccaccagtagaatgggcctggtctcctgtgcctgaaatgaagacgccctagaaacaagaaatttaccgttaggtatacagaataacaaaataaaaatcaatagaaataagaaacaaatttgaacctgctgtcttgctctttgcagctcctgctcaagctgggttagtttcaagcggctgttctctagctgctgaacataagcctatggagggagcaattaaaaggaattaacgtagtaccaaatagctatgcttctagcgatgcaccaatttaaaaagaaaagaaaaagtaaaaaaagataaaaccaatggaaggtaatataccttcttcctcaatctgcttttccttgctgcctcacggttttgagcaagcctacgaagagtctatggatcaaaatataaggaaacaaaaagagattataaattggctgaataaaaacagtgatcttatctacagagatggacatgtcaccttttgatccatctttcccttcgatcggtcactcgaatcagaagcagcagtattcactagtgctccctccgactgcattaaaattaacaccagaatttttgtttggtccataaaaaatcacactattttgaagaatataagtgataaaatctagccagattatgagctaaccccaagatcaggatgatctgtgtcgtcatctgttgagacatcagttctcggactggtatcagccatattactttctcaccacttttctgtactaacacttgataacaaagacaatatccacttgtggcctctcttttagtaacaacttcttgaaatttctcttgtgtgcacagactgccaggattcggaaggaaattaagaaaaagaaaaaaagacagaaagaacaaaattaggtgatagaatataaaagaaagatcaacacctaccaatacgaatcaataggaaatgaatcaggaacaaatgttggtcacccggagcattggctgcgctgaatgagcacaaaaaaaaacagcattacataccatctcttttgctaacatagttttcaattatgtcctataaagtcaagaaaaaggttctctagtttgtttcagttaaacaagccagctaaagaatgctaaagagtcctttacttattcaaagtgtcctaagggaaattctgctgactaccataagtcacaaagtcaaatatataagaacaatctgtttgtagctaacagactgacaaaaatagcccatcaaaaacacaacctttaaagcaattcatcaaacccaatcagacatgtagcttgcacaatctacaaagtctgagaaactcattcagaccttaagcttagctcgcggatcaaagtcaaaatcagtgagacttaaggtgttggcacagtcgaaaatgcctgagtttgaaaaattaggtacagtcacactcacacacatcatttcaattcagtttgaatgacactaaagtagcttcagtagctgaatctcttagttttgcaactctagctagaacaaaaactattcagtattcacatccgagttgactcaattccttactcagtattcatatccgagtaaagtaaaaaaaaaaagctaaactctaaatctagaaccagtgagaattcggcatgaagctgcagctatgatttcaaaccaagaaactaccaccgaaacagaattcaagagattaacatttaattcgatgattttggtagctcaaaattaagaacaaaatcaccaattaaaaaaaaaaaaaagctgaactctttaagcttgagaaagtcaactaggtttaacttcaaaagcaaaaagacagagttaacaagtagcttcttaggactgtgaaggagaaaactcccagaaaaaaaacaaaggaagaaaaaccctagaaaaaaaggttggcttgatgaagaaactgacctggaaaaacgaaatcttgaaggtgcacaagtaaagggcttgattcgaaatcggattgaaacaaagaaacagagagagacacgatccgaaattccaatctccgagacgtcgttttgtctacaaatctaccagttccccatagaccctcgaccaaaatttaacgggaaatttcaaactaaaccctatactctttatttttaccattaaccaaccctactatcttataattgcaaaacccaccccgtattttcaacacctgaaattcaattcactctcactctcactctcactctcactctcactctctcactacttcactcattcagcagatcctcttcattctctattcttaactcattaatg

SEQ ID NO: 1218 - DNA, 3000 bp, Unknown
  misc_feature (1)..( 3000): cDNA_ID_2132042_gDNA_ID_1620373_Annot_ID_155057 3000 nt of promoter + ATG
aaattcagtttccctactgacaaaaacgtcatagatggtgatgagtcattagaactattgaaggtgatgagtccatttttaagcaaagtatgattaatgaaaaaagctctctttacctggttctatcctcaaggaactcatccgagttggagtctgacttctgttgtgagttctttgcaagccggtaaaaggtatcgcggaagcacttgcgggtatcatcagtcaactataagaagaagaatgtaaaagtctgttacaagacagatcaaatctcaaagaagattatataggctagatcaaatcaccacactcaccatttctgtagccctttgtagatcctgcaacacaacttcttcagcagatgcctcctccttgttctcctcacacagattcataggtgcatcctcctccttaaccaaaagaatgttccaagatcattaacatctttactattatctcacttggaacaacaatagtcaaacacataaccgagagatctcagaccaaaatccaaaaccagactaatcccaagagtctactgaattcaacaagatttgtcaatcacttagtttctcttttctactatttaacattgctagtatatcaaaagagtcgattcttaccataagtggcatatcttgacaagtttcccagttgtaatggaacaaagggacttccctgccatcagttgtgtcgagataggaggaactggagctgttgttattatccgactccttgaaagaaagaaaattctcattccctggaacatcctccaaaatggaacttcttcagtcaaaaccggaaacaaaaagagagagacacaaaaatataaacatcgaaaaactatatagatttttttttttttttatgtgatatataaacaatttcttacaagaacatgtcatccatgtgttggatttcatcaaaatcatgaagcgaacggtcaaaacaaccactagcctttaacttcttagtttcttcttctacttgttcactagttcccatatccatctccatctgactgtataatcctccactgaaaccattgtgaatcacatcataatcaaaacatttctcagcagcttctgaagagttcatgctccatccagtaccccacatatcaggagaagggtacgaatctgatgtctcttgatagttaggcacaacaagatcctctaaattcctcctcgaataacgatccatgaatgatactttaacctgctaacaagtcactcactatattcagcaaccaacaggagaaaaacatttgaattcttaagaataaaataatcaaaagaagtcacctttatgatcagatctaaatccaaatccaaaagattatgagtctatcttcttctatcttctgtagatttgtgagtgcgaaggaggaaagagagagaagacaaagaagcaagttgaagagaggaagtggagagcgcgtgagtttgaactttagttagtggcttagaattcacaaacgagatttgtggcttagattactcctccatctaaagcaactctttcattggtccacgtgttaaacatatctttttctgtgtgaggtcggcacttgaattaaaattaattaaatcttgcaagacacaactggccaacttgtacgtttttgtagttcttaaaagttgtctgtttacgggtagacgacaaaaggattttaagttacggatataccctccagatcaggcagtggttagcggctcaggtttggtgacgacacgtcacatgttcactcgatttggtgtagacacgtgtcctgtaggtatagggaggtgatgacacgtgacagactgttttgcggtggagtgggacccatggtctcatggggatgcagtggataatgttcctctcaggctctcactctcttaagcaaaacttttaaaactggaaattggtttaggtcctttataggaggtattttgaaaatccacccagctgccgacgatcttataggtaaagtggttaatccagttttgcttgttacttcgtaaggttaatatatgatatagtgggcctgacaaaaaatcatatgggcttgacaaaatctatgtttatatccagttcggtccaaaattcgaaaacataaacaatgtggaaagatgtgttggctaatctgataccatgtcaaaaaaacatagaagttcttgtgaggtttcttgtttattcatgtggaggcaattgcccttgtatacaaggcttgtgaaagaagtaaagaagataagtttaggaagaaggtggcccatgagggcccaatattcatatcattagtgaaaagcataggaatttcaacttgtaatattaaaatcagtgataattgaataacattaatctttttaagatttccaaattaattcaaatcttcattaagaaataagatttaggaatactaaaaagctaaataattatctaattacttaaaatcagtaatgaaaattaatattatactcccatagtatattttcttcactatgaatgaagttgagacttcaattttgacaaattcggtgttctggaataacaaaagaagtcaaagaaagaaaattagggagatagagtaaattaaagttgagacaaatcagcttcattttgtttttcccaaataataatatacagatagatctttcggccccggcgcattctctagatttgctcatcaccacctcgaaatttctgctcgaagttctccaaaacagttcattcatctacatttaccagatcatattcgtattcagtcgtctctaaattctcactaaatcaatccttcctttggataattccggtgtttgcgaggaatctgataaaatgattggttagttcagttaaactctacttctaaaactaaatctgcattcaaatgtagtctctagttctcgtacttgaagtagacttgattcgatttgatttactgattcgtggcttttgatttcacaggtcaattggaaatctgagaatccgtgtgactattattgcagctggatcgagatg

SEQ ID NO: 1219 - DNA, 3000 bp, Unknown
  misc_feature (1)..( 3000): cDNA_ID_2132070_gDNA_ID_1620373_Annot_ID_155064 3000 nt of promoter + ATG
gcgttggctgtccttctaacacggccttttcccctgctaagtctacatccttcaagaacgttagctgcagcgctcctcagtgtaagcaggtatataattttgtacttacacacctacagtactacatatctaataaatatgtttttggaatgttttttgattaatttattttatcctcacacttacactttcatagcttcataaatgaaccggtagtattaaaaaagaaaaaatagtttatgaatgtctcaccatactatattgtagtcaaattttaatattagtaacctgcatttgttttcatcataaagatgtgagcatgagaatgttaattgctgccccaaaatgaaaatatatttgacaaaatatcagatctagaaattttttagttgatatacaaaaaggacagtttctattttattacgtgaaaaatgtattttcacagagagtgggttccacgtggttataattgataattccacccacattcaaagaaaaaacggtcacgggattacagaaccactaaacacttgaccgacacagagacactgtactgcattaacaacaattcacgtgaacacttgcttcaggtaccaaaccccacgtgtggagcacgcgcgtgctctttcaacctcacctatggaagctcctccattgcggctaacctctctcaagacacgatacgtcttgccgccgatccgatcaaagcctttacattcggatgcgtcaacaaagtcgccggtggaggaaccatcccaccacctcaaggcttgttgggcttgggacgaggcccactttcactcatgtcacaggctcagtctatttacaagtccactttctcttactgtttgccaagtttcaggtctctgaccttctctggttctctcagactcggccctacctcccagccccagcgcgtgaagtacactcaacttctcagaaaccctagaaggtcttctctgtactacgtcaacctcgttgcgatccgcgttggtcggaaagtcgtcgatttaccgccggcagctattgcttttaatccttcaaccggcgctggaaccatcttcgactccggtaattactcttgtccggtttggttccggttaggttttagttttctgtttcaattggtattaatttcgtattggtttagactaaaaacataaatctttagttaattagtgtatttcgtattgttttacactaaaatatatacgtaacaaaatagaataatttagtgtattttattcgattcggttattttcagttataatataattttagattggtttggttatattaactaaaccatttgctgtgtaggaactgtgtacacgcggctggctaaaccggtttacgaggcagtgaggaacgagttcaggaagcgcgtgaagccaaccacagccgtggtgacgtcactcgggggtttcgacacgtgctactcagggcaagtcaaggtgccgacgataacattcatgttcaagggagtgaacatgacgatgccggctgataacctgatgttacacagtaccgccggaagcacgtcgtgcctcgccatggctgcagcgccggaaaacgtaaactctgtcgtcaatgtgatcgcaagcatgcagcagcagaaccaccgtgtcctcatcgacgtccccaatggacggctcggtttggcacgtgaacgatgctcttagaaagatgaatgagacaataagagcctactcatatttatgcagagacttgtttgtttgtgttatttgtgtgtttcatttttgtcttgtcttgcgtcgtttgcttcaccagtcttagagggcggaggtgtgtagcatttgtgctatctagtaatttatgtttttaattgttcttcaattatctagagtgttggatctaagctaatcaaataatgaaactatattatatttccttacggtatacaaatatacaattgaacatattaggtaattagaaatacataaaattgaatataatattagcacaatgatctaatcaaattttagtcgttgtcttaaattgtttatcgacaatcgatgttcatcaattggcccatcagaaatagcgcgactagtggatatttcagttcatagttttcaaaaagaatccactttaaagcttgtatagggtttgtctggcatggtaatatgtataagacaataattttcataattttatcaactagtagagaaagaaaattgattaaaaaaaagtatgattaaaagaaaaaatatagttttgagtttcaaacgagtaatgtagaaagtgaaaaccaaaagagaatgctacgccaattgcttaaaatcaaatcaaatttcataaaataaaattgataatgcgaaagagaacagagagacaacaatcacatcgatcatgtaaccacctaaacaagttccactctggttcactccattatgatggtacttgtatacaattcttttattccataccgggaaagtgtgatttgaaccccacacatgcttaaggtacaatacaatggatagtggctaagcactagcacacaaggtattttggggtcgttatgattaaactatggcaaaactgatataattcgttaatgtctttttacgggaaaatgaattgaataatggaatataaagtggacgaagcgggaaaaaaaaaagcgatatgcggaatatctctagaaacagaataaagcagaaaaaaatcaaggtgcactaatccatacaaaattttccaataattggattgaataaccgaattttaaattcgtcattgagaaaacagatcagaaagaaaaccgaattttattccggtttgatttgaaattgtttcaatttggtttggtataatttggagttaggaatttgtgggtttggcagttacacgcgtaggctagtggaaaagcccaccacacataacacacacacatcttcttcctctctttatcttcttcttctctgtttctctaagaagatagaacaatcccaagattctcctcttatttgatcaaccatg

SEQ ID NO: 1220 - DNA, 3000 bp, Unknown
  misc_feature (1)..( 3000): cDNA_ID_3061168_gDNA_ID_1620373_Annot_ID_155072 3000 nt of promoter + ATG
cataatggaacaatcataagaagaagctatatatggcgatgtgtatgcactgcagatggtttggagtcacaggctcatagcctcatatgtttacgttaatcatcatggaaagcgatttttgatccaaaaaaaaaggaaagcgataccaaggagcttgtggagtttatggtgatgctgcttttgcgctggttaagttgaaattcagaaagaaagataacccaaaatccaaattaatgattacttcaaacacttttgcatatggagaagaagagctgttcaacattaaacggtacaacgcagcattgaatttccgtgtcccaagcactgactgatgatcattctctaaagtctctataaatatgaccatgtgatcgtacgtggctcctcatgactgccccaacaagccaattactaaacttgtctttatattgcggttccaaaagatctgatgttgatgttctccaaaacagaaacacattttataagataaatgtaaattaaataaagcaattgggaaatatttatatagagtgatgatgaatacgtgaggactagtttatacaccacaacacaaaaacgcgttttgctcattctctctctctcgcacacacgtcaacaatcatatccatcgatgcatttgacttcctcgttcctccatttacatatgtagatccagttatgaaaggagtactagttccaatttcaatacatttatatttaatattttattcaatacaaaagtgttgaaagggattcggataaaccaagcatttttatgtgtatagaaaaataatacttgactttgcagtttccatttccaatcttcaaagtcatatcttaccaaactcacatctctagctaatatatcccctatattttgttacaaatatatatatatatatatatcttacacaaagacagtgcatgtgatatagaaatcaagatgggaagccaaggcatgagttcaccgagtcccttggtggtgaagaaatcgcaagtggttatagtgaaaccctcaaaggctacacctgatgtctctctttctctctccacactcgacaacgatccttatctcgaaaccctcgccaaaaccatctatgtctacgctccaccatccccaaacgaccacgtccacgatccagcttccctttttcagcaagctctctctgacgcccttgtctattactaccctctcgctggaaaacttcaccggggatcacacgaccatagactagaattgaggtgcagtcccgcggaaggagtcccctttgttagggcaaccgcagactgtactctctcttccctcaactatttgaaggacatggacactgacttataccaactcgtaccttgtgatgtagctgcgccctctggcgattacaaccctctggctttgcagatcactttgtttgcatgcggagggctcactcttgctacggccctctctcattccttgtgtgatggttttggagcgtctcagtttttcaaaaccttaactgagctcgccgcgggaaaaacacaacctagcatcatccccgtctgggacagacatcgtctcacttctaacaactttagcttaaacggtatatgttaactagtattatctaaatataatttcttttagatttagacgcattactaatcatcttgatagtttcagatcagttgacaaaaaatagattggtccatatcttttatatattgttgttttaactttattttatttataatgtgatgttactaattaacattgtatatatgtaagtagggcaatgttttatattgtagttttaaatttattttatgtatgatgtgatgttactaattaacattgtatatctatatgtaagtagaccaagtggaggagggacaagctcccaagctagttgattttggagaggcttgctcttctgcggcaacttctccctacacacccagcaacgacatggtatgtgagatcctcaacgtgacatccgaagatattactcagctcaaggagaaagttgcgggggtggtcacgactctagagattcttgcggcccacgtctggagagcaaggtgccgggccttgaagttaagtccagatgggacttctcttttcggaatggctgtgggtatacgccgcattgtggagccaccattaccggaagggtactacggaaacgcatttgtcaaagccaacgtagcaatgaaggctggagagttaagcaactcaccgttgtctcacgttgttcagctcattaaagaggcaaagaaagcggcacaggagaagaggtacgtgttggagcagttaagagagacagagaaaacgttgaagatgaatgtagcgtgtgaaggagggaaaggagcgttcatgttgcttactgattggaggcaacttggattgctagacgaaattgattttgggtatggaggatcagtgaatattataccattggtgcccaagtatctgccggatatttgtattttcttgccgaggaagcaaggtggtgttagagtgctagtcacgctgcccaaatctgtaatggtcaacttcaaggaacacataaatcccctaaatacatgaaattaataagcaggtgaatgtaattcacagtgtttctttaaaatatgaaaaggacctcatgcgattgtatatttaaagcttttgtttgctgtttgtttaagtttttcacatttggaaagtaatattttacaaaccaataatgtaacgccacgtcagcaacaatattccttctaaagaccccacgccaatattccttagtggagtttttaaaatcactgtttcatctaaaaactgattttagctacaacaaaatataaggccgaaaaagaatgctttagttgggcctaaatatttcatgctgtaaaaatgggcctatctaaataagcccaataaatttatgcgagaacaacactagggttttagtttttcttttgatatataatgtaaagggcgccgttaatcgcagcctcagtggaaacagagcagctgcaaac

SEQ ID NO: 1221 - DNA, 3000 bp, Unknown
  misc_feature (1)..( 3000): cDNA_ID_3061192_gDNA_ID_1620373_Annot_ID_155065 3000 nt of promoter + ATG
gattacgaatgagcaggaagcttgatttatcaggcgtccaaaattaaaatagttatccgattttactcggattttttattttaaagaattgaaactttaaaatgtttcaaaaaattataaatattataactttatcaaaagttaaatattataattttaaatttttttataaagtttatctttaaaaaatgctttaaatatttataattttaaaacttataaagttttaaaaattataaattgaattttacaagaaatttaacattataaatatataaaaaatatattaatacgagacgatatattacagaaaaaatcttaaatataacaatcaaaattcaatgatgaattttgggtcgatattgtatttttttaagtttcaaattttataatattgaaatttataagaaaatgacaaaattatgtttaatttcacgggactgggttatatggtatgacgggtttgggtggataataattacgattttagaatgtcccacatcgcttaaaaaaattggacaatggtcaagagccatactataaaaaggaccaaaatgatttcgattacgaatgagcatgaaacttgatttatgaggtgtccaaaattaaaatggtttgtttactagggttatttattttaaaaaattgaaacttaaaaaagtttaaaaaattataaattaaattttacaagaaatttaaacaatataaaagatattaatacgggacgatatactgcgagagaaatcttagatataacactcaaaattcaatgatgaagtttgggtcaatattaatcttttttgaagtttctagttttataaatatttgaaatttataataaaatgacaaatttgtgtttaatttcacgggacggggttatatggtgtgacaggtttgagtggataataacatgggatagtatgctatggaaaaaaacatataataacaatcataatataattatataatcttaaacactaaacaaaattaacaatattaaaaaaaaaaaacttaaaactttaatttttttaaaacacattttgattcttttataagaaatttaaacattataaatatttaaacattatactacgggtgaaattttataattgactgtttgggttgataagaatttgcgatagaattgggagtgaaatcctagaatgacaattaaaatataattatacaattaaatactaccacgggtgaaatcctagaattgacgggcttgattcgatattaatatgggatggtgtactacggaatattttagaattgactggtttgggttgataataatttgcgatagaattatgagtgaaatcatagaatgacaattaaaatagaattatacaattaaatactaccacgggtgaaatcctagaattgacgggcttgattcgatattaatatgggatggtgtactacgaaatattttagaattgactggtttgggttgataataatttgcgatagaattagaagtgaaatcatagaatgacaattaaaatataattatacaattaaatactaccacgggtgaaatcatagaattgacgggtttgattcgatattaatatggaatggtgtactacgggtgaaatccgagaaacaacaatcaaaatacaattatacaatattaaacatttaacaaaataaacaaatacaacttaaaactttaaaatttgagttataaaatttcgtctagcggtgaattgtacatttaaatcaaacaatagcataaatttattaaatcattctaaaaaatattcaattattttttatttaataaaaatataggctcgcggtataccacgggttaatatatagttaaatgtacacttttaaaagaaaaattaatcacaaaatacattacccatgttctattttgttgttgtgattagaaaaaaagtttatttatatcatgtgggagacaagtatattttccttattgtatacgctgcccatcatactaataccccacaaaagtagtggaaatctgaagaaagtaactttgcactatcggaagagtaaagaaacagatgaataatttacattacttgccgacacatcttttacaaagataaatataagagtaataatggcatgcttacaaaatactagtaataactaaaccagcacccatgtttttaccggttcgcattattggagatgctgcaagaaacaataggaacacatctttctattttagatatgatggttaagaggtggtagtgattaagaaatcatctcggaaacattaaagacagtcactctttgtgaagggattgttggatatttgaaagaataacccactttttattattttaaatggagataatatattatcttcgaaaatatgtttgagaggtaaatgaaagaattaacataagaatggaaaagatttcgaatcaatatatatcttagattttcccctctaaagagacattagttatacacactttacacacacaaatcattctaaaatcacataagtcaaagtttagaaaggtatatcataaaaaaaactttagagctctgcaacttgtttgatctcatatacagtttaagtttgttgaaggtcgaactctcgaagggcgggatatacgatttaaacatgtggttgttgtatactggaaagcgtttttttaacggatcatacagttaattgtttagcataatgttttagatacatgctttaacaatttattgttcttatagacagtccaaggcaaacctttgtaatgaaaaaaattaacattacaaaagaaatgttaaagttagaaacgagagcagtttaaatttaagctaatctttattttaccgtggattcaaacttaaaacctaataagcggaaataattattgatttgtatcatatagttaattatacttttgattttatgtgcttggtcattatgtagctcagaccactatatatacccttctcatgccaacaccatttaataacccatccaacccaaaagcatacaatacaatg

SEQ ID NO: 1222 - DNA, 3000 bp, Unknown
  misc_feature (1)..( 3000): cDNA_ID_2132046_gDNA_ID_1620373_Annot_ID_155058 3000 nt of promoter + ATG
cgtagttagctctggctactggatggtataagcaatgataattttacaagtactcctttagtttctcgaactaaaatgccctgtccataaataataaattaccaagtctacaaatgcacgtatgatctgaataattttatgaggttattcaatggaatgacagtaacaatagtattcctttatcaaatttacttcttaaagatatgcattttccaaaaatattaccagtcgcaaaggagggcagtcttggcacaagatcagcagcatcatttgcagtccgcctagagatcctgaaattaccaacttcatcaagatcatcatcgtcttcaaaatcatcaatgtcatcaacagtcagctcttgagcttttggtgaatcaaaagattctgatcgcatcaatggtggcgcagatggtgactcacaccactcgggatttgtaaccatgggagaagatgaggaaattaatacaggaataggcggtggggccctttttggaggtgagccagaagattcaggaattgtagccaaaaagaattcatcagcagtacccacgctgttctgaaatatacataagactcaagcatttagaaaatgacttatataagtcgatggagaaggagtccgttatatgttaatagcaaaaggttttccagaaatgaacaggcattatcctagaaactgttgcaagcaactcctagtaatgcttaacaaaagttagaagtatcaattaagaaagcaatatgttacatgtacacaccatataaggcaatccaatgtgatcatgatagtcccgaatcgcttcagcgagttcgagcattccacctaaattgaaacaatacacactattaatctgaaagaaaaaaaacagaacgatcacgaaaacaaaagaagaaagaagctagtagtacctttcttagcacagttaatgacataatcaacactaacttgatctaaatcaacatcgtcaagagtcacagcaccaggaggcattataactttcttgattaagctaccagccaacataaaatccaatagcttccgcctatcccggcgatatctctgaagaatctcgacagcattttctctatacacgcaagaaaatacaacagcacatcgatcaaaatgcaatagcaataaaacgaagaagattgtacagtagcccaaaaacaaaatcaaaagaagaagaagaaagaaacatactcttccatctcgatccagctgcaataatagtcacacggattctcagatttccaattgacctgtgaaatcaaaagccacgaatcagtaaatcaaatcgaatcaagtctacttcaagtacgagaactagagactacatttgaatgcagatttagttttagaagtagagtttaactgaactaaccaatcattttatcagattcctcgcaaacaccggaattatccaaaggaaggattgatttagtgagaatttagagacgactgaatacgaatatgatctggtaaatgtagatgaatgaactgttttggagaacttcgagcagaaatttcgaggtggtgatgagcaaatctagagaatgcgccggggccgaaagatctatctgtatattattatttgggaaaaacaaaatgaagctgatttgtctcaactttaatttactctatctccctaattttctttctttgacttcttttgttattccagaacaccgaatttgtcaaaattgaagtctcaacttcattcatagtgaagaaaatatactatgggagtataatattaattttcattactgattttaagtaattagataattatttagctttttagtattcctaaatcttatttcttaatgaagatttgaattaatttggaaatcttaaaaagattaatgttattcaattatcactgattttaatattacaagttgaaattcctatgcttttcactaatgatatgaatattgggccctcatgggccaccttcttcctaaacttatcttctttacttctttcacaagccttgtatacaagggcaattgcctccacatgaataaacaagaaacctcacaagaacttctatgtttttttgacatggtatcagattagccaacacatctttccacattgtttatgttttcgaattttggaccgaactggatataaacatagattttgtcaagcccatatgattttttgtcaggcccactatatcatatattaaccttacgaagtaacaagcaaaactggattaaccactttacctataagatcgtcggcagctgggtggattttcaaaatacctcctataaaggacctaaaccaatttccagttttaaaagttttgcttaagagagtgagagcctgagaggaacattatccactgcatccccatgagaccatgggtcccactccaccgcaaaacagtctgtcacgtgtcatcacctccctatacctacaggacacgtgtctacaccaaatcgagtgaacatgtgacgtgtcgtcaccaaacctgagccgctaaccactgcctgatctggagggtatatccgtaacttaaaatccttttgtcgtctacccgtaaacagacaacttttaagaactacaaaaacgtacaagttggccagttgtgtcttgcaagatttaattaattttaattcaagtgccgacctcacacagaaaaagatatgtttaacacgtggaccaatgaaagagttgctttagatggaggagtaatctaagccacaaatctcgtttgtgaattctaagccactaactaaagttcaaactcacgcgctctccacttcctctcttcaacttgcttctttgtcttctctctctttcctccttcgcactcacaaatctacagaagatagaagaagatagactcataatcttttggatttggatttagatctgatcataaaggtgacttcttttgattattttattcttaagaattcaaatgtttttctcctgttggttgctgaatatagtgagtgacttgttagcaggttaaagtatcattc

SEQ ID NO: 1223 - DNA, 3000 bp, Unknown
  misc_feature (1)..( 3000): cDNA_ID_3061205_gDNA_ID_1620373_Annot_ID_155055 3000 nt of promoter + ATG
taggttctgtaagccttgagggatcaaaccagtaagactattatcagatagatcaagataggtcagaacatgtaaatcagcaagtgatggcgggatttctccggtgaatgcattgcctgctagagacaaagagacaagcttcttgcagtttttcagttctgggatctttcctaagagcctattgtgagagatgtttacaatactaaggacaggtgagtcgcaaaaattcggcggtaactctccactaaaccggttttgtgaagcagaaaacttatacaagctcttaaccaatccaagaccatgtgggatttcaccagaaaaggaattgttgactatctcaacttgctccaatgcagaagccaaagacacagactctggcacttgacctgtgaaccgattattatccgctctaataatcttaatcctgggtaatttccacaacacaactggaaactcaccagaaaatccattgttctgcacttgaagcctctccagactaaggcattcaccaatggagttaggcaatgacccttcaaagaaattcgagtggagagaaaggttaataagccttttaccactgcaaatgccactagggaaagagccagataacttattctgtgagacatcaagagacactaagttcttgagagaagggcctaatgatcgaggaatctcaccactcaggttgttcaaactcagatccaaggttctcaaacttgtcaaaccaacaaacgaagtaggaatctctccatggaaccctgacctatgcaacagaagctgttcaagcttgtctagcttcccaagaaaagaaggaatctcactaaccaaatagctgttttcagacaaatcaagaacaacaagctcacttagcttcccaatagcaggagggacgataccagtgagcaaattacttcccaagttgagaacttggagattaaacaataaccctaaatcttctggaatcataccttcgacatggttactgctaaagtcaataactttcaaggaactaaactcagaaatctgatcagggattgtgccccagatgagattagagctgagattaagagtctctaaagtaacacaacgagacaactgaagtgggataggctgattgaagaagttcaaggagaggtcaaggtgagtgaggtaagggaggtcacaaatggagtcagagatttcaccagaaagattcaaactttgaaggttaatggaagagacgtaaagagtaggagctctagtacatgtgataccagtccagttacaatggtgcgaagaagaagtgttaaaccaacctgaaagagagccttttggatcatcaaaggaggctttgaatctgagaaggttaccaagttcctcgttctctgtgaaagagaaggtcttggtgaagaagaagaagaatgtcaaggctagtgagattgaaaactggtgcttgaatctggtagccattaatgagttaagaatagagaatgaagaggatctgctgaatgagtgaagtagtgagagagtgagagtgagagtgagagtgagagtgagagtgaattgaatttcaggtgttgaaaatacggggtgggttttgcaattataagatagtagggttggttaatggtaaaaataaagagtatagggtttagtttgaaatttcccgttaaattttggtcgagggtctatggggaactggtagatttgtagacaaaacgacgtctcggagattggaatttcggatcgtgtctctctctgtttctttgtttcaatccgatttcgaatcaagccctttacttgtgcaccttcaagatttcgtttttccaggtcagtttcttcatcaagccaacctttttttctagggtttttcttcctttgttttttttctgggagttttctccttcacagtcctaagaagctacttgttaactctgtctttttgcttttgaagttaaacctagttgactttctcaagcttaaagagttcagcttttttttttttttaattggtgattttgttcttaattttgagctaccaaaatcatcgaattaaatgttaatctcttgaattctgtttcggtggtagtttcttggtttgaaatcatagctgcagcttcatgccgaattctcactggttctagatttagagtttagctttttttttttactttactcggatatgaatactgagtaaggaattgagtcaactcggatgtgaatactgaatagtttttgttctagctagagttgcaaaactaagagattcagctactgaagctactttagtgtcattcaaactgaattgaaatgatgtgtgtgagtgtgactgtacctaatttttcaaactcaggcattttcgactgtgccaacaccttaagtctcactgattttgactttgatccgcgagctaagcttaaggtctgaatgagtttctcagactttgtagattgtgcaagctacatgtctgattgggtttgatgaattgctttaaaggttgtgtttttgatgggctatttttgtcagtctgttagctacaaacagattgttcttatatatttgactttgtgacttatggtagtcagcagaatttcccttaggacactttgaataagtaaaggactctttagcattctttagctggcttgtttaactgaaacaaactagagaacctttttcttgactttataggacataattgaaaactatgttagcaaaagagatggtatgtaatgctgtttttttttgtgctcattcagcgcagccaatgctccgggtgaccaacatttgttcctgattcatttcctattgattcgtattggtaggtgttgatctttcttttatattctatcacctaattttgttctttctgtctttttttctttttcttaatttccttccgaatcctggcagtctgtgcacacaagagaaatttcaagaagttgttactaaaagagaggccacaagtggatattgtctttgttatcaagtgttagtacagaaaagtggtgagaaagtaat

SEQ ID NO: 1224 - DNA, 3000 bp, Unknown
  misc_feature (1)..( 3000): cDNA_ID_2104994_gDNA_ID_1620373_Annot_ID_155052 3000 nt of promoter + ATG
ggtagtcaacgttttgcattgtgggacggttcaggaagttgagttcattggatttgagaatctcattcgccatctcggctgatgagacaataagattaggaatagagccaatgaagagatacatcaaaggtccgtagcggattgagagcttgtgaagtgcttggtgagctatgggaccaaggaggtgaatgtgaccgatgatcggtaaagctgttgggcttggtgggagtggaagtctgtcacgtaatctgttagtaatagcttggatcaagactgtgattccaagacatacaaggatgattacggagaagtattgtaaatccaccattttcgtttgtgttttgtttttaggagagatattatcatgttttgattttataggataggtttatagtcatgactcctaatggtatcaaatgtcaatcccaacttcaagattctttcttttctcatgttgtctttgttctgtttttgtctcttttgtgaaggtataatctctgtttctgatcctgtttcatgtttatttatggcttgtctgtttataaacaaataaaaatttaagaatttacttgactgttgttaagctttcattatcagttgacaaaagaaaaatgttttcattgtctaggcttacacgtcattttcaggtgtagttagattagtaatcaaggttggtaacaacagactgtaagatttagagcttatggaaataactgaaacattttttttccatcaatagtggtaactggtaagcttatgaaaacagaacataaaacagagcataaaacagagcacagtacatatgattccaaattcctaatgatgtttatctgcagaaattcacttagtttggtatccaaatggatcaaaacataattcaggagaacacataagtgagcttcctccagcagtccctgaagccgaaaagccggtaggtaacttgatcttgattttgtcttcatctcccttcaccgtccaattaaaacactgcacgagtgacccaattgtgagactcaacaccagagaagcgtgagaagctccaagacatcctcgtcttccgctcccaaacgcaagataattcacatcttggccttttaattccaacatatattgctggtagtaacccatctttctctctgtatcttgttccaccacaagaaacctctctggcataaacttgtcagggtctttgtatgtggtcggatcacgcattatcccgtaagcattgatgaagatctttgtcccggattttacatcgtacccgttgatcttcatgtctgtgttgctttctctgcgtagtaatggtcctactggatgaagtctcaatgtctccttgatagctgcttgtaggtaaggaagcttctgcaaatctgattctttgattaaccggttcgttgttcctacaaccgatttgatctcgtctctgatcttcgcgaagatatccggatggttgattagctcagtcattgtccattgtaaagctgcagaagtcgtgtctaagctcgccatgaacaactcctgcaaacgagagaccaaatattcttattaaggctaatttaacgaagctaaagaaaagtaatgcaaatagcttacaagaatgaagaacttgatctgattcatagtcaatctgagttcggcttttgggtcattatacgtgtccaacaagatatcgacgatatctttatctttctcttcttcctcattgctcttatcgttttcatattccttcagtatcttctcaaccaactcatcataccgccaaatagaggatctaagcttcttaccattcccaaacaaatccagatcccgcaatggtccaaatagctccatgaatccaaaccttgtggcgcaagccataatatcactcactatcttcctgatctctttgggaatattcgagttttggcggcaccttttccccataaccatctttgataagatctttgtggtcaaagcagtgaactccaaaccgagatcgcaagcctctccgtttcgcgacctctcaaccagcgtgctcagtaaagctaacgtttcctcttctcttatgtcgacaaatcgatcaagctgataacccgcgaatagcttagtcatgcatagcttcttcatgaacctccagtaagatccataaggtgcattaaagaactctgatcctttataaacattgaactgtctcggaccaaacacaaacttggaagcgaaatcagggtcgtgagtcttgaggattagcttagctgtgtcggaatctgagacaacgaggactcgtaatgatccgatgcgtatggtcatgagaggaccgtaagtatgagccaaggcttgaagagatcgtggtaggctagaccggaggagatgcatatgaccaagaacgggaagtcctcgaggacctggaggaagacctctgcggctagaggagctgaagagtctatggagaaggaagatggttacaagtgtgaagaagagatatgaacaagaagtataattcatatccaaattcaatgtaaacatatttgtttgtgctgattattgtgactgggatcaaacaagtataagacgatgttagtatataacaaaagctttatgtttgtttgaaaatactataaaaacttgtcttgttgccatgaaggatctaaaaatacatgattctttgatgatagtgaccttgacttaaaattgttaaattatgcattatgttcaattatgtgttagaatttattgaaaatcatataataaaacattacatttttcatcaaaaagataataactaggcctcataataatatgttattaatataatattattttattttttataaatgtaaaaatcgaataaataaggattacaagcaaaaaagtctctgaaaggaatccataaacctacaatggcggggaacacggaaatattggcgcccagataatcttcttctgtgaagcattttaagtcgccgactccaatcaacagagcccagttattccatattatcgaattaattagggttcagagag

SEQ ID NO: 1225 - DNA, 3000 bp, Unknown
  misc_feature (1)..( 3000): cDNA_ID_3061220_gDNA_ID_1620373_Annot_ID_155049 3000 nt of promoter + ATG
attaccttattatctcgccatttttatttctaatgcccgcactggagcttattaaactatttggtaaaaagaatcagtgaaccgagactaaatcgaccctaacagcagagatgaaactaacttcagttagatcgacatttccctttgtatagtatcaaacaagaaccggttcttcactccacttgcatttgttaaaatgtgtccaggtttcaaccatagcaaatgagctctcatgaggatgtagtcaatcttcttcaaaatcatgtgtttaatattttagacaagttatagatgagttctacacaatttccaataaacatttctgaggataaagaattgtttttaccaacgtagatgaatttaagttgcctgaaattcaaaacctcccaaaagaaagaataaaaaggtgtggaataagttcttgtattgtttctttatcaaaaaagttataagatggttctaacattttttacatctatgttatatgtaaactatgaataaactggaatgctttttctttttaaaacttttatgaaggctaatttgaatttttatgaaccaacttatcaagttgtaaaggatccaactttagtggtccgcttttgctgcctcagtgatgcttagtaatgatgactatattattatgttcttttatgcatcatcttgatagacttgtcacataatatccatttttctcggtttagtttggttcacaattacgatttattaatgtctaacgaaaccaaagcatttagacttggcgtgaacattagacattttacattgtggatcagatacagttgatcatcatttgtgaacataagacttgtctagtggctttcatagtgcccattataaactaattgggcctcattcacgttcattgagatctgaaagatgaattaagcccacactttggctcttcttcggtaacttattttatttatttgttcatagaaaaacagaaatcacttatctcaatagagccgtttgtgataaatctcttccaacggtcggatcgatttgaagatgaccataaactttgttcgatattttcttataaatatgaaccaaaatctaaactttctctcaaatcttatgtttgttggatagatcaattgggttacttaaatttggatgaacttttgagaagttgtattagatggtgaagacattgcctcagtatacatttccaaatgcttcaaggagatataacttgcaccggttatagcctaattatatacaacgcgtaattgcattacccaaacatattcaacgccgacatcttgactatatgatatgtattgactattattacggtccatgtggaaacagagatcaaatcgaatccgtctctctaagtctatatcactcactatatagtatgtatatgtatcactaacactttccatcaaaattcaaaaccaacaccatggataagacagcgacattgtgtctcttgttcttgttcacattcctcacgacctgtttgtctaaagatctctgtaaccaaaatgacaaaaacaccctcctcaagatcaagaaatctctaaacaacccttatcacctcgcttcatgggaccctcaaaccgactgttgctcctggtactgccttgagtgcggcgacgccaccgttaaccaccgtgttaccgccttaaccatattctccggccagatctccggtcagatcccggctgaagtcggtgacttgccgtatcttgagacccttgtcttccgcaaactctctaacctcaccggtacaatccaacccaccatcgccaaactcaagaacctccgaatgctcaggctcagctggacgaatctgacaggtccaattcctgactttataagtcagctcaagaatctcgagttcttagaactttccttcaatgatctctctggttccattccaagttctctctctacgttacctaaaatcttggctcttgaacttagcaggaacaaacttacaggtaaagaacgatcttttcctttattacatcattcagtgtcttgtctaaacaacgatctttatgttgtaggttccataccagagtcatttgggtcgtttccaggaacagtccctgaccttcgcctatcacataaccagctctccggtccaatacccaaatcattaggcaacatcgactttaaccggatcgatttatcccgcaacaagctccaaggtgatgcttcgatgttgtttggttccaacaaaacaacctggtctattgacttatcaagaaacatgttccagttcgatatctcaaaggttgatatccctaaaacacttggtatcttggacttgaaccacaatgggatcactgggaatattccggtgcagtggactgaagctcctcttcagttcttcaatgttagctacaacaaactgtgtggacacatcccaactggagggaaacttcagacatttgattcttattcctattttcacaacaagtgtttgtgtggtgctcctcttgaaatttgcaagtaaaccaagcttatctctaggattacgaaaaaatatatttgagtcaataatatagacaaatatgtaatgttattcggattgattaataaaacatgaaccaaacctctcatttgatgtattcatagcacattttcaaaatgttttatttgatggattaatcctaccttaatggaaaaacaggggaaatatggataacggaatctctgagtggtttggtatggtttctcgattcgatttgggtttatatccaaacttgaaaagtaaaaccagattggtttaaacaaaaaaaaaaagaagagaaaaaccctgatttccttattcttccaaattcccaaatttctcaaatcgtcacaaatataaattccaaaatttctgcaccgaaacttgtttaaaacgtggtctagtcagcaaaatcattactacatctgtatcgcaccatgcattcatagcctatatgtatatcaatcatagtttccataaaaactcaaaacacaaacaccaaaaacact

SEQ ID NO: 1226 - DNA, 3000 bp, Unknown
  misc_feature (1)..( 3000): cDNA_ID_3061216_gDNA_ID_1620373_Annot_ID_155051 3000 nt of promoter + ATG
ggagaagaagagaggaagatctcaggggagatgtggagaagagtggctattgctttgaaattagattgccgtagagtgtttgaggcgtttaaagagagagaaggcgaagaggaagaaaaagcaatgggtattgtgggttcggaatccggaggtgaacgtagagtggtggagatggccatgaaagctaaagcaatggagaggatgaagtagacgaagcaatctgatgaacaacaacccatcgcttcaaaagataaaccctaactgtttcttggagaagaagataggtcgtcaaagatatgttttcttggagaaaatttggattagcaaatagagtttttctatttcaccgtttgggttcagtctcgtcctgtaaataataggtcaacttcattttttttatggagagcatcaaaattttgagaagataattcctcaatttataaagcaataatcgaaatatttactgatttttgaaattgatgcaattttgaaattgatgcaattttgaaagaaaataaacattcttgttccatcacaaatactactagaagacaactctgctttaagacctctactttcctctagacttcttggatggttttcttttgctttcaatccttctctgggcagcttcaaattcttcttcagtgggctctgcttccgcatcaccaccatacctagagataagtgatgaaaacatcgagtccaccttccctttcctctcctcttgtcgtttcgcaatcatcaagcaaagatctgtctctgaatcctttgctgctgacctacaagtatatacaaattgaagcaaggtggtcacaacaaggttaagtttgattggtggaaataattaagaaacgaaggcagagattttacttcttcttcttcctcttcctcaatggactggtgggcggtttcgtttctgaaattttatttgcccatttctcatatgccttgcttgacttcacttctcctgaaaaggaaatcacacttgataatcagcaactctcccaagtttacatagatttcagatcaggatcaccaaactggaataaaaaaattagaatgcatatttaggtggaatatgaaccatcaaacacacagctaaagggatatggtacattttacactcatcctctaactggagaaggcacaatatcaaattctattgcgttatcaaaattcatagatgtacaaatagaaggcaagctcatcttataacgtcaaggattccatagatgagaagataatcttgtaagacgtatatactaaatacagaaagataaattacctgctgcaatggcctcatcaagcatgtctttgaaacggtgtgaatcaagcttggggtccgagcaaagcattgagcagaatagcctgggaagaaaatatatatataaatcaactcacaacctcaacaatatcgaaaagaaaggatgatgaattacctgttcattttacccttaaacttgttgaaaagctcaagcaagtctttcttctctgactcagatcccctgtagtttgcctcaaactcttcaatatcagcttcgttgacctatatataagcagcaacacaaaaaaaaaaagttagtgtaagcagcagaagcagatgtgtaaaaggtatcactagtgaaagtttctgctaccttcttatacatgtcccggaagaaatcccgcaaattctcaaacgcatctccaggaatatcctaacgagcatggaaaaacacctcaggtttaagaaaatctcataatactaatgaggaagttaagtgctttcttcactcgatcaaactgaacaaacacaacaaaaacagagactcacagcatcatcaattgagccagtttgatcatagactgcccttttctcttcatcaccaagaattgatatcactttttgcagctgctggaacttgtctttagcttcctgtaacaaaacaatagtagaatcttcatgtaaatgaatccaaaaaatatctcaagtaaaagagtgtgtatttaaccttatcatcctgatttttatcagggtgaagcttcaatgccaacttatggtatgcttttcttatttcctgtgaagtggctcttctttcaactccaagaacctttgagtaaagtgacagagagatattagttagtttctattgatttctgtctttttagctaatcgaatcatcctgataccaaaatcctaatcaaatataagatcactgatcaaaacctatgattagtgtttaatctacataaaaatttatatatcaaaacaccaaattttatgaaagtagacaaattccaaactattttctagaatcatgataaaccaaacccagaaaacaagcttaaattgaaatccctaataaaaccctaagtacgcgagagaaagagcagcgatcggaaagagaaatccgaaaatacctcgtaaagacttgtctcagaggatgggccagcattatccatctcaatctcatcttcttcggttgtcgaagccctagatttctttttcctacccatctctctgaaccctaattaattcgataatatggaataactgggctctgttgattggagtcggcgacttaaaatgcttcacagaagaagattatctgggcgccaatatttccgtgttccccgccattgtaggtttatggattcctttcagagacttttttgcttgtaatccttatttattcgatttttacatttataaaaaataaaataatattatattaataacatattattatgaggcctagttattatctttttgatgaaaaatgtaatgttttattatatgattttcaataaattctaacacataattgaacataatgcataatttaacaattttaagtcaaggtcactatcatcaaagaatcatgtatttttagatccttcatggcaacaagacaagtttttatagtattttcaaacaaacataaagcttttgttatatactaacatcgtcttatacttgtttgatcccagtcacaataatcagcacaaacaaatatg

SEQ ID NO: 1227 - DNA, 3000 bp, Unknown
  misc_feature (1)..( 3000): cDNA_ID_2045780_gDNA_ID_1620374_Annot_ID_155091 3000 nt of promoter + ATG
cttaatggaagatttactggaaaatgtctctatctgttatctagtattggacccgttaataatgtgcaacgtataatgtagggtactaaatcccaagaaaaatctagattttctagataacatatttaaccagaaaagaaaaaaaattgtagtggaatagaccagcatggttcaatctggtcgttactaaaactaccaatccaaaacctaccaactataatacaatatgactacaaatacggttttgaagattaattcgcggctaaccatcaaaaaataatgtttgacgatggctcatggttccactcgccaaccatatacagtttatattctcttttgagacctcaaaatcaagttactagaactcgatgatcttacatgaatataaaatgaaaatcagctccaatgtagtttgaagaaggtataaaacaggtttagaccaaccgattccaagacttatgatggcccacaacaacaaaaataactaacaaatttttagaccctacactactcttagcatgcatgtgacagcttaaacttaaatttaaacagttaacatgaacaaccccacttgcactaggaagacagcaaatagcaaacttaaagcagtttacgatttctggtcttttaaggcaaggtttagtaacccagtaattccttttgatttgaaatatatgaataaccgaaattaaaaaacaaaaaaaaaatcacaaaatactaaaatttgaaagccgaaataattcatttttcaatagttataatcatcttttaaaaagtaagttagatcataaaacctaatataaaacttttattggcaaaactaattaatcacgagaaaataatattaaagttagctcatgttatgtttatattaggaatctctcatttactttattttgttttgttttgtttctataatgatattaggattcaggaagacaataaacaaaatatcaacaaggaatcatgaaagatacattcgaacgggctcagatcgacgcagaaacaaaaagctttggaatgatttaataatacaaatttggcggaaaggtttgaagaatttatacttggcattctatactagcgaacgaaaacaaaagtttagtcaaatatttaggattaccaaaaaatcaatattcgtatacaaatgtgttttattataaaccatgatttttcataactttattcttagttgtttcaatttgttttctctcatttctcgttcctattgtagaaaaaattcctgattcttttttcttttcttttgttttcccatgtcaattataaccgcattagaaaaggttagcacatgttcatttgcacagaatgtagtcaatgtacaattcatctataatttatcacctttttgttaaaaatatttatagccatgttatatatattttatcatgttgtgttttaaactctagatttgttctttcacagtttatgggatttatcatttcatatatttcctcctatgagtaagatgtcatttttaaattcttaattaagaatttagaaatcaagtttattattttgttaaaatttataaattacgtatttttcctttattagtgagattaagatataaagagtctagcacactagagaaatgaaaacatacatatatctagaaagggtttataagaaattagtaaatggaatcagaacatgaaggagaagggaggggccaccataccgacgggaatgagaagtatgggacggacaagaaatcaagtgtacacacatgaaaaaacccaccacgtgaagatctcctattggtgtgtcttctcctaagtactaagtataaaccaaagtcaaaacacaacaaagacatattgcttgcgagccagcgagtgtgtccgagtgagaagagagtttgggacttcactgtttagagagcctcattcgctacctagattcggtttatccacgtggagagttcacgtagcttctataataataatacattatataagctgtttcggtaaaataatcttagagtttcacttcccatgcaaaaagattaaatggactactatattttctatatgagtgttttggaaataatcttccaagtttatggctatttagtaaaactcaatccaaaatgagaacaataacttttttttttttttttttgcaatgagtacaataaacttatgattggttttggggactagaaaataaaatagagacatatactttaagaatagttgatgagaaaataaaacttttttcgaagaaagaaaaaaaaatatactctggccccttacatattctgtcaaatgccattttattttctttattttgcttggtccatttctggattcctgaaatgaacacaccataattttcatgcccatttttgtcctcccattaacacttaccaaacaccaaacgtaccttccttcctttatatgtgtctctatgtctatatatcactcccaccttcaaatgctaggaaagtggacatcacaccatagtctgatagtcatgaatctcatcaagtagaaacctccaaagaaacagattgcgtttcctcttcttcttcctcctctttcgaatcttatattttcgtgtcaaaaaagaaacaaaatatgatgatatctaccgcaaaagctcaatgtttgccacttaaattctgtctcatctctcaagatttttgatcatctcacacttactccgttccgcattttacgccttttcttcaccattgttgcttctcgaatcgaaaccatattggttttgcagcattaatggtgcactgagtcttcttaaagccgttaacctttccctgccaaattctcaaccaaaaagaaaaaaagataacaaatgggtcacaacaagttgccataaaggtcccaacagaagaagaaaagagaagtttccccgtgttgctttgtcacaagcttcatcactatttataactaccttgccaagaagaaagcctaaaaaggtataacagtttctttgtctttagagatcatcaaaaagatg

SEQ ID NO: 1228 - DNA, 3000 bp, Unknown
  misc_feature (1)..( 3000): cDNA_ID_2045741_gDNA_ID_1620374_Annot_ID_155104 3000 nt of promoter + ATG
aacatctgtggaggggttgatcaagacaccagcatcgatactacatagcctcgcaagtgtatcagtcttcctgaaatgcctaaccatttttttgttagagagatttttgttgtttttgttgttatggttagtacttttactccgttttatagatggatcgggttaaatttgttcaatacataatgaaatgtctatctatgttggtaatttctttccactaaaatatttgaatttctttttacatgtatttattttcaactattaccattaatttctttattagaaaagtcatattcaacatgttttatcaaaactttctgtcaaaagatgatattagaactaaattcggacaatattttagataattcctcgtttgcgacgtaatacatgatgtcaaaactatgttacatttagtagtacttatcttgaattaaataaaattaagaaaaaaatatgaatggggtgttactatggcatatatctattacctctggatttcattctatatacaaaaatattattttaaaatgataatttacacgcgccaaatatgcgtaccagccacgaggcaaaaattactatataactttttttgaaaataaaaactaattttttgttttttcaaaataagatacaaattatacgtaattccttagtaaagcctgaaaaacatcaaactttattttggctaaaggacatcataaaacctactatgtaattgtcattaacgtttgtttaactaaccaaaataaattactgaatcttgaactataaattcgaatatagagaaaatatgaaattttgtaagtgttattagacatccaaattttaaaaccgcgtaaactacactacaatttaaaatcggagtatgtaacctacatagagcctaaccacctcctaagccgtatttaataacattgttatattatgtaaagatatgatatatatcgttaagtaatattatgtagtgaaaatccgtcacaaatcataataacttgtagtgatcaaacttcttgtatataatctactttgttctcgcgagcaccttaatcaatcatcccatttaaaaaatttctttttgctattaacatcttaaatgttaaatctatcattgagcaatgtaacagttctgtgtgaagaaacaaggaatcacttacttctacattgtctctttacaaaggaaatttggcacatgataatgcttcggtttgggcaatctccttatatctttgcagacttgtctattaccataggtaatcatataaaagttattatatatgaacaatgttcctatggtaatagaaattcacattttattaaaaaaactgatacgaataattcaaagaaataaaataacttttatatgattgtccataagatatagtcaaaacgcaaaagactttgctctaagaaatattaaaaagaaaaacaacaagacgaggattatttcttttcaataattaaaacattagtataaatacaatcacatgcttaatgtaataatgtgacagtttggccgagtggtctaaggcgccagatttaggctctggtccgaaagggcgtgggttcaaatcccacagctgtcaatttgtttttttctttgactcctttgttcatctttattttaaaatcaatataaacccttttcggacattctaaatattttgacccaacctaatgatattcattatttgtctaacgggtcaactttcaagtcttcaagtaaacatgatatggaattatatgggtcaactccaagtaagaacagtgcatgcatcttgaagacaaaattgatttttttttttgtttttaattaatggaaattttgaaatactaatgggtcaagatgaggttgtccaaatcaactgatatcatatatgaccagattcctcaatagtcattagtcaatacaaaatccataatcttttttaaaaatataatctttttattttaaatcgcctatttttttccattcatttgtccaatgtgaaaagccataaatcatatattaagaagttgtgaattgtgatcataggagtaatatttctatctgaacaaaaattgaattttgttttgctttttgttgaaagataaataaaatgtttggcagattgtttgtacagaacacaacttgttgataaaacaaattccatcaagacagctaatgagcttttgatagtcagagctttgaagacgtgttaatgaattaaactgattagacctaaaaccaaatatttagaaagaaaaaaatatgataattgttatgttatttaatcaatagtcaaatactatgttgagtaccaatcatttcagtttcaacgattgctactcttttgaccaataacaaaaaggtttttatttttcatttctcaaactccatttttgtttgtttttagcataaaaacagctagaatgtgagtttcatatgtattatatactataagaaatcatataaattaacgactagaacatattgttttcattctagtggtatatctgagtttgactagaacgtttggaggcagattaaagtgatttcgccttgtcaaaactactttgtatatgttatcaatcaatcgctcaaaactaaatcggaaaaaaactacataaataagatatggaaaatgatactaacacaaactagtaagtaagtagtcactacatattctggtcccatgaatatggcttacatagtacatacattgtgagattaaatgaatatgatatataatacaagcatataagcatgtgcatgactatgaagtgggaatacatttagtgcctttatatgcaacttgacagaattaccaattatgtgaatagtgaaacttatattgcgtcttggccttttcacatccgtgacatgatccctcaaatctatatcttcttgcggcatatgcttatatataaacatatgacttcgtctatagatttatatccagataattaattctctcataatatcttctccacaatttcaactcttctaaagtctaaacc

SEQ ID NO: 1229 - DNA, 3000 bp, Unknown
  misc_feature (1)..( 3000): cDNA_ID_2045715_gDNA_ID_1620374_Annot_ID_155111 3000 nt of promoter + ATG
gctaagtttgtccaaaagatcaagaatgaccaatattattatttagagtctttaagttcagcccaaacttaatatacactcaaatgtttcctttagctttgacatacccaatttttttgccagattcgatcgtgtatgcattagcttttttttgttgtggtttgagcaaagaataataagtacacagcttgatgagtttcatagcatgtcaactttgttggagaatactgcacttagataaacgttctttaacttcatcccaagctgcatattgtatatatcaaaaacaaggttaatgaatcacatcagatattcaaaagacaaagaaaaacatcaagattcaagggcataactaaacctggtaaatttctgaaatcaggttcaattccaccaccgttgatatccatatggttaggtgtgacatattttcctattgtcacaacaactcctgaaccatctcggagctcatacaccgattgaatcaaaccctgaaacccattaatcaaatgacatgaagatgatcaaaaacaattcaaaatcgatagattggttatgaaactagtaagcctttggaataacctttccataagttctttcgccaacaagaactgctttacagttatcatgaagtgcagaggccacctggagaaatatgacacaaatcatccgtttaacatccaaaaaaagaagagtttcccgtgggttaaatcttttgagattactcacaatttcactagcacttgctgttctgttatttaccattacctgcaacaataataaggattctaatcagtgcaagatgcaaaataacataatagtgtgaaagattaactggcttacatgattcatcacatacaataagtggggcagtgatcaaaggtttcttatctgaaacaacagttttttgagcctcggggtctctccccgctgtatatatcacctgttacacaattgcaacatgtaacataagtttaagccaatcgttatggaactcattcatgtaagttgaagcaagctattctgtttcatattcctgaacaacgattgacaatgttttaaaagttctaaatgaatgttgatttaccgtatctccttcatctaggaacagcttagcagtttctattccagcctgaaataaacataaccaagaaacgaagggctaagtgaaaaatcaagttcctgtaaattatttgtgagaagaaatggtcttaagttacaattgtagaatgaacctgcacaagtccaccaaggttatctctaagatccattacaaaataagacgcacccttgtctaggagtcgtttcattgctgcacatagtgaaaaggatgtgtactatttaaacacaagtagataaaaggatgggaccgaaagttgataactttgatgtaacaacatgaaaaggcttaccaatcaccaaatcttttctagccagcgcattgaactcttttagacgaatatacccgacagagactgttccattgtcaactttttccaaccggtaagaaactggggtctgtgcattaacttgtctctggattttcagagacttaacaggtccacacttcccatgcttcacctgcaatatgcttaaactacataaaaatcttgattccaaacttaaatcaagtactaatgaatttagtatgtatcttattattaagaataataaccttgagaactacaaaagttttactagggccttgtaacaaagacgatacttcaaaggatgatttcccactgacatccattccattgacagccagaatttcatctccctatcaaagagagagacattgcacacttttttaagtgagatcaacagcgaacgaaactacaagaaagaaactagaccggtttataacctgtttcacaccagcaatatcagcagcactgtccaatacaagaccaagaaccttcaactttacatttccaccaccatcagaaacttctctaaggttaattccaataccagtaatgtcatacttcgacatcctagaaaacttcaaacaagtgacacaaacaatgatatgagtaactgaaacaacttaagagtcctttctccatcaatcaaattcatagaatgtaaagaacaaaaacctcatctggtgataggaatcgagtgtattgatcacccaaactagccaacatgttcttaatcacttcatgagccttcgatctactcttaataggactagctaatatatcatccttctgtttctgcaaagtaacaaaaaaaaaattcaaccattacatatataaagcttcttcctttatctacccaacaagctaattcacacacctgccaagtttcaggagtccagctatggctacgagtatctagaaaggcaccattaacaatctcccaagcttcttcaacaatcccttcattagttactaactgaggctcaatgtcatcatcttgaatctcagtatcagcttcttcctcattaggacaatcttcaggagccgaatcgaagtgattcagagaagattcaaacgatgacgaaggaggattgacagagagataaggatcattagtagcagcaacggaggaaatcggcgacgagaaaacgagagtgagcgatagagctccggttagggttccgattaccgattttttaagaattttagttagacccgagtagtcaaattgagacggaggtggaagttcagggataaattgcggcgtcgacggtgatgacgtggcggataacggcgaggaaaatggaagcaaaagcctcatctttgtttaacggtcaagcttcaaaatatacgcttgtctgttatatggtgcaatgcaatagtatttacgcgtatttacatattagtcctcgtatttatgaaatctactaaattgtactagtttataaatttgtgatattaagcccaaaaattgaaagtgagagagggaaagagaaaaagagagcaatcgtactcaaaagccagaagcgagcgagagagaaagaaagatcatccttttcgtgttgaatcagaaatg

SEQ ID NO: 1230 - DNA, 3000 bp, Unknown
  misc_feature (1)..( 3000): cDNA_ID_2045731_gDNA_ID_1620374_Annot_ID_155107 3000 nt of promoter + ATG
ggatcactcttgttgatttaaccaccgcaacttctgtttagtaatacacattacaacatgattgaagatggcagtggaaaatccgcggttttggatatagttgaaccagtttaaaatttgttttttcttgggccttttcttatggcagaaattgtcaccttctctcccaagatgatgagaataaagaagttatatgattctttcatgtgtatcttattctgattgatactctggtttgaacaaaatctttcaaaagatgttaatgtaaatgttaagatttgatatttgttactctatttacttatattttttttttaatgaatttatctttcctccgttttaaaaatttattaaaaaatatatgtaagatgctttttattatttttactatgttgcacatatatacctatcaagaaacctgttcaactatggcgtaggtcaacaatctcattctcactttctcatatcttatagaatcataatcatttatgttagcatttaataggttttaatattttcaaataataaatattatgctttctcaatcatgacaactattcaaagtttcaaacaaagataatgagagaaaaatcctactcaacaacaaaaatcttgaagaagtttggtgtatccgtacatattccacgaaaattggtcgtaaatttcaactgcgaacatataatttttgtctctataaagattcatttttaatttcctttttatctcatatagacagagtggttgtcaggttgactgcatactgaggtaatttacagaaatgaaaatatactaaacctcttggatatgaagatgccagattatacacaacggttacagcaaattaagctgtgaacaagtgtatcaatatactatgggctgattttttttttatttttttttaagtttcaaaagccaaatcttttccaattaagctttaattatcttcctaataacagccccaaaaatgttcctaaatgtgttttaaagatgtttgcgtttttgttaagccaacaaaaatgtgaccttattatttttgaaatgtgttttttagaattgactaattttgttcggtgcattgcccaattaaatttgcattgtattcaaaacaactagctagtagttattgaagttttggtcctttgagcatcatggctgagttgctttaatttctttgggccatcgagaatcttgaatcgtagttttgtcttgaaaacgtttttcatcattattcgcatttttcggaaacattagaattgcaatttaaatctttatatcatttgtttttttgataaagggacaagggttagcaaactttttaatcaagtattcctatcagctgcatgcataatgctttttttcagatcgcatgaagctgagattcgtaatttgaacaaaaaaatccagacacatgaacagtttataagtatacattattatataggtataaatctataaaaggaaaataggtatttgactgtacctatgtaaagtcaatttctgttcacttctcattgtcattttcggttaggaatcatgtctctctctctctgtttttttctttttcatttcctatatattttcgatcatgtttcacatttttatcccaaaataaaataatttgttttgttgacaaaaaaaaaatgtattaaatattaaagcattgatatttgaccgtagttcatatatttagttatttctattactctaacgttcctttaatgtttggggaaagttctaatgtgaaaactgaaaagagattctgcagcgtgaatcgtgatgacgttggtaaatcgtcagtatttcgatcatatttctcttttcaacagataaaatctaaacctatacataatgcaaaatgattcatataatctttctttaacgtccttgctattagccaagcttattacaatatgaatcactttaataaaggatttaagcacctgataagaaatttcattttgtatattgttttttataaaaattaagattttcatgtaaattggttgtaactaaggtcgaaattacacgggaatataatgtaatgtataacattgtcgcatttgcaccttgactttggtggaatattaaattgatagactaacgtctgatatttattagggtttgagaacacaaatccagtagtccaccacgtgccaggtaatgtgtcggttacggtcaaatgccggtgccaataattacacgtgtcatcctaataaccccacaattctctttgactttttgacttggctcttccttcttcacataaagatgaccggagactgactatttccggttaccggttaactattagtcagcatcatcgccttcttctacaacaaagcttgttcccaccttattccacaatctaaaaaatggtaaataactaaacatttacttttaagacccaaacatctttaaaaaggtaaaaaaataaccatcttttcaggttttacttggtcagagtcagacttaaaagaagtttctttatgatgataaaatggcttttccttttatgttcatgttcacattaaacgtttaagaaacaaaatgacaagtatatgtttcctcactcgaggccacttttgtaactctcgatttgggaggtaaaacgcatcttgtcaactcaactttataaaagttatcattattttaaaaatacaataaaagtcattcaaaccccaaaactctttttgaatcattcacacttcaatactctttcattcaaccttagatttgtatatatctaagacaaaataaaatatgctaaaacgccatttactatatttatttagcaagacataaaataatatatattttcaaaaggcataaatacgagaagacccaaaagtcttaacaccaaatttagaccgactaaaaaattcattaacgtaaaaaagttcttgtttctttctttcttttcttcttcttcacgctcctctctttgtcattttctttttctttctttttggtttaagttttttctctttgttcttcgtcatg

SEQ ID NO: 1231 - DNA, 3000 bp, Unknown
  misc_feature (1)..( 3000): cDNA_ID_3061240_gDNA_ID_1620374_Annot_ID_155113 3000 nt of promoter + ATG
agctggactcctgaaacttggcaggtgtgtgaattagcttgttgggtagataaaggaagaagctttatatatgtaatggttgaattttttttttgttactttgcagaaacagaaggatgatatattagctagtcctattaagagtagatcgaaggctcatgaagtgattaagaacatgttggctagtttgggtgatcaatacactcgattcctatcaccagatgaggtttttgttctttacattctatgaatttgattgatggagaaaggactcttaagttgtttcagttactcatatcattgtttgtgtcacttgtttgaagttttctaggatgtcgaagtatgacattactggtattggaattaaccttagagaagtttctgatggtggtggaaatgtaaagttgaaggttcttggtcttgtattggacagtgctgctgatattgctggtgtgaaacaggttataaaccggtctagtttctttcttgtagtttcgttcgctgttgatctcacttaaaaaagtgtgcaatgtctctctctttgatagggagatgaaattctggctgtcaatggaatggatgtcagtgggaaatcatcctttgaagtatcgtctttgttacaaggccctagtaaaacttttgtagttctcaaggttattattcttaataataagatacatactaaattcattagtacttgatttaagtttggaatcaagatttttatgtagtttaagcatattgcaggtgaagcatgggaagtgtggacctgttaagtctctgaaaatccagagacaagttaatgcacagaccccagtttcttaccggttggaaaaagttgacaatggaacagtctctgtcgggtatattcgtctaaaagagttcaatgcgctggctagaaaagatttggtgattggtaagccttttcatgttgttacatcaaagttatcaactttcggtcccatccttttatctacttgtgtttaaatagtacacatccttttcactatgtgcagcaatgaaacgactcctagacaagggtgcgtcttattttgtaatggatcttagagataaccttggtggacttgtgcaggttcattctacaattgtaacttaagaccatttcttctcacaaataatttacaggaacttgatttttcacttagcccttcgtttcttggttatgtttatttcaggctggaatagaaactgctaagctgttcctagatgaaggagatacggtaaatcaacattcatttagaacttttaaaacattgtcaatcgttgttcaggaatatgaaacagaatagcttgcttcaacttacatgaatgagttccataacgattggcttaaacttatgttacatgttgcaattgtgtaacaggtgatatatacagcggggagagaccccgaggctcaaaaaactgttgtttcagataagaaacctttgatcactgccccacttattgtatgtgatgaatcatgtaagccagttaatctttcacactattatgttattttgcatcttgcactgattagaatccttattattgttgcaggtaatggtaaataacagaacagcaagtgctagtgaaattgtgagtaatctcaaaagatttaacccacgggaaactcttctttttttggatgttaaacggatgatttgtgtcatatttctccaggtggcctctgcacttcatgataactgtaaagcagttcttgttggcgaaagaacttatggaaaggttattccaaaggcttactagtttcataaccaatctatcgattttgaattgtttttgatcatcttcatgtcatttgattaatgggtttcagggtttgattcaatcggtgtatgagctccgagatggttcaggagttgttgtgacaataggaaaatatgtcacacctaaccatatggatatcaacggtggtggaattgaacctgatttcagaaatttaccaggtttagttatgcccttgaatcttgatgtttttctttgtcttttgaatatctgatgtgattcattaaccttgtttttgatatatacaatatgcagcttgggatgaagttaaagaacgtttatctaagtgcagtattctccaacaaagttgacatgctatgaaactcatcaagctgtgtacttattattctttgctcaaaccacaacaaaaaaaagctaatgcatacacgatcgaatctggcaaaaaaattgggtatgtcaaagctaaaggaaacatttgagtgtatattaagtttgggctgaacttaaagactctaaataataatattggtcattcttgatcttttggacaaacttagcttcatggccattcttgatcttctggacaacctccaacggatttttatttcatttttttctagtagataagccataagatttttagtggatcccaaaagggcggtgactcacccaaccctctgaagacgaactccacgacggccacacagattcataggaaccgttgttaaccactgaatcaacactgcgaaacccaccaaaacgccaccaacttccgccataacaaccacaacaagagaaacggttgagccctgtggaaccccgaagcactccacgaagtcctcaaccgcgaaccacgccttagagcctccacatgcttaccaccagagcagcgactacatcagtgacgaaaccacaccaccaaagacggaaaggcgcccctaccaactcctgaaacataaacaagaagcttcaacccgacaatgaagatcatggaagcataaaagtaaaaatagactgacaacggatggcgggttaaaatctagtaaaattttatgctcaaatctaataatccggataaatctatttaaattattttagagttggggttaaaaaaataaccataaatatcttaacaatttgtgaaaattcaccctttgtaaagtagcattcatagtttcatacgaaaacccaacacctggaaaaaaagaaaaaaaatctaagtcttgtctaccg

SEQ ID NO: 1232 - DNA, 3000 bp, Unknown
  misc_feature (1)..( 3000): cDNA_ID_2045750_gDNA_ID_1620374_Annot_ID_155101 3000 nt of promoter + ATG
aagatggtgaaaaattaaagcaaagacttttgacgtagaacaacaccaattcatgagtagacatttaacttaatgcgtttgtcacttacttggcacaatacattatacatctgtcgaaagggttttcactttattatcttctacctctaaaagaattatcgtcgtaaactctagcaaatactcttcttcatttcaacaatatttatgaaaataaattaatttctcatttctctttggcaaatagagccaaaattttggcattagatggagaaaatcaaattcagtcagttgaaatatttgtgacaaattactataatgttctagagcttcctaatcgggacattggtggtattactattaataaaaacaaaagataaaatcaaagacctatgtaaagagcaacatcaacacaaaatgacataacttatataagcttacgtaccaacataacttaaataagcttataagagcgtatatgcgtttgagtaacaacatatatacaatttcataaatgtcttaaaatgtgtaaactctttttctatttaataaaagcttaccacgtacgttcagttacaacaacgtattcaaatataattactaaatgtatcaaaaagttcatccattcacgctaaatgtatctgttaagttattataagtccgtccatccacacgtattttctgttgaagtgatttttctcttcaatatatgcattaaaaatcacatataatatatacatatatctactactttcaaaaagaaaatacttaaaacccccatcaatggtagtagataaaatgaaatatttttgttttattataataaattgtgtacaagttgaaaaattaagtatcgtgtgtgtgtgttattaacccacctgacacaccacatctataaatagagggagaactttgcagaaaaattaacaaaagaaagacctagacataaaagtttccactcttgtgtcttcttcattccaagaagaaatcaagaaatggatcatggagaaatgagcactaaggaaactaccactttgaagcttatacccgggtacgaaaatgtgatggagctcgagcaaagaagacaagagctgaaggtaagtctttatttgaattgattctatatttttatatacttttttttgtctacaagtattaagattatcgttaaaaattaggctgtcgagaagaggatggaaaatgttattggagaaaaagagattgacgatctaaacttgacagaattaattgagttcgagaagaagcttgaagatatccaaagtctacagttgaaggtaagtagtgctcattttatcactctttaaatttattgtttatgtttataaaaatctattttttaattgatttgtgtagaagttggaaaagattccttggaaagacatgatacagccagccaaagatcttgtagttctgaacgaatatgtcaagtttaagattggagaaatgcaggctaggatttccatgcctcaaaacgacgaatttgatattaaaatggaagtaggaaaaaaggaagatttgaaggtaaaatgttggttaatttttgttttttctttttatatgtctacacaacattaattataacttcttaaaaatatagggtttgaaaatgaggatgaaagtgttcattggagaaaaggagtctgaagacatacacttggaggaattgattgagttcagtaaaaagcttgaagctcttcacccaaaggttagtagtgtttaacattttttttcttattatatatgtttattttggtctgcaaattgttttctaagtttccctttttaatttcgtgaagagcgtgatgcatttggacgacatgacagaagaaattaaagatatattcattatgaaagaaattgtgaagaaaatgatcgcgaagagggatcctaactcgtctaaaacgatgatcatccagaattatttttaattagaaattagtaacatataaattcattatcatggatcatatatgatcactttgtcgcttgtttctcccattacatatttacagaataatttgggattattttaatatcaatggaaggaacttatgttgttattttatattttaatcggattttctcataattaaaagatatttttttctaatggctattgcataaatttcatactttggttttcaaagtttatgtgtacatcgactactatgttaaattttgttttatatcaacttattgtaaataagttataaaaacatatgagatgatcgcctaaaggttacaaattataaaacatggtgtgtctttaaatgcgtcaaacataggattatgcatttttacaaaaaaaaaatgtttgaaattttttgagtcgtcgttaaattgatccaatggatataaaaagaataacatacaaaagagtttggtaagaaaaaatttagttgcggttttcgtcaaaaagacatagaaaatgtaatatagcaaagacttttgccgaagaacaacaacaacatggtaatacattattactgtctttatgaatttcacatactgaacaaacatctatatatggaagaaagggttaacaagaacgaagaaaaagagcaaatagaaattagacatccaataatgaacttagtccatttatattcgtttattgtgataacgaaaatattttgtttttataaagttaaattcttaatacttcataatcatttagagccattagcgaaggttaagatttttgttgttgttgctgttgtgatcgaatcttggataacctctgtaactaatcaatgggggtccaataaactgtatcaaaaccggaataaaccgaacaaaatagatattttattgtagtaattaaatgaagttactgtacaggcttaaaccctaacggtctaaccaacgcaatatttaattttgttatactgactaaacctcgaagttagtgcctttatacgttcgtttactattccttaaagtgattcttctcattccctttctactcgttcatttcaatcc

SEQ ID NO: 1233 - DNA, 3000 bp, Unknown
  misc_feature (1)..( 3000): cDNA_ID_2045772_gDNA_ID_1620374_Annot_ID_155094 3000 nt of promoter + ATG
attgaagaattccctaacctcgagaatcttgttgagcttagcttatcaaaagaagagagtgatgggaaacaatgggatggagtgaaggtatgtaccttctaaacttaacgttttctccaacctctttaactaacacttttatatatataaattattgtcgattcgtacatgaaatgatgtatattcttctatatagtactagatccggccataacacgaaaataaaatcaatgttgtttacatttcacaaattatgtttgacacttagattaaatattatgttgttaacattaattttacaaaactctgttttcattcagccgcttacgcccttcttggagatgttgtctcccactttgaagagcttgaagctcgagaatattccaagtttggtggagcttccttcctcatttcagaatctcaatcaactgaaggagttgagcatcacatactgcagaaatctggagactcttcccacaggaatcaacctcaaatctctcaattacctttgtttcaaaggatgctcacagttgaggagctttcctgaaatctcaactaacatctcagttctcaatctagaagaaacagggattgaagaggttccttggcagatcgagaacttctttaacctcactaagctaactatgaggagttgcagcaagctaaaatgtttatccctaaacattcctaaaatgaaaactctgtgggacgttgacttttcagattgtgcggcgttgactgtagttaacttaagtggctatccaagtgacacactttccgaggaggaggatgatagtttggacccctttctcgatttcaggggctgcttcagcttggatccagaaactgtccttcaccaagagtcagttattttcaactccatggcatttccaggtgaacaagtgccatcatatttcacgtaccgtactactggaacctccaccattctccccaatatccctctacttccaacacaactctctcaaccattcttcagatttagggtttgtgcggtggcaaccgctttcaatatagtatccatccaggtaaatagtcggttcacaggcagatttgggaacagctttgatttctttggtgagggacatgaactcatggaaatacggaagggtgatatgttgatatttgactgtcgtatccctttcaacgaagataatgctcttctagctcgaggggactacgatcacgtggatatgaatattcatataagtggagattcagaatctacgttcgaattaaaaggatggggtatacgcctcttagaggactgttcatcagtggagaaccgacttgttaatccaacacatgcgtatacacctgttcaaggacttgttaatgagattgaacacaatgaagactctggagataacaatgtagagactaagagaagcgcgaagcgaatgcgggtaagcattaagaatgaacaaaacataatattggttatcaggatcaacagaacattttaattgcttatgtagatttgttttgtttttcagatcacgtaaagactcaagaaacctatgacttgcccctacctctatacctaggactgggaggaacacatgatgtcactttcaatctttgatcttgaatgttgcaatgaatagttttgccggttataatggtacaacaagatcaaaggaggacatgcagcgactgatctctagtatctccctagctagatagacgttttcaggtaacccaaaactcataaaccatgtttccaacagatgttgccaccgacaaaagagttgatttcaattggtgattatatacgatgcccttcagtctctattttggtcttatgtgcttataaattaagttgttgggtatttcaagttgtcaagtcagataatgtattcatggtcattaacttcctgaatattatctgattgttttaggttcaactcaagataaaattgtatgaaatcagattggtatatccgtatattttatatagggctttcactgattagtgaacatgtttttgaatcccatgaaagcaacaggaacaatggaagaagaggaaacaaagcaaagtacatgtatataggtgttattagatctataaatgtacattattatttttgaagaactatatacaaagtttcttacataatccattccacaaaaattcgaggaagtcaagtcaggttggtatatgcctctgtttcaggcccgtgaagccatttttcgttctattgtgtatagaagtagccatgcttagctagtggtgttttcttaatcttttgtaaaatcgattttaagtactttatccaatgatattttgaggacttttgcggaattaaatatcacatatccaggattttattgaatcagtctccacttgtaattttatactctagacttttttttttcttcattgagtagatgtcgttagaccaaaatttaattgataaattgtaaaaatattaaatccaacaagaaaatgacatataggtggaaaatgttttaagagatgtccttgtgtcacactcttgtcttctttcttttcataatggtgttttcgtcttctttcgttcaaattaaatatgagtcgagaacagaccacgaccataataatattaatttaagtccctttgaatatgcataaaattaccaaccataattgcaactcttgcttagggtttcaatttcacaataacgatgagaaaatgagttgacttcttctttttgagttgcttcttagttgttctaacttcacaaaataactatattatacaatttaaactatgattttcctttggaaaacactaaattacaaagctatatggatccaccaatgcctatctttgctctcgtagcagaaagactcgaaatggtaccaaaaagtctacgttagacactctacaagattgcgacgcgacgcctcactaattctcctctaatttccttcttacaatctcaatctccaaagtctttgttcttagttttctcctcctctcactctttctctctatg

SEQ ID NO: 1234 - DNA, 3000 bp, Unknown
  misc_feature (1)..( 3000): cDNA_ID_3061255_gDNA_ID_1620374_Annot_ID_155095 3000 nt of promoter + ATG
tctgaccaagaaacaggtaaaaagcacacaaaagcgtttccacatttttttatcaaatgctaaaatcaaaatttgaaggaaggtcaaaagtgctatttctcattaaaatcaaattctcattttcatcaggggaacgaagactagaagctggtgcaatggtcctcgctgataaaggtatcgtgtgcattgacgagtttgataagatgaatgatcaggaccgagttgctatacacgaagtgatggagcaacagactgtaacaattgcaaaagccggtatccatgcatcactgaatgctagatgcagtgtggttgcagctgcaaatcccatatacggaactgtaagttctcaccgaagttttcctaatctacttactctactgactagtatttttttgtcctaatacctactcttgctcctgcagtatgacagatcactgactccaacaaagaacattggacttccagattcgctgctttctcgttttgatctactgtttattgtgttggatcaaatggatgctggtatcgacagcatgatttcagaacatgtcttgcgcatgcatcgttacaagaacgatagaggtaggaaacaaatcatgcttctatgttttactaaacatttcacaacccatgtcttgaaacgcatctgacttttgagtgaaccataggtgaggcagggccagatgggagcttgccttacgcgagagaagacaatgctgagagtgaaatgtttgttaagtataaccaaacactacatgggaagaagaaaagaggccaaacacatgataaaacccttacgattaagttcttgaagaagtacattcattacgccaagcaccgtattacaccaaagctcactgatgaagtgagacagtgaactcaaatatataaatttttatgtatctgataatctcttccactaaatctcttttgttattaaatttgcaggcatcggaacgtattgcagaagcatatgcagatctcagaaatgcaggttccgatactaaggtaatttatttcataaaataacattggacactgtatctttttcgtcttgggaacttgtatttgacacaaccatcgaaatctctgcagactggaggtacgcttccgataacagccagaactctagagacaataattcgtcttgctacggcacatgccaaaatgaagttgagtagcgaggtaacaatctaactcaaatcttctgtttccccacctggtcgtgaatatgttctattcagattctttctaaagtgataactttattttgaaaggttactaaagctgatgcagaggctgccttgaagcttatgaactttgcaatatatcatcaagaattaactgagatggatgatcgtgagcaagaagaacgtcaaagggaacaagctgaacaagaaagaacaccaagtggacgtagaggcaaccaacgcaggaataatgaagatggagcagagaatgacactgcaaatgtcgacaggtaaactaatttgatctcctccatggaaacctatatcacagctttctcaacccttatacttttttctttctcttttgctggtccattcagtgaaacagcagatccaatggaagtagatgaaccttctgtagagcaattcagcggcacggtctctgcagcaaggattgaaacctttgagcgagtgtttgggcagcacatgaggacacacaggctcgatgacatctctattgcagatatagagactgttgtcaacaacaatggggttggagcatctcgttactctgcagatgagattatggctctcttagaggtaattcacaaattaagagacaagctttctcattctttaactttttatacaatatcttcataactttactctattgtggattttatgcagaaactgcaagatgataacaaagtgatgatcagcgatggcaaagttcatatcatttgatcatatgaagaaatcaatattgattgcatcatcatcatcatattagaactcaaaaatagtgtagtagtaaactcttggaaaccaaaatatcattttgtaaaatctttattcatacgttatgttttttgcatttactagtgaagtaaaactgatgataaaatgcttaaaaaaacgcatctgattataaaatttggaatttataacgaaaagcacaatccgagaataaaatactttcatatttatcctataatttcttgagctgtttatgccaaattttatacatatgtaatcgacatcaagattatagtgtatatgttgttttaacccaatggtaagaatagagttgtgccatatataagccaacttcaaaaccctaataatcactaccttggaactctctcgtctaaaagatccatgtttttccatttggtctctattactttttttttttttttccaaaacatgtttgctttgtccatgatggatcctatacgtttctaaaattgtacatataatcaggttaaattccacaaagacggattgaaatcagttttggtatacagagtaatacaacaaaatctatttttttttttgttgccaaataacaaaatctattttggtaggttactgcacacgtttctctatcaaccctagtcaaaacaattgagttactaaataaacttacgtagttaggccatacatgtctctgattcagaccagagcttctcagaaatgttaaggccatgagcaagagaaacttgtctccactctaagaattctaaattcttaaagtaatcataaagtgagacgtatgtgtagtaatgtaaggggataagacattagaggctatgaaacatttgcttatgaccttgtacaaaagatgattaagacatcaaattggaaatatccgtcaagttgtgtctgaaacaatagtgaaactgattagtgaagacttttgtggccgtgtttaatatttttatataattaaatcaccaagacgtacgattacaatcttaatctccaaagtctttgttcatagtttcctcctctcattctctctatg

SEQ ID NO: 1235 - DNA, 3000 bp, Unknown
  misc_feature (1)..( 3000): cDNA_ID_3061248_gDNA_ID_1620374_Annot_ID_155099 3000 nt of promoter + ATG
ggttcttggctcactttatctattttttcgggcaaaattggatattataaattcagacggagaagacaagatcaaggaaagtaaaagctcaattgttctaaaagcccctaaatgcttacaagttacaactattcacttttttggcctcgtagttctattccctcaagatttaagcctcccgtaaaataagacatttcactttcaaaatgtacaattgtgctgggtgtattaggtttgtagaaaaaacaattgacttcaggtagattgtaattgtagtgctaagattggcaaagtaacgcgatagcatctttgtgactcgtgaatatgtaatgcattgtatagtgtttgttttacgaaaatatgatgctctgtaaaatagaatggcaacatgctatcaaatagaatggtagcatgctatcaaataaaattccattgaaactcatcaaatttttgtttggaaacccctaactatgttatattgcaaatcaatgaaatatatgggataatttcatgttgtcaattatttactctctaaatttttatttatcactttctttacatcccgaaaactgccaatttgtcaactcgaatttgtaggtaagaaaatcttgcgaaatttcatattttatgtagttttaaaccgtgtttgattgtcaatgaagtaaaaaattaacagatctgttattttttaaagttgaaatcatgtagacaaattacctataaatgtaacaagtaaccggaaaataaatactggaaatgcagttaaatagagttgggcaaggtgggtgaaccggtattcacgtgggggcattgatcttacaatagccaagtcaacaatcaaagttgtaagtagaaagctggtataagttgttcaccacccgagtttttttcttctaacctttcatataaagtcttattgtcttatgttacttgtttaaatgagtatgtacaattgtcactattcacacccaaaaaataggtttataatttgatcgtttcaaacgtaacttttgtgtttgtatttttactttcatgtgaattttacttttacatttttgacttacaattgtcactattcacaaaaagtaccagttcgttaaatttgcttcggtgcttcaccgtaatagcagccaaatccacatttaaatataaatccgttttggttcaattttgcttagcgtcagccgtcaactacgtgactcctgcatcattctcttataacaaacataaaattttaagaaatgaaaatcttgttttctcctacgtatatgtaatgtatcatagttttcagaaatatataaaagtagcattttaacatgtttgagcaaatgtaatacttttgtgtcttaaaagtatactatcaaaattagacgagaataaatgaaaattgatgttgagaattatcattgggtttttattgggccaaacccaacacaatttctataaacccaaacaatttgagaatctgaaagaatatattccacacaaaaaaaaaaaaaaattgttattgaatgaatctagtgcacgactggctaatctcatgtctattaaggtaaaagtagggtctctcctatacaaaaattgaggcaaactacgaaatcaggagactagaagtagacattctccgataactttgagaccaaaagcgacgaattgttttatagcttccaaaactcactggcttgcactatttacgtaggtacaaatacatttgactttttacaaatacaactctacattgaatttttgactaattcaacatccgttcgtatcagtcaattctacattacattgactcaaattatactaacataatttgcccgccaaaaaagactttgaccctttatataaactattgagagaaatttgagaatcgacttggttggaatcattacaagatgactagaacttattactaccaactctagtttagagtttcatacacaaacaaaaaaattgcatgaaatttgatcagcccaaaaataactcaaagccccaaaaaataagttaatgaatgaacgtcacgtgaataacacgtgttggttttctcaaaaaaaaaaaaattttttctcaattctcgtaaaacctaattttcaatttcttcttccttttgttaatgatgataaaatttgcagttttgagttatctatactaacagagttaaaaaaacacaaacacagagatgaataagaaactttcatattgaattgaaggaatgaaaaaacaaattttacaaataaactagatatacaaaaaaaaacagagttacaaaaaaatcaaaactaacttttgttagaatttacaaccacaacagaggaagaagaaagcaagcttggataccaaaaccatagcctcgatgatagacatgattctgtatctcaaagtttccaaaaacgtcatcttcagattcaatctcttccactttagccctcctccaagtcccaaaaatttcaatctcgtcctttctttagtcgtcttccatatcgaaagcttcccttttctcatcatcttctcaaaattttgagctgcttcaaaaaccaaaatgtaacaaagaattagggttctgtttttgtttcaggtgttgttgttataataaagtcttcgaagagtttattttttatacaagctaaagttgagggtattttggtagttttcacagtcatagattcgaagcgcgtttccatgatatcaacgtaggtgttctgacgtgggagcactctgtttctccaaagaatttcgtggatatattttttaactcctttatatagataatagatttgtttttatatatacataccagttgtttttactgaatttattcttttttagtttcaaatgattatcctaattcttacttcttaggaatgtataaaattacgaatttttttaacgtcagattgatcggaaaaagattgtttatttctgctaaatttatatacacacagcccaagttttttttaatggaagacatacattacaatattggaataattgaagccc

SEQ ID NO: 1236 - DNA, 3000 bp, Unknown
  misc_feature (1)..( 3000): cDNA_ID_3061251_gDNA_ID_1620374_Annot_ID_155097 3000 nt of promoter + ATG
ttcattaacttattttttggggctttgagttatttttgggctgatcaaatttcatgcaatttttttgtttgtgtatgaaactctaaactagagttggtagtaataagttctagtcatcttgtaatgattccaaccaagtcgattctcaaatttctctcaatagtttatataaagggtcaaagtcttttttggcgggcaaattatgttagtataatttgagtcaatgtaatgtagaattgactgatacgaacggatgttgaattagtcaaaaattcaatgtagagttgtatttgtaaaaagtcaaatgtatttgtacctacgtaaatagtgcaagccagtgagttttggaagctataaaacaattcgtcgcttttggtctcaaagttatcggagaatgtctacttctagtctcctgatttcgtagtttgcctcaatttttgtataggagagaccctacttttaccttaatagacatgagattagccagtcgtgcactagattcattcaataacaatttttttttttttttgtgtggaatatattctttcagattctcaaattgtttgggtttatagaaattgtgttgggtttggcccaataaaaacccaatgataattctcaacatcaattttcatttattctcgtctaattttgatagtatacttttaagacacaaaagtattacatttgctcaaacatgttaaaatgctacttttatatatttctgaaaactatgatacattacatatacgtaggagaaaacaagattttcatttcttaaaattttatgtttgttataagagaatgatgcaggagtcacgtagttgacggctgacgctaagcaaaattgaaccaaaacggatttatatttaaatgtggatttggctgctattacggtgaagcaccgaagcaaatttaacgaactggtactttttgtgaatagtgacaattgtaagtcaaaaatgtaaaagtaaaattcacatgaaagtaaaaatacaaacacaaaagttacgtttgaaacgatcaaattataaacctattttttgggtgtgaatagtgacaattgtacatactcatttaaacaagtaacataagacaataagactttatatgaaaggttagaagaaaaaaactcgggtggtgaacaacttataccagctttctacttacaactttgattgttgacttggctattgtaagatcaatgcccccacgtgaataccggttcacccaccttgcccaactctatttaactgcatttccagtatttattttccggttacttgttacatttataggtaatttgtctacatgatttcaactttaaaaaataacagatctgttaattttttacttcattgacaatcaaacacggtttaaaactacataaaatatgaaatttcgcaagattttcttacctacaaattcgagttgacaaattggcagttttcgggatgtaaagaaagtgataaataaaaatttagagagtaaataattgacaacatgaaattatcccatatatttcattgatttgcaatataacatagttaggggtttccaaacaaaaatttgatgagtttcaatggaattttatttgatagcatgctaccattctatttgatagcatgttgccattctattttacagagcatcatattttcgtaaaacaaacactatacaatgcattacatattcacgagtcacaaagatgctatcgcgttactttgccaatcttagcactacaattacaatctacctgaagtcaattgttttttctacaaacctaatacacccagcacaattgtacattttgaaagtgaaatgtcttattttacgggaggcttaaatcttgagggaatagaactacgaggccaaaaaagtgaatagttgtaacttgtaagcatttaggggcttttagaacaattgagcttttactttccttgatcttgtcttctccgtctgaatttataatatccaattttgcccgaaaaaatagataaagtgagccaagaaccataaggcaagtggcttgtcatctcttatcatgaacacgagagttcgactcttgtttttcctagtggggcagcaaatggtcccgtcgaaataaaaaagttacattgaagtatcattaaacttgtttgaaatgtttgtgaactacaaacagtaaaattactaaattaatttctaagtaaacaattgggacaaaatgttgtattattgtatccacattgtataattgttaagtattatcatccaattcaaatgtaaacgttgttatttaagattttatttccttgtggactatatattcaatccaactttctaccaaaaaaaaatatattcaatctaactaaagccagatcactcaaaaatgaaaacaataaaactgaataatattctattaataactaaaaaaaccaatttacagaaatccgaagctaaacgaatgaaaactgaaaccaaaatgtgtgtgtaaatgttaatttgagtataagaaatctatttttgaaatctaaaaaccaaaggtgaatttgagccaaccaatacgtaaaaatccgatctaaaagatattgtaacagtaaacgattctatgttttcgaaaaatccaataaaaaaataatcgagttcaagctaaaactgaagacaatcgaattatgatagcgaatagatccattcttcgattcgtaatttttgttgagttacgaattggagaatggctcaaagcatccgtacctattttaagtagaccaaatagtagaataacataaactacaaggctagaactaaaacacttgtaaaattaagggacttagagaaaaattacagtccaaaaatttcctcgaataattcgctgttttttttataatatagtcttgctcctgaaatctgacgaacataagctcttttcgcaaaacacacatcacacaccattttcacaacatcgtacttatcgccttcctctctctctcaatacctctctcaatttctggatccaccatg

SEQ ID NO: 1237 - DNA, 3000 bp, Unknown
  misc_feature (1)..( 3000): cDNA_ID_3061259_gDNA_ID_1620374_Annot_ID_155093 3000 nt of promoter + ATG
tagttttttttggtagggattaacttcttctagctcgtggtaattgttttatatatcaaatatatattttactaatatatatatatatatatatataaataatactaaatatgatgaattaattctatggtaaaaatgtcagtagaagtagctacactataaactttggtatgttatgtatatttttatataacgaaagctacattttgggtattgtttttatcagggaatgattgatattgaagcaacttttatttagaaattcattaaaacattttaatggttctcttgtaagattcacacctatctttaaattttctagtcaaaaaaagaaagaaaaaaaaagcgagagagcttctgtttttcaaaattagtgcaaaacagaacaaatgcgaaattgtacattttttcttattaaaaattattatagccaaaaaaagaaaaatattatggcctcctatatttgtccccaatcatcctatttattttgacactgacttttctcacccctattattaggcaagttctacaaaaatgatggccatgaaaaatcattatgagttattttccctcgtggctcgcgatggttatgtttttttgacaccgagtctcacgtgacttccacgtgaactatatgagtggaggttttggatatggatcaacttgaccatatactagatttgagaccaagacaaaagagagttcttaaaagtctcccaagatcaaaacagtaaaccctaatgattttctataacccttttgttgtatggaattttagagaatacagaattttagtgtctctttctatagttttaggcttttagcaaaaagtctcaccttttctttgtaatttctctaagataaattgtttttcgaaaaatgctcaaaaagtactgcaaatcagaatgtgtactgcatatcttctatctacgcgaacaattggaataaagcactgttattctctcgtgaaacgttgatacattatatacaacacatatgagtttgaagtttctgtattacagttttctttttgaacagaaatcatttaatgaaccgtgttacttttttttgggtaacatgaaccgtgttactataagactatgaattataggaatcttctaatttgtcatttatgtacgagttaaattgtatttgaagtttcatcaaaaattagtacttgattatgtcgaatattatctatatttctagtgataatttagtgttgttacatcaaatattctaatttagaaaagaaaacaacatgtgtgtacgatataaattgatagttttattttatttaaagtaatgagatgcccttaaaacaaaccttttactcattataataatattatcaagaacaatcttgatcaaacaatgtatttatcatttacagccaaaagtaaaagaatttgtacttgatatagactccatacaaactgtagtaagagagatgatagaatataaatgttccccatttatttggtggaggaccaaatgtggaccaaaacataacttagccaatcgcatcttaaggcaatcgagaagaaactacatgcatgggcatgcaactatactgtttcatttattttgaaattcatttggtccaaatttatcttcaattcctttaaaactagatgtacatgacaaggttgaagtagggaattcacgtaatcatacttttgactttgacaactatatttagtcattcagtgttttattgctatatcgaattatgttcaatgtggcaagaccacgagattatgtttcatttagttaacaatttatgaagttttgaaaacctttgtgtaaaaatactgtaacattacttaaaaacctttctgtaccagtacaatcatttcgacctatattctaaaatgtaaaagtaattcttacattattcttctattaaatgggaaatcaataacttatacggaataaatcactcttaaacttaaatggtcaatttcaacatgtatagtgatcaatttggtaaataatatttgatgatatgttagtgtatagatcaacattccttttaagtggttgataagagagactataaaattttaatctccgagtcatcattccaatataagtgttctcaagatttgttgctctctcatgtcctaatcgcttagggttccaatccaaaccaatgagtttagtcacatcacttacaaatgtgtatatcaatatatctttacggaaaaaagatatattgataaaggatgtacaatcaaatacaacaaattagtatgcaatgaaaatacaattttagaccagaaccacaaaattacaactactcaatatatcgagtattacaatatattgagctataattcaacttttcacctatagttagctagttttgaccataatttgtagtatagtagtatgtgttagtacgtcgatgtgtcaacattcatgttcaaacttgcatattacatgttattgacatgttcttcctgtagtatacaaattacacattttcataacttcatatatgaatctcctgcaattttacctgcaaactattggtcaaagccttttaaatgggctagatcaagcccactaactgccaaaatattcacttcatttattcttgtagacagtatacacattatcaaatgtacacacattttcatgatttgatcttagatattatttcatgcaattttagcctctattgctaggctttcctttaaaaacttaccgggctaatcaaaacctcttaaaaagcctccatatcaaaagcccatcaatgttacctcgaacttagtggaatcaaatacggtgtcgtttgatagaaaatgacgaaactagccctttgaccgttcaggaaaaagtcttccgacatataaaaacggagaagcgagaagacgtgtcggctgagaggtaagaggaagagagactcaaaacggcaattagcgaaagtgggcgggaggattcttttccggcgactcttttatgtcttctcttcctcttcgctccggtgagaag

SEQ ID NO: 1238 - DNA, 3000 bp, Unknown
  misc_feature (1)..( 3000): cDNA_ID_2131856_gDNA_ID_1620375_Annot_ID_155123 3000 nt of promoter + ATG
tgattggagaatttttctttgagttgggattttgtggattcacatgtgtattttcaactgttttgtatactgagcattaatgatgttttttatggtaattttaaattactatttttaccaaaattatacttcctctattttttttccgtttaattcttttttaaaaacacaaatattaaaaaacatattaaatgttgtttttaaatatattactttttgtaatttataatttttaataactctaaattaataatatttaataattttattaaattttacaatttatttattaaattttacaatctatcaattataactaataagtattgcattgaaaacctaaaaaattaatcttttagaaacaatattttttctataaaattaaacaaaaaagaacggaagaaaatatttgtggatttaaacctttagatacccagccgtttagattttacaatctatgatttatgcatatataatttttattgcagatcctcaatatatgttgataagaaaattagtttagattaatatttttgttttatttattttaatattggtagctaggtaattaaagttgaagatatatatatatatatgacccatataaaacaaaaattcattaatgaaaacgtaatttgtactcgtctctccatgaaatacagtactccctctgtttcatattagttgtagtttaaggtttttacacacaaattaagaaatcataaaaatctcatttaatctacctcttttatataaaaacatcatttattataaccaattcaaccaataaaaaaatagatgattaaatataattggttaaagaatattaaatacatttattatttgcataaaaagttgaaaacaacatttaaattgaaaaaaaataaaaacccttaaactacatttatatagaaacagagggagtattatacaaacacaaacttaaatgttagaatttagaaagataaataaacctttagtcttcaattggtgagaagttaatcatatttatatggtgacataagattagtgaaatgaagctacttattggtcaaacttacattaatctaaaaggttaatgatatgtcatatgtctaagatggagcatgctcaaaagaaaagcttagttaatgtttcatgttgatgcaattatttgtgtttagctttatgcaaaaacactgtttttaaccaagaacaatactgtcgttttcagctttatgaatgttcaaaaagtttctacttttttgcttttatgttttttgccctttgtttctgagaattaaatttgtttcctttcttcaatcactttgacagacattatctccaatttagtatattgtctacccaatgttagaaatgtttatttatcgtgatattaaaatgttatttgtttcctcatgatatttcgctagactagtaaacaaaagtattaattaactagtaaactaaaatatttatttatataaaaacataagtgattactattttcacgggtaaaattgtgtaatgagttttaagtgtacatacatgactctatatataaggttgcagttcagattgatgggaacagatatattgacttacactaggctcaaagcttaacacttttataactggaaatttctcttttgtttttattgcatgggaataaagtaaagaaatgataacataaaaagagaaagtaaaacaattttagtattttctatcaaaaataaaaaacattttaagattaatagttgtattcttagttgctaagactacagataggtctatgtataggtagtgtatgtatttggtatcaatatgtatgtgtatacgtgtaatcaatgatgagaaagacacaacctttagactttgaacctttgaagagtggttataggctgtttatttcaagttttttgcttactctttttgccttttttctaaagttaatattcgttgtgccaattttcttcagaaaagaaatcaggaagtagagagtagagacgcattctgttcacacttcactctcaacttagaaacaattatgcgtcaaaactcaaaactagtaaaaagcatatcaaaatacaatttcgaagtaattgccttcgtatttggtttgattcatgttttaaattttcgtatacactaactttgtatttatagcaaataagaataaccaattttctttaaaaacgtttattttatatgcaaccttactcatttttctttgttagattttcgctatgcatacatggaccatggttgattgttgcatgtatgtatactatactaacgaatgtaattttgatgatctcatcttgggccgaagccaatgcaactatttttgtgttgaaattccattgaatcttaaagcctataaatactttttaagtcgtgtctagctcacaatcaaaaagcaaagtctcacttagaaaccagattctaaaaatattttgtaaatgtttgtccatctcaatatcaaaaacattatctccaaaacgaaatgtgaaaataatgtcaaatgttttacgatataatctttaattcatagatatttcctaatctaaaaatgcatagtaatttggtaaacgcgttttgttttcaatctttaattcatagatatttcatatttagcaaaaacaacgaatgtattatgcgtagtgactagtgagaaatcagaaatatataaaattagcttttagttatgttatctatggatgattaatgaaaagttttggtctattagctgagtataggttaacaacaacaatcatatgatacatagagctacttcttacctctctcattgcaatacataaacaataagccttgtccaaattcggcagctttatcatcatattgtgtacaccataacaaggatcagaggttgggttgatacaaaaatgctcttaaaagtaaccatagctcggaagcaaagatcacttgcaagtgcaaaatggtgcaccatataaaatccacagtaactacatctacggtggccacgtctcaaactacatg

SEQ ID NO: 1239 - DNA, 3000 bp, Unknown
  misc_feature (1)..( 3000): cDNA_ID_3061294_gDNA_ID_1620375_Annot_ID_155136 3000 nt of promoter + ATG
gaaaataaagagaaccagtgaccccaaagtgaagaaaaaagagacaaagataatgaaaataaagctaaagcatcagtcttttggaatccatttttgttgagcatgcataattaaatttgatctcatatgattaacaagcataatccaactgaagttcttatcaagaattaaacccttttgaacaatatggtacaacatatgattacgaaccccccaaaatatgatcagtaacaaccctaagtatcgatgattttggttgaaaaatgagcaaaagatactaccttccgtcgttctccagcttcttatgttcttccatccatggaagtttcggaagatcatcaacgttaagtgatgaagaaggcaaccttctttgagcatctgaagagaacttatctttcttaggccacaaccaaatcttcgaaaccgaaaagctctctcctttagccacagtattgatctttttattgtcttctgatgatgaattccctgtctgctcagattctttgtcctgaggtttcaaacgcggcagtctgtcgttggcaaacgggactttaagttccgagttaccgagtatatactgatacgaacccattgagaaacatctccttgcatccaaattactactactagtctctcctccggcaacaacatcctgaccttggccattaccaacattgtcaagcctcttaaatttccccaatctaaccggtaaaacacctttctccacaacgatttcttgaatctccatagttttctgacttccattctcggtcacaccctcttcgtcttctcttatatcatcgaaatcaaacatcgggttctccattgagaaaccaggggaaaagagagtaccacgacaaagaggacaagtcgaatttgactgaagccaagtatcaatacagttcaaatgaaaagcatggctacacattggcaacaacctcagcttatctttctcagagaactcacagagacaaaccgcgcaatcaaacggctcttgagcagcaccattaccaccaccaccaccagcactaccaacaatctccttgtagtgaaaaacaggtaaagcatcgataaaagcttgatcaagaccagaatcattcaaatgaaaaagctgttgaagctgtctttgaagagcatcactagttgagatctctgggaatctattagaccttgaagaagcagtagcagaaggatgcttaataagaaacctgacgagcaaatgaagaagcccagaaatgaagaacaagacagctagaatcacaattacaaacaaaaccgccggactgattctgttaccggacgacggtggtggaggagacggcggagaaagaattgggtctttgtaaaacggtggtgggtacgcaaagttcccatctttttgctcaattgtgaatcgaacccaagacatcttgtaagatttaggtcacttagaaacaaacaactccaagatctcaattttcaagatctcaaaagctcaatcaaaaaacaaaacaactccaagttaagtggagaagagttccaatttcaataacatcaacatcagagatacacaaaactcacctaaaagctctctccagaatcttgacacaaaaccctaatcaaagagggctttttttggtttggttcaatatgtcagatttgcagaggaagaagagagagttaaaggaactctctttcttcgtcctttctctctcttctatctctatctatttcgctataacctttccttttcttgagctttaatggtggaagtagaaaactcgaagaaaatagcaaagtgattttgtaaaatttcgaagtgcgaggcaaaagttggaaaacaacaacattagtgaaattaaaaaagtaaaaagctttgaaatatgaaaatgaaaataaattagcggtttttagatttgggcccacgtgcattgatgtcagatggtcaactccacagacaaaaaaaaatgacggtttcctatgtttttggacttattattagatccgtactgggccggaccatcaagcccaattgtcttatcctaatcaaatctactgttaggagcgtgaccagctctagctatagtggacattccggtttagtttcggtttcggttatcttggttttcgtttttaatttgaattaatagaacgaaaatcagataaccagcgttttagttatggtttcgtttccgattatatcgattttaattcgaccacttggtttatagataaatatcggttgaaatggtttggtttagttttttttttcggtttagtacggatcaaactctactacaattgggaagcgtgtaactgtcaacgagcgtctcaaaatctaaccgttgatcaattcttttgacggtcgtaaattcgccggcaacatcgaacgagaagtcaccggaaaggtcacggagaaatgtcccccatgagcttctccgccgcgtacgactgataattggtgcgattctttaaactagttactgtgatttagttgctttatcttctgttgttgggggaattgtaggtcactgatgacactgctcttggaatttgtcttaagttattacgattgattgagttttaggttccttttgatctttggtggattctgatgttggagctgattcatcaacactaaagcaaagctacaagttttatcattggaggagatatgttcaaatgcaagttggaaaatttctccaattggatgattggggttgatgaaggtattagagtctatggctaaaggtccttgtctttggtctcgtggagtattagaatatggatccttgtgatgtgaagttttgggtcaagttgggatattttataattaaggagaggctgattttttccacattgtcgtcattgataaagtcttggttttgtgttaaacaatgaccaaattcccagacgtggtgtagtgaacaaccaaaaaaacaacatgattgattgattctgaaattcactttaattttcaagagagagtttctgaggatcttgatatcagaatctgtcatg

SEQ ID NO: 1240 - DNA, 3000 bp, Unknown
  misc_feature (1)..( 3000): cDNA_ID_3061291_gDNA_ID_1620375_Annot_ID_155137 3000 nt of promoter + ATG
cacccaagaagtcaagttgctctccgcaaaaagacatactggtactgagattagtgttgcaaataaattgtagaagaagactacggttatctcttcagggtaaacctccatgacacgagtctgaaaccatatacagctacagaatttaatgtgtaaacccaaagtcttttttagtgaaattttcaagtgtttgtacctgaagaatataccagacggatataagaaaatactgtgaagcaagcaagagccctccgattatccagcttgactctattgaggtcaactgctggtgaagtgtaacggtaggtaatacagttgtaaaagatgcagaggcgagaacttgtgggcctttatacagcacaactaccagagcaccagatatagatagtattgcaccaatgattttagcctgagtcgcagagctccttaaccttacttgctccatccttaatgagtcacccaaaagaaaaaccagttcaaaaaaaagattgatagtaacaaatagaccacatatcatcatatgcaccaaacttatctcatgaaagaatgagggcaaaccatttctaaccaaccactgagttgtacttgtattagtgagtcttactcttatgtgacgactaagtactttgtagtttaaataaacgtgagaagttttccgtatttactggtatcgattggcatcgaatgctacagcgtataaactactagtcactgaacataagatggaaaacccatgacgtccaaaaaggaaaatttaaattcattctatatacgcaaaaggcttgagattttgtatgcttagtaagtgtggaattactccgttttccactgtctagactaatttccaaaaacagaaacagaagagaaagaggtggaacctgaagataacagcgagtgtgaatgtgaaagccggtgtgagattgctgatagcagatgcaagagttggggaactgtatgcaatacctttacaaccagcaatctgcgacatgaacctgttccactcaagttaaaaaaagccagaaatgcccataaatctagaagcaggagtacgatgttattacccaacaagcccaagtaagaaaatcttgaagaaaagaggagacttagctgctggtaatcttcttgacctgcatatgtacaaaagtaagttcatgttcttgaaaagattataccgggcaaagagaggagatcagtaccttccaaagattacagaaagtggaagaaggagaagtgttgaaacaatataagagtagaagacaaagacatagaagctcaatcctcttaaagtagcagccttaaacagcgtgtttgacccaacagtggcacactccaccgcaaacatcgcagcaaacggcacaacatctctggtaaagtacttccacgccactttctcttctcctgcttctctcatgacagattctgatatcaagatcctcagaaactctctcttgaaaattaaagtgaatttcagaatcaatcaatcatgttgtttttttggttgttcactacaccacgtctgggaatttggtcattgtttaacacaaaaccaagactttatcaatgacgacaatgtggaaaaaatcagcctctccttaattataaaatatcccaacttgacccaaaacttcacatcacaaggatccatattctaatactccacgagaccaaagacaaggacctttagccatagactctaataccttcatcaaccccaatcatccaattggagaaattttccaacttgcatttgaacatatctcctccaatgataaaacttgtagctttgctttagtgttgatgaatcagctccaacatcagaatccaccaaagatcaaaaggaacctaaaactcaatcaatcgtaataacttaagacaaattccaagagcagtgtcatcagtgacctacaattcccccaacaacagaagataaagcaactaaatcacagtaactagtttaaagaatcgcaccaattatcagtcgtacgcggcggagaagctcatgggggacatttctccgtgacctttccggtgacttctcgttcgatgttgccggcgaatttacgaccgtcaaaagaattgatcaacggttagattttgagacgctcgttgacagttacacgcttcccaattgtagtagagtttgatccgtactaaaccgaaaaaaaaaactaaaccaaaccatttcaaccgatatttatctataaaccaagtggtcgaattaaaatcgatataatcggaaacgaaaccataactaaaacgctggttatctgattttcgttctattaattcaaattaaaaacgaaaaccaagataaccgaaaccgaaactaaaccggaatgtccactatagctagagctggtcacgctcctaacagtagatttgattaggataagacaattgggcttgatggtccggcccagtacggatctaataataagtccaaaaacataggaaaccgtcatttttttttgtctgtggagttgaccatctgacatcaatgcacgtgggcccaaatctaaaaaccgctaatttattttcattttcatatttcaaagctttttacttttttaatttcactaatgttgttgttttccaacttttgcctcgcacttcgaaattttacaaaatcactttgctattttcttcgagttttctacttccaccattaaagctcaagaaaaggaaaggttatagcgaaatagatagagatagaagagagagaaaggacgaagaaagagagttcctttaactctctcttcttcctctgcaaatctgacatattgaaccaaaccaaaaaaagccctctttgattagggttttgtgtcaagattctggagagagcttttaggtgagttttgtgtatctctgatgttgatgttattgaaattggaactcttctccacttaacttggagttgttttgttttttgattgagcttttgagatcttgaaaattgagatcttggagttgtttgtttctaagtgacctaaatcttacaag

SEQ ID NO: 1241 - DNA, 3000 bp, Unknown
  misc_feature (1)..( 3000): cDNA_ID_1032925_gDNA_ID_1620375_Annot_ID_155138 3000 nt of promoter + ATG
agtaatttggatgcaaggagatgtttctcaatgggttcgtatcagtatatactcggtaactcggaacttaaagtcccgtttgccaacgacagactgccgcgtttgaaacctcaggacaaagaatctgagcagacagggaattcatcatcagaagacaataaaaagatcaatactgtggctaaaggagagagcttttcggtttcgaagatttggttgtggcctaagaaagataagttctcttcagatgctcaaagaaggttgccttcttcatcacttaacgttgatgatcttccgaaacttccatggatggaagaacataagaagctggagaacgacggaaggtagtatcttttgctcatttttcaaccaaaatcatcgatacttagggttgttactgatcatattttggggggttcgtaatcatatgttgtaccatattgttcaaaagggtttaattcttgataagaacttcagttggattatgcttgttaatcatatgagatcaaatttaattatgcatgctcaacaaaaatggattccaaaagactgatgctttagctttattttcattatctttgtctcttttttcttcactttggggtcactggttctctttattttcttcttttccatatactttcctttactctctcaacaaattcactgttaactttataaatataaatgtatttgttatatacatgctggttcctgctggtcatcaactaatgcattatagtatggtttacttttttatttttataacttgtctagaatttttaactgatatactcaagtctggatccagaaaacaaatgggaacttttgacttgtgttcaaacacaatcttgaatcttctctttggtttaggttaggggtttttggctctttgtgctataaaccaaaacaaaaatgaaatcttctataaaccaattacatttaggactttaatttcaaaagtctttggctctaatggtttatgttggttgttgtagggtcaatatgtttttctgacactgatataaaaccattatatacccactcgatcttgatttgattgcacataaacaaataaagaaaaagataatccagaataaacaaatgatgaattagaactctctagttcccttgcactgttgcacatatatctcttaaagtatatgataagtataataatatatagttatattgttatattaataagattatttattaaataatcttactatttataagattatttaatatatatatatatatatatatatatatgagaattcaaattaaatattttcatttgtaagaccaccctctagcttatggaaacatatatcataccatgacaatttggctccgagccaaaacacaaaaagagctgcaaagactattaatccttctaataacctgttttggaaggaaaaaagcactagtccaaaactacagtctaattattgttgtaaatttgaccacaataagtgtaatgcgttaaaatgtaaaatcttcaaaatctatgtcagtgtgaattaattaatttctgtacttttgaaaataaacgtaaatcttgttatagaaatctacgcaaaaaataaagaatttgacctcaggatactaaaaacagtaaaacgtatgcaattaagactaaaccgggattgcattgataaaccgatataaaaatttgaaataaccatccggtttattttccgtggccagcaagtcccatgaattttgtttgatggtcaaacaaatcccatgatatcgctcgtagattttgcatgtgtttgttgtgaattgtactgttggtggcaaatctcgtaattatatagaactttaagaccctatcagtaatctcaaaaactaaattctgacgtggcgtgtaacaacaactaatacggacgtaacggaaaactttgaacacacgaccactctgaaaaattcagaatctttttaattattagaaaaataataaaataaattaaaaacgactaattaatttacgatttcatgcttatccttacgattcaaacaaaatttatcttaaaaccaaattgaatatcattagttttttttcttcgggtatattgttttttaaatatattatgcgttatcaaaattaggaacgttccaaaattagacattgtaccttctttttttcaacagacgttaaattggtattctttttttttgcaaaatcagatattataatccgaccttaattatagcagtttaagataatatttggtcaaaacaaataaatttactagtctttagataattaatagttggataatctttggtcaaaacaaattaaaacgactaattattttcagtttttactcagatttcatgtttatccatacaattcaaacaatattgatcttaaaattctatcaaagtgataatataaattcttgacatacgataattaagtttccaagtcaaagatttaatactatcattaatagttttttctttctccgcgtataaaattgttttaaagtgatggaactattttaaaaattattatgctttatcaaaattagacattaatgcacattccttttttttcttgtcaacagaaattaactttttatccttttcttgcggaagaaaatcagatattataccctaagataatctggtcaaaataaataaatttggtagtgtttggataataccaaaaatagaaaagataatgataatttccaaaaaatgtttaaaataacaaaaataataataaaagagaatcataagttgataacaaaaaagtattacgaaataattaatacattatgataattccccaagtttaggagaatattgactccttgactcaaacgtctctcttatcttaatctctaaaatctctcttatctctctctctctatatatacacacacataatacccaaacgctctcaattaggttttcttctacacttgttcttcttcatttgctctcttcttcatcaatctctctctttttgtaaacggcgattttaaa

SEQ ID NO: 1242 - DNA, 3000 bp, Unknown
  misc_feature (1)..( 3000): cDNA_ID_3061287_gDNA_ID_1620375_Annot_ID_155139 3000 nt of promoter + ATG
tgtatgttaccattaatgaatccaaattcaaacggtcgacctcattgattaaaatcatagcagccaaaccacagtaggtatacctaaacaaaaaacaacttggtaataagcaaagctgcaggtgacaaatcctatttcagaaaattaattatacttaaccatcaataaccatgtcatcaaggaagagggaagcaaagcacaatttttatctaagcctcaacataatggaagtaagtaggagaccatacccaccgtgagcttcggagccaggttcccctccaatgccaccttcataagtttggcaactgctcaatataaatcgagttaaaagagctttcccagggaaattaatgaattcctgaatttacaactgtataacagtagttcagctatatatatataatgcgagataaaagtaataagaaaagctacctcaagatgtaatctcctaggccctgggtgagttcatcatccataatatttaggatgcttgcaacctgtgtcacaagagagaagtcaaacatatcagggagaaaaccagccataggatgcatttgcaacacgtgtaagtctcaaaacgagtaatctctattcaaagtatctggtgggcgcaagtgtgcaaataataagatcatatcgtaatctgaatgtgatgtttaagccatgaaaacggaagaaacatagcataatgggtccagactttgttgatctcattaatcctaaaaagttttggtgtccacaaaaacagagaaaaggaaaatagaagttggtaaaactcaccgaaattgcagtgtagcatgcacgaacatccatttctcccatatcatgcatcctaacgatcagtgagtaagtagaattaagcaagaattaaaaaaacaacatgactgaaggtatggcattaacagcgatacgaatgcataaagagtgagctgtcagtaaaaatgatgcctttaagaagttcaagcagaaagagaatcaaacctgaaacctccacttgtatccttcatccgtcttaaaaaacaagacattttttctctgaaagaagaatgagtcacatgtaagtattctagaggaaacatcactagactcttaataaaagaaactgaccacaaagaaaaaagaatgcaccacctattaattgaagaaagggctttgtcacctcctaaagtaacaagtgcattcactgcagcataagtagttgcaagatgtggaagctgggaaaaaatatctccattactagtagaaaaaaaaaggaaactgaaaaaggcagaccaaaagttatatatcctaactttctctgccatgtttggaaaatttacaaccacaaacttaaacaactaaatgctgcttgaactaaagacaccattttacgtcttcacagaaaaaaacttaaacttaaactacgtgtgctgcttgaattaaaggcatcacaaccaaacaatgagatgatgcataaaaaaaacacctaaaagagatctggcagaataaaataatctggtctcaatgtttattctccaattgcatgaaatgaaagtgatccacacactttaaagaaacagacatatacttacttggccaggaccaccaccgtatccaccttcagagccctgacaagcgacatgagaaagcaaactaagtacataaagaacaataacagataacactaatagcaacgggaaaagaaaacgtgaactaaaggagcagaaaatcaagaagaatgcaagagcaaatatgaagagttttcatgattgggtacaagcaaaaggaattgagcctaacctggcagcgtccaaggaagtcaatggcattgctttctaattcatcatccacagtctccccaagcaaagctattgaatgaagaatccagtaacaaagccaaggtcgactgttccaaaatccaaaaaagccaaaatcaaacttctaatctattggcaaaaatccaaaggggctttactctctcactggacaaaatgtactaagaaattcatgaaaacaagaagccaagcatcatgtcacttacttagcatctaaggaagaaaactgcggaccaagctgccttaagcctttcatcagataatccaattgcttatctcgctgaatctccatcctaggatagaacaacttccatatcagtaagattcatctatcgacgaaaataattctttcacgacgctactaaaattcatcagatcatgaagaaaactagaaaatcaaatccgtgagcttacatgtatttttgagtagaaacgtcgctggcgtcgaagtaattatagatcccgaacacatcgttctccaccagaaattgctcgcgctgactcacggttaggcttgaaagctcttccatcactctccgccgcgttgattccccgtgtcctccgtgacagattcgccgattgagtccactccggtcaagtctgagccctacacacttcaaacgaatcaagcgggttactactggcatctaaatttcattgccaatttggttccggtttaataccggttcggtttggtttaagattctcaaacaattaattttactatacgctttaatgtttaatctgttgcttcttagtataatttcctcttgacaaaaaaaaaaaagagtataatttctgttacgcccagaccaaaccagattcattgttttatttataagattagttagagcatccttatcaataggttgttaacaatatcataagaactatcaaaatattatattaaataaaataagaataaaaaaataaaaaagtgtgcttaagaaatgaaaaatggctcttagctaagttttttttttctttattctctttttttgtaagagccattctaatgtttaaacattattttgtatatcaaaattgtttagaactttatgtaagagttcattgataaggatggtcttagaaacttcttcctaggctaggtctatatttctttagggctatattattgcttgctcttaacggaaaaatacataaacctcgtttcatcttctccatg

SEQ ID NO: 1243 - DNA, 3000 bp, Unknown
  misc_feature (1)..( 3000): cDNA_ID_2131893_gDNA_ID_1620375_Annot_ID_155133 3000 nt of promoter + ATG
gtcgcagttgaaggatggaaactcattcttcaattccaacagaatctcaacttgatcgcgtgggaaaggaaatggtagagtgtaaactgaatcgctggtcacaaagacgcaacagaagaaacaagttatgaagaaaacggccaaattcgatttcatgatatgaagatatgaagaagaaattggtatgtatgatttggtcaattttgcagtctactcttctaacaatcatatataataaagataaagagttatatatataataaagataaagagttatatatataataaagataaagagttatatgtcacatcgcttgctaggaaaatttgagtctttcagcatgtaaatattgaccaccacatatttagttcgaccaagaccgataccaaccgggtagacagtggaccaattaatcaattttctagatactttatattgtctctacacaaacgtttcaatctagacaattatccaactgtagtcttctagatattttttcgatcttgtctgtggcaaaaagatgaatttcattggtgattctgtagccagaaaccacatggagtctcttctctgcctcctgtcaatggtaagattttttttttggacaacatcttataacataactccttaagcttgtgacttaagaaatctcgtttctttgctttggtttcacaggaagaaactccgaaagatatctacctcatggcaaagtttctagtggccggactcgaaaggactcatgctaagaagaccggaacaggaatctatgatctcgacattgacaagcgagcaatgggcaattgatctgctaaatacagacattgccattgccattggaaatcttaacatctcagatagaacagcttgaagatatttaaacgtgacagcttaaaaaagaagaagtttgaggttttggatgtgactagggttatgctaatgagaccagacgggcacccgaattcttactggggaaataaatggatgaagggtttcaatgactgtactcactggtgcttgcctggaccaatcaatgcctggagcgagtttctcatggccatactcagacaactcaggtaaatcttgaggataagaaattttaaaaagtataaggtgatgtcttaattcaattctcattacaacctttagttatatgtgtaagaaagagaagacacatattatttacaggacatatacaaaactgcacatacctggcattgtttaatgtattcatgatcatagcctgcaaaaaaacattgagcagaggaataacagtttccaccattcttagtgttcatgtgaagacatgaaacataaaaatttcctgtgatcttcctaagaatctcaaagtgcataaactcaaaatgatgacacagaaaccaaacggaaattttcattcaacggatcatagcgatctaaaagaccaccttgaacagtccttgtcccaaactccagagactaaaaattacagagaattgagacagaaatagtaacagctaacttactcaccaaccatgactacaacacaaagcctcaattgtatcctaactcttaactctagctatcataacacaattcagatcgaaacacacatcgacaaaagatgagaacataataagagaagtgagaaaggtgagattgataaatagcaattctccaactattccttagaaatatccgagttcaacagtaaagacataaaacacatatcataggaacttctaaagatatcgactttgactacaacacagagcttctatgtgttctagtagttaactctagcaatcaaaacatcattcagatagataaatagcaaattctccaactattccttagaattcaacagtaaagttcgaagctttacatagagaaattacataaaaaccaacaacaacagatcaagactccaaagtgttaccaagaggaaatgagaagacttcacgaacaggagaaaactcaacgagaccaatctccataccataaccattcaccggaagcttcaaatctctcaacacagagaaagcctcagccatacgagacttaggaacatcaagagccacgggacaaaacggaacccaagaatcaacacgatactcttcaccaatgtcaacagattctttcttcaacatatcacataactgagtctgcaactgaagaagcgatagagacggagtcggagatagaaacagtacgttgttgtcgctagagaagctaccgatagtagagaacgagatcgagattggttcttgcttggatacgaagtttttgatgacggattcgagtctcgttgaatcgaagaaggaggtggagaagagtgttatgtgtggacgagactcagtgttgatcaatttggtactgatttgacggcgagcgaagacgttccatgctttcaatacttggttttcgagtgctggatcgaagtatagctcgattgcgtagccttctgacattttattccaagtcggaattgaagatcggagatggaattgaagatggatcgcgatcggagacagaaggaagatggtggagtaagagagatcgatttactcaaaaagggaaagtgagaacatcatcaaatttcagatttggtttgtgcattttaaccgatcctaaccgaatcgaaccgaaccaactctaaatccaactttattaaattcggtttgagttcagcaacaaattacgaatctctgtaactaactaattatggtttagacttttaagatgaagaccaacaaggccaagtttgtggttttaacctaatgatggcttgggttaacataattataattcagtaattagaagcccaatatcgttattgggcctaacttcaggcccatttgtcttatattcaggcacgacgggacaatgatcgccgtttcttacaaccactctccgattataaaccctagccgcgtcttcttgcaaatttcaatttcaatttcactgagaagttacaatccagaggaaaagattatctttttccttctgggttgagggaaaag

SEQ ID NO: 1244 - DNA, 3000 bp, Unknown
  misc_feature (1)..( 3000): cDNA_ID_2131876_gDNA_ID_1620375_Annot_ID_155128 3000 nt of promoter + ATG
agaccggtgtggtgaaggagctgtcccttggtcgtcaatgtcttactagtctcaaggctaatagtagcctcttcagattccaacacctcaggtacctcgatctctctgaaaatcattttgactcgtcccctataccctctggatttggtagactgacctacttggaatccttggatcttagcaaaaatgggtttataggagaagttccatcctcaataagtaacctaagccggttaaccaatttagacctttcatataacaagctcaccggtggtattcccaatctacatagtttaacccttcttgagaatatagacctatcatataataagttttctggagccattccttcttacctcttcaccatgccttttctagtttctcttaacctacgccaaaaccatcttagtgaccctcttgagaatataaattattctgcaacctctaaacttttaattttagacatggcttataaccttatgagtcatcgaatcctagaacctatctcaaaattagccaacctcatacaaattgacttatcttttcagaagacaccctacacattcaactttgatttcttgctcttcaagtctctagtgcgtttggatctttccggaaatagtgtttcagtggttggtaccggttcagaaaatttgacacatctagacttgtcgagctgcaacatcaccgagttcccgatgtttattaaggacttacaaagattatggtggttagacatttccaataatagaattaaaggaaaagtgcctgagttgttatggactctgccttctatgctccatgtaaatctctcacgcaactcctttgattccttggaaggtacgccaaaaataatcctcaattcgtcgatttcggagttagatttgagttcaaatgccttcaaaggatcttttcctattattccaccttatgtcaacatcatggctgcatcaaataactatttcactggaggcataccacttatattctgcaaaagatatcgactcagtctccttgatctatcaaacaacaacttcagtgggacaattccgagatgcttgacaaatgtgtcactcggactagaagcgttgaaactcagtaacaacagcctcactgggagacttccggacatagaagaccgcttagtactacttgacgttggccacaaccaaataagtgggaagcttccaaggtctctagtaaactgcacaaccctaaagtttctaaatgtggaaggaaaccacatcaacgacactttccctttctggctgaaggctttgacgcgtcttgaaatcattgttctgagatcaaacagattccacggtcccatttcttctcctgaggtctctctttcatttacggcactgcggataattgatatttcccgtaacagcttcaacgggagcctaccgcaaaactactttgcgaattggagtgcacctttggttaataccccacaaggatatcgttggccagagtacacaggagatgaacactctaaatatgagaccccgctttggtcttatccttccattcatttgagaataaaaggacgaagcatagagttgggaaagattccagatacatacacgtcgatagatttctcaggaaatagttttgaaggacagattccagaatcaataggtgatttgaaatcgttgattgttctggacttatctaacaactctttcactggtcgtattccatcgtcgttggccaaacttaaacaactcgagtcattggatctatctcaaaaccgaatctctggaaatatacctcaagagctaagagagctgacgtttttgggatatgttaacatgtcacataacagactcaccggccaaataccacagagtacacaggttggagggcaacctaaatcctcctttgaagggaatatcaatctttgtggtcttcctcttcaagagagttgtttaaggggaaatggagtaccatcaacaccacatacacaagagcaagaactaccaaagcaagaacatgcgttgaactggaaagcagctgcgataggctatggacccggagtgttgtttggactggcgatcggacaagcctttgctcgatacaaaccggtcttgttctataagttgtttcgactttgagatgtattgtttcttcttcttcattttggtgttgaatcatatgtaaaataatcagtttactactctttgctttttgggctttgacgataaactaacaacacagctttgattttctggttaatctgtttcgtattagacagactttgtaaactttaaatgttgctcaaatgcttgcttgtttagtatacacactttgaactactctttctatttcaagactaatgtactctgttattttgtaaagtacttgttatattattagcttgagcacatataaaaaaatatatatatattatattttatagttttttttagattcgttaattattaatattatagattattaagttccaacaagagtgatattatttcatttagcaagctatttcttaaaacccactatatttgctgagatttgtgtatcttttattctttttaattaactataaaaaatgtaaaagaaaaatatattttctgtttatttagtgtttatttaatattataatataataattcctatgacacaggtttaaaacaaataaaatcccagtaaaaataatttttgggattataatttaatactaaacaagaaaatctatgatgtatttgctaaaaatacaaagtttaaaaaactaatttttttatatacattaaaaaaacataattttaatatttagttaaatagagtttggccaataaaaatatttactgtagttacaaagtatataaatttaaaatagttttaatgattttattttattttttgtttataacattttatattgtgaaacaaaataaacatcctaatatgaaacagaatgacacttccaaagatatgcccaattgaagcaaaagccagaacagcttttaaattgcaatg

SEQ ID NO: 1245 - DNA, 3000 bp, Unknown
  misc_feature (1)..( 3000): cDNA_ID_3061325_gDNA_ID_1620376_Annot_ID_155150 3000 nt of promoter + ATG
gaggagagagtgagagttgagcgagagttgttcggccggagaatctcgggtttgattggaccggagaaaaccggaattcatagagaaagaatggaagagaaagagcaatggcgggtattaatggagaatgccggttttgaatcggttaagctgagtaattacgcagtgagccaagcgaagattctattgtggaattacaattacagcaatttgtattcaattgttgaatctaagcctggcttcatctctttggcctggaacgatttacctctcctcactctttcttcctggcgataaccaaaccaaaccgatccggtattcttagttttgttttgttttcaatgttatttttggttagacaaatattcaattgttaatatactccgtggtcagagtgttttgtttttcttttagttcgaacgttgaattaattcaggggtaggttttgaattctctgaaccttatgtgttttttggtaacatcatttggatttgtgaactaggtttaaaaactggtcttagtcttgttgttttctcattagataatttaaactggtttgcttctttatttttggttggataaagtgaccggttctggtcatctgtttgagatgtaattactatttcataaaattaggaagttgaaagccaaatatatttgtaactactcttttatttgtaattttgctcaaaaaagtgatgaaatgtagttttgatatatgaatatctaccattatacataagtatatctgaacatggtacaacttatgaaagctaaatgtcaatacttgcaaagatataacaaatacaagttacatgaataagagatgtgtgttgaatttataagtgtcattttcttttcactttaaaacaaacttcatcttcttttgtttcttatgtgtcaaagttgccacagttgctctatttgagtctttcagtgtcagtctcagtcactgtactgattttacttttttttgttgagtgtgccaatgatgacatcactcccacgtcctccatccgtcttcttttaacggtcacgtggctcccaccctcttttctcgatgtctttaccgacttgttctagcccaacttacttgggccatttagattttttggtggcccaagttgctaaaagaggatttatcatagaaatctgaacccgttgcagcgctcaacacatgtcacagtcctgacaaacacgtattcaaatccttgttaagtcccgccacctgtcaccagagcaccacgaggcaaactctgatcaggacaccgtcgtactattatgtcggaagacaggaaagcttaattaagcttaaacctgacgtatttaacttcgttaactctaccttactaaagggttttaatttaaaacttatcatctcctcgtaagaataaaaactacttactctataaatttaagcttcaagaaacctccaaaagcagagaaatgatcaacgcttttaagactatccgatcactgccctcgaataccaccgtctcgttctgctcaacaccatctcgattaggccggaaagtcactggagttagttttgccaccacttctgatcagcaaaagatggataaaaagcctgaaaatccaaacgagaaaaccgggttcgtctcctccccatatgtgtgtagttgtttctgattcgtaatttggatgttattcaaaaaaaatttcgttctcttctttactttgatggagcagtgacgtgatgtcgcattcttatggagaagggtacgcaacaaggtctgacgaagaagggtttggaggaatctatggaggaaatcaaacacttcagaaggaaaacgagatccatgagaatcaccctggtactcagaatagttagttatcatatacacgtttattactacttatatgatcacttttattgtttacgattctgggtgtgtgtgtgtgtgttttcatgttattgaagattacgacaaaacgcaaggtagcgaatcgaaggagaaggagaaagcaaggaaccagacacaatcccactgctaaagaaaaaatgatgatttagtgtctttgttctttatgctttaataaaatcagacttgtgctctgtagttcgtagactctggttagagttttttttttgttaattgcgttttttgacccgtaacctttaccgggtttttgttggttatccttatcacttttgtaacactcgttgaattagtagtttttgttgattgttgaacattcccttaatttgactgtgtttgtttatttatgaacaaatctacggttttttagttgaaccgtcgaggaaaacattcttagataacgtcagcaatgaatattagcctgttttcggactttcgattccgatgcaacacgttaaaagtaacgtcagcgaagataaatttggtaaattcatctgaaactccaatgctgatggaacttagctggtgtgttgcgtgttcataatttatgttattagtaacgtcttagaagttggaatattcactccaagttcgcacttcaaaactttcaacaagtttttagttcttatcgtacgtctcaaaacagagttgaggagatttagcttctactgtttagtgttctacacttgcttcgtacaaagaattgaatttttatttccatagttacatgcacatatttgtattaacaatctcttattattggttagtatcatatctgtagttattcgaacactgggggcaaatttcatttaatcaatcacctaacgaggctatgatgcatgattaacgaacgttaaagccaaaatgtcaagactacccccttattatcagctcgcagttggtcaatgcctcaatggtctgaagttcagactctgaactataatacaaggtcaactcaacccgctggtagtaacgaaagtacgaaacagtcaaaaacatatcttaaaaattacataaaaaccggaaacgaagttgcagaatttacagtttctgccattgggacaatcattcgatctcatcattatccttctttctctcc

SEQ ID NO: 1246 - DNA, 3000 bp, Unknown
  misc_feature (1)..( 3000): cDNA_ID_2131990_gDNA_ID_1620376_Annot_ID_155164 3000 nt of promoter + ATG
ctatgccttccatggaagctattcttaacaattatttccaaaacatcaataagaagctcgaccgtttgagtggttctcctgctcctccgcttgtttcgaagcgttgttctgttcccaagcttgataatatggttctggttggattggattggccattggtggagctgaagaagaaactccttgacaattccgtggttgtggtgtctggtcctcctggttgtgggaagaccacgctggttactaagctttgtgacgacccagagatcgaaggtatgtatatatatgaggtgtcttaaagttttgatttttacacatgtttcttgtttctcatgtagtgtttgttacattggcaggagaattcaagaaaatcttctatagcgttgtgtcgaatactcctaatttcagggccatagtacaaaacttactccaggacaacggttgcggagcaattacatttgacgatgattctcaagcagaaactggcttaagagatcttctggaggaactcacaaaagatggtcgtatattgttggtgttggatgatgtgtggcagggatccgagttcttgcttcgaaaatttcaaattgatttaccagattataagattttggtgacttctcagtttgattttacgagtttatggcccacttaccatttggtacctttgaaatatgaatatgctaggtcccttctcattcagtgggcatctccacctcttcacacatctccagatgagtatgaagatcttctccaaaaggtattattattagtttcaacattcatgttttaagcttaaattgtcctgttagtggaaaacactagattcatcttcttttttcacatggtagatattgaaacgttgcaatggattccctctcgtaattgaagtagtcggcatttcacttaaaggacaagctctgtatttatggaaaggtcaagtggaaagctggtctgaaggggaaacaattcttggtaacgctaatcctactgtgcgacaacgtctgcagcctagcttcaatgtcctgaaacctcatcttaaagagtgtttcatggacatgggttcatttcttcaggaccaaaagatacgtgcttcgcttataattgacatatggatggaattatatggtagaggtagttctagtactaacaagttcatgttataccttaatgagcttgcttcccagaatctgcttaaacttgttcatctcgggtacgttggtgttgttttttacaacatttgtttcattgcaccttcttgccatctaccatttgatcatgaacttatttgttttacttactaccaggacaaataagcgcgaagacggtttttacaatgagttgttagtcactcaacataatattctgagggagttggctatttttcaaagtgaattggaaccaatcatgcaaagaaagaaactaaatttggagatacgagaggacaactttccggacgagtgtttaaatcaacctattaatgctcgacttttgtctatctatacgggtaattctttaagatcctcttcttctttttcccctgaaaatcatgcatagaaatatgaccaccttttttttttgttacagatgatttgttctcatcgaaatggttggaaatggattgccccaatgttgaggctttagttcttaatatctcctcattagactatgcattgccaagcttcattgctgaaatgaagaagctaaaggttctgacaatcgcaaatcacggtttttatccagcaagattgagtaatttctcgtgtctcagctcattaccaaacctgaaacggattagatttgaaaaggtttcagtcactttgctggacattcctcaattgcaactcggcagtctcaagaagctatcatttttcatgtgtagtttcggtgaggttttctacgacacagaagatatagatgtctctaaagctctatcgaatttacaagagattgacatagactactgctatgatcttgatgagttaccatattggatccccgaagttgtttcattgaagacacttagcatcacaaactgtaacaagctctctcaacttccagaagctatagggaacttgagtagactagaagtgttgaggatgtgttcttgtatgaatctctctgagctgcctgaagcaactgagagactcagcaacttgcggtctctggatatttctcattgcttaggattgagaaagttgcctcaagagattggcaaactacagaaactggagaatatctcgatgaggaagtgttcgggatgcgagttgccggattcagtgaggtatctagagaatctggaggtcaaatgcgatgaagtaactggattgttgtgggaaaggttgatgccagaaatgagaaatttgagagttcacacggaggaaacagagcataacctgaagttgcttctaacgttttaagttttgagtgaaaaaaaaaacattttcgtagcttgtgtattcttattgactctttaatgatcacaatctagactaaacgagtaataatattacaagagtcaacatgctatgtctcgggtttgatactagtttattgctctgtaatgaaattactaaccacgctgtatcattgtatgtactagtgattttaaattatgagcttttcaaatacgcatgttatattgggccgtagaaacataaaggcttaatttgaataagccgctttgaaaaaggcccaatctaagaaaggcatactctcgcacgtacgaggagagcacgttccgtctatcgaacaacgtgtggttaacgtaaaagaccaaacgcaaacgcagtcgttttccttggtcattgcgcggcaagggaccgagtctgagaagtcaaaggcgacagctttgctatgcaattcgtctccttcgtctatctacatttttatgaaccacacattgatatttcagtgatcccctttttcgattttcagcgattctacaaacaagttttttttttttttttggattctgggttttgtctgagaagtgaaagaatg

SEQ ID NO: 1247 - DNA, 3000 bp, Unknown
  misc_feature (1)..( 3000): cDNA_ID_2131986_gDNA_ID_1620376_Annot_ID_155163 3000 nt of promoter + ATG
gagtgttcctgcgcctgtttttagggatctttgttcggttcccaagcttgataaggttattgttggattggattggccattgggggagttaaagaagagactccttgacgattctgtggttactcttgtggtttctgctcctcctggttgcgggaaaaccacgctggttagtcggctttgtgacgatccagatatcaaaggtatgtattgttgatccacattaagtcttaaagtttcaatttttactcgtgaatagttgagctggtttctcatgtagtttcctttggcagggaagttcaagcatatcttctttaatgttgtgtcaaatactcctaactttagggtaatagtacagaatttactccagcacaacggttacaatgcacttacatttgagaatgattctcaagcagaagttggcttaagaaaactgctggaggaacttaaagaaaatggtcctatattgttggtgttggatgatgtgtggcggggagcggattctttccttcagaaatttcaaattaagttaccaaattataagattttggtgacttctcggtttgactttccgagttttgattccaattatcgtttgaaacctttggaagatgatgatgctagagcccttctcattcattgggcatcgcgaccttgtaacacgtctcctgatgagtacgaagatctcctccagaaggttgttgtttcattcatctagatgaacctctatacatttgtgatctacgaaatctgtaactatatcaatagattcatctttttcttttttcacatggtgagtattgcagatattgaaacgttgcaatggattcccaatcgtaattgaagtagtgggtgtttcactcaaaggacgatctctaaatacatggaaaggtcaggtggaaagctggtctgaaggggaaaaaattcttggtaagccttatccaactgtgctagaatgtttgcagcctagttttgatgctctggatcccaaccttaaggagtgctttttggacatgggctcatttcttgaggaccaaaagatacgtgcttcggtaataattgatatgtgggtggaattatacggtaaaggtagtagtatcttgtatatgtaccttgaagaccttgcctcccagaatctacttaaacttgttcctctcgggtatgttatttatgtttcaaatctatatctttgcaccttcttgccatctaccattagtggaacttatttatttctttatcagcacaaatgagcacgaagacggtttctacaatgacttcttagtgactcaacatgatatccttagggagttggctatctgtcaaagcgaatttaaggaaaacttagaaagaaaaagactaaatctggagatactagagaatacatttccagactggtgtttgaatactattaatgcctctttattgtctatctctacgggtaattctttggggtcttctttttctgaaaattaaacttaatgattatacaaatctctgctgtttctagaaatatgacttctctataactatgattggtctctctttttcttacagatgatttgttctcatcgaaatggttggaaatggattgccccaatgttgaggctttagttctaaatctctcttcatcagactatgcattgccaagcttcatctctggaatgaagaagctgaaggttctgacaatcacaaatcacggtttttatccagcaagattgagtaatttctcgtgtctcagctcattaccaaacctgaaacggattagattggaaaaagtttcaatcactttgctagacattccccaactgcaactcagcagtcttaagaagctgtctttggtcatgtgtagtttcggtgaggttttctacgacacagaagatatagttgtctctaatgctctatcgaaattacaagagattgacatagactactgctatgatcttgatgagttaccgtattggatctctgaaattgtttcattgaagacacttagcatcacaaactgtaacaagctctctcaacttccagaagctataggcaacttgagtagactagaagtgttgaggctgtgttcttctatgaatctctctgagctgcctgaagcgactgagggactcagcaacttgcggtttctggatatttctcattgcttaggattgagaaagttgcctcaagagattggcaaactgcagaatctgaaaaagatctcgatgagaaagtgttcgggatgcgagttgccggagtcagtgacgaatctagagaatctggaggtcaaatgcgatgaagaaactggattgttgtgggaaaggctgaagccaaaaatgagaaatttgagagttcaggaggaggaaatagagcataacctgaacttgcttcaaatgttttaagtgaaagaacgttatcgtagtagcttctgtggatcttgtaatgtttgttattcattattttcgttgttatatacattataatggctactgagtccaagtacagagaaaatgtcatgccaaagaattttgtgtaggtcaatcttttaaaaccatttaagagtactactaaatccttgatccttatctaacttgaatagatttgaacagagttattcaccaacatttttgacaaactataaatgtaatattcaacattcttaatgttaaaaatataatgttggtaaattctttgaaaatcctaaaatgtgaagtcaagtctcctttttcctttgctagctaaacttctgttctgggattcaaacaatggtttgtttgaaacttcaaagtaccgcgtgacttttccgttataaatttgatctaatggcttttatgaagagtcacgttttttataatcaaagaaagagtcggtcaatagattaaaatttctctcaaattgcttggttttcatcttaattcataattctcctctcccttcataggaaccattatgaattcgaattcgattcaaagctttgatgccttgccccacaatcttcgagagtgtttcttggacatg

SEQ ID NO: 1248 - DNA, 3000 bp, Unknown
  misc_feature (1)..( 3000): cDNA_ID_2131994_gDNA_ID_1620376_Annot_ID_155165 3000 nt of promoter + ATG
tgaaagtgcttgataacccaacattggagattctcaacatgtaagtcttccctgaaagattaaaccaaagacacagagtaaacaccagaaaacaaacacaacctatttactcaaaagaacaatttgtggaaagctgagaccttggtcgcctgaaaacgttgattgggtttgtccatttataagcatcccatcgggaaatggaagaaccccaccagaatccaaacgctgttgaagcgttttgtggttggttttgaaccaatcaccaacgagtaaagtgaaatctgcggttgggagagggtaagggattggaattccaggtcttgcgtagacattgatggctccgaatccaccggcggctttgtgaaaagcagtggaagggaagtagttgaaagttccgatctgatctttggtttggaatttgtaagtgaagtttgagtttggttggatcggacagtttgttcccaaaacaccatcttgccatgagttcttcctctgcttaatcccattcctaaacccacaatttcgagtgtgaacccaattagcctaaacctttaaattgatcaataaagttttcagctttttcgagtttaaccactaatgttcaaatctttcagaggactaatccacaaatgccttaaaaggtaacacaatatacattgatcaacagggtaacgcaaaacagaggatttcttcttttggaagcatttgaaaatgataaagttcaaatctttagggtcttttttttcttaatcagaaaaaaaaaggaaattaccaggtcaagaggaaaggctggtcaagtttgttgatgaggttgaggatgatgttgtcgttggtcacaacttcaagttttggaccaggaaactgaccattgatgagaataacctaaacagacaaacaaacaaaacatccataaagagtataaaaggtcttgactcttgagtatcaaacaaaaatgggatacggagtttccataaatggaaattgttgttgttgtttgtacctgttgaggaacaccaagaggagagataatgccataagtcacagtccaagtgtaaaacttgtaagggctttctcctttcactatcaccaaactgctcaaaagagtcaaagctccaagaagaagaagatgattaagcaaggatgttgtttttcttgatgccattttcatggcttccgtaaagaatgatacagacaaagagattgaagacagctaagaactcttcttctaaatggggtttgagaaaatagagtaatgtagggactttggtctataaaaagtgcaattagatagcgaaagttgtgggtgacataagtaagtgagagaagaaaaaaaaaggagtcccaaaggtggttccaatcaatgacagtgaagatctcgagtgactttattttattgtttttgggtttggtcaaatataatcataatcaactctctcataaatcaacttcaacaacttttaaatttacaccctttagattttaaacacagattatattttatgtcagaactatgaatcttatacatacttgtcggcagatttgatctatatacattatccattatcattcacatttgaaaatgctggtctggtttgttgtaaaagtataagttttggtggtttggttgattagtgtaaaataaaataaagttgttaatgtgagaaaaagtggtagtggataatgcggtgagaacggacttgaatggtttcacgcgttttggtttatatgattattgcttccagccaaagcttagctttcattattcggataacggttaccataaaaagctaaatggaaatagtttaaaactagaaaacgaaaaaggaaaaagagtcagaaattgaacgaaagacaaacaaatcaattaagaaagttttttgtttatttttcttggcactaattaacgatgtttctggttccctacatttaaaaaaaaaggtttatgtatggagtattatgcttttgggaacgagcatctgttgtgaattgtgatgggctcggcgttgagctattgaaagctgtgccatttttgctgatttactgcaaatctgatagaaaaagataatttttattttatttgttttgtttggatgaattctaatgttttaaattgtaagttgcaaaagttgacaaaagaaactcgtggttgtgaaattagtcggtgtaatattatggtccacctattaaaatgttttcaattatattattaattacatatctaattagtatgatgaatgaactcaccgatcatatcaaaggtccatccatgcatgcagatcacaatacatgagaaacgacaaatgacgttagaagaaatcgaatacatacatacatgcattgatacataagcaacacaatgatgtatccggcatgattttatatattagaacaaaagatgaagcatgtgaggagtagttgattaggcatcattttcttaattaattaaactatgaaccactaattttgattatgtatttattcttaatagactcttaatgatcactgtttagactttagactaaacgagtaatataaaagagtcaacatgggcttgacccaattccgacatgtggaagttctcacaaataatggacagtcacatgctatgtctcttgtttgatcatattctattgatttatgagcttctcaattatgcattgtttttatgggcccatataaggtctatcaaaatgggccgtatgaaggaaaaatatatgtatcaatgggcctgaaacttttgattgcaatgacgtaaagaaagatgacgtcagaaaaaaaaacattttgattgcagtttccaggcactgtgaagtgaagtcaactacgagattgctttgcaacaaatctaaagcatctgatatagtcttccttgtctaaatctttctcaacatgttagattttcagtttctacagacaaatctgtgagctattttttcattcttggttttctctgttttggcaaattttggaggaaaggaatctgaagaggaaacaagaatg

SEQ ID NO: 1249 - DNA, 3000 bp, Unknown
  misc_feature (1)..( 3000): cDNA_ID_2131961_gDNA_ID_1620376_Annot_ID_155157 3000 nt of promoter + ATG
tatttgaagattcttatacaagcttaaagacacttacatttctctatcttaaaccccaagaaaactttaagaaacagagagagacttcttactattatttttgacttgattcttgacatttttgactaacaaaaactcaatcatcatcaatggcaaaagctctgttcttcaatttctgcatatctcttcttattattgccatacttgtgagccatgaaatcataccaacagaggcaagacacttgaggacccatagaaagtcaatcaagaacagtactcttactgtacacgaaggagccggtggcttgagaaccggtggtggctctgtgaagactgacattagcaaagaagaacatggcgttgatgagttccggccaacaactccgggaaacagccccggcattggccattgatccattagaacctaaataattacaatatttacaaacttgtgcatagtgtaccaagcttaatgtgtttgtctttctgatattctcttctcttttcgtttcatttttctttttttttacaattattggttaaagtgtattatatcttgtaaatacaatcaaattattattcgtagcaacctacgttgggaattgatgtttttaattaggtttgctaacataagaagtcatatacggagatggaattacctttaacccaaatgcaagaaaaaaacttgctaaaataactcaagtattacttaagtaaccaatttatagcggtaactcactaatgttaagagattatatatggttcgaatcttcttagtcatggtcgttgttagatctatgtagatataattcaaattcaaggagacaaaataagatgtttacggacaaaaaacattccgtaaatttatttattgttgttgacaatgtaaatatttcattaaaatgaaaagagtttggtgatctctacaaacaatacaaaaaatctgttaggtgagcactttggagttgagtgagtgatgtaaaaagtaaacattggttgatatctgtatatactactactccacacgtgtgactaaagctcggtcgatcttttaaaagtaatttgtaactacaaaatcaaataaaataaaatatcttcggaagttcttattcaaatcttctttattatttgcaaagttgctagcatgcgactgctgtacatatgctttccatgcttgagagtctgaaagacatgctaaccaacacagaactagaaaaaaaaaaaaaaatacctttttctgggccgtattaaaaagtgatggcccgttaattttccatcaatatgagcatctagttaaagcccattagttgtgcacaaaaaaaaagagttaagcccaataaaggtataatcgaaacccatttatacatcctccacttttttggtttttttcctctcttcttttttccttttaacatacatccttcgttaccttcactattcagtgtctgtaaataacatatataatatcatcataacaatattttttcaacttctcttatttataattccatagtttgtttgtttttttttatggtaaaatacaactccctagtttatatatttttttttttcccctttaacttttcattttatcaaaaaatgtttttaaaaagagtagaggactcataaagcttcgtacttgttttatttatataattaataactcgtatcaatgtcaataactatcatccatcccttttttcttcctagttcaaaaaccttttaatattgtttgtataaatatctagttatctactattagaccattaatacaagaaaacaaaacttttaaactgtaaatagtggcttgattttgaatgacgagacttgtatgtatacgagtggggtctagaatattagtcgctgtctagtacatggtttaatggttcggttggtgcaagtaattaattatgagaatctttgcttattttttaaaactaataattccacaagtaaatagtttaatacgtcaattatatatgtctttgtctaatgaaaattttaaaacttccacttaattctcagccgtccgatcatccaagatgtgaccttttcatgggcctagaaccgcgaatcgtagcaatgtgggcaacacgtcgagaggaatctcttagacgaagtaaacgccgttagacttcgagattccccgttattaactccgttagtgaggcaaccgttggcaattgtaccggaccgtaccggtttttgtcgtcgtacgcacacaaaagtccaacacactcgcatagcaacccaaacatgtgtaacgccgattttgcccccaaaagtctcatacggattctcatgccacgttccaaacaaaagtatttggctttttctttacttttcttttttgctattagtatattttgtttttgttatatcattttaattacaccaatttaccacgaatctcgtaataataatagtataatactatacacataatagttaatatctttatcaaatttaataagcttttaaaatatttttgatatataattcattgttctgtttgtaaatgtatttgtagctcactctgctagtaaaattaaattacagctttagccaattgaactacaaagtttaccacttgaaatataaataaacggtaagtatatgtaaaacaaaataaagtagaaatacaatcacaaaaactaaaaatttgtcttaaaatgtcattatgtaaagaccattttaaaacaaaaaaaaaggtaaaaagaagacgactgaataatattacgaaaggacccaagccaaaagattaacagttaggtcataagagaagggtaataaagtaatttaaaggaagagtatgtcatcttgttcctctcctttaattttccagtctattggtcctcagcctcccttctccttcaggtggcgttgctctctcgtccccaagaaaatcgcttcttttatttttttgtttactaaatcttcacataatctttttaaaaaaaaaagtcctaaatttcagatgattcgatgttcttttcagac

SEQ ID NO: 1250 - DNA, 3000 bp, Unknown
  misc_feature (1)..( 3000): cDNA_ID_2131969_gDNA_ID_1620376_Annot_ID_155159 3000 nt of promoter + ATG
gtacttcccctcaaggtattgttagcttccactcatttcgatttcaatcgcgatcgtataatgaatttagtaaaatgcagatgttgtgagtgaatttggtgatgggattagaatggtttggtgtttctgttaggttcatagagacgaagaaactggaaagatacttaatttagtattcgtatgggctgatgatggggagaagttgaaggttgatgttcctgttgttttcaaagggttggatcattgtcctggtctccagaaaggtaactgtttcttcttttgttcgcatcacttgccttttttgcagctagtttcacaggttatgcttactgagaaatcatgtagaactgataggagtagtattctgtgtattggccttgatactgatgagaacttcgcagatcggttttgtctttgtttttgcatggctagtgctcatgtgcttctgttttactgctatccagccattattttgatcgagctaagctttgtaaagagaaatctatcacttgtatctgatagtaaagtttgcattccaatggtaaaaggaactaagaaaccagatatttgatgtgtttgtgttttttctcatcggtgtagagcaaaattttcacctttttcctcattgggtaacatagactagtttcatgaatgttcctagtttaaatctgatcgtctctgttactgtgagcagggggaaacctgcggacaatccgaagcactctgaaactactagggccagctgagcacattccatctaaaatcgaagtagatgtgagcaatctggacattgaagacaaagtgttattgcaagacgttgtatttcatccatcattgaagctactgagcaagaatgaaaccatgcccgtgtgtaagattgtcgccacaagcccggtgaaagaaccagaagctgttcaagcataaaataagtctttgaaaagagtaatgtaatgtctctctgaagtttctgttccatacaaaaatgatcatttgtagaattctcagaggaaagaagcagatttttagaataaccctttttgtataaacctttcaagtggaagaacacttaaaccctctacttgcctttgggtttttgaacgacccagatcaattttttttgcatcgttaagtatgttgttacttcactaatatccaattaaatgggtttggactagctgatagcctgataatactagtgagtaaaaatcatctcgtatttgaatgggtcgtacttaagactacaataagagccaacgacttggtccataacagtggtaactgggacgacttggtccagaacagtggtaactgggacgacttggtccagaacagtggtaactgggagtctgggactaagaatgacacgtgtcgtttgttgtgaccagataaatttgccacgtattatttggtttattttgaccgttgacgttttgtggaatcttgccaaaaatgtagttgaccttcggaatcttccctcgcttgaactcgaaatttccatttctttctttttttctcctttttctggttcattttttttctgttattattttttttggtgggaaattcttagtaaataacagtcttcgttaaaaattcaagaccgaattttcatttagatccgtttcattcgtatgattgtttttacatacagcatgtgaaatcgaattcatatggtctcatttttcaaattcacggttatatccaaaaaacattttacatacgaatttattatattcggatagatctccgtttcaggaagaaatgaatattccagctgctttttctagctttgactgatctatacgggacttttacttatttagaatttttctttccgtcaagtatttaattttttgtaattctgttgcatttattgtggtttgtcattgaactctagatcaaaaattggaaaagatctttgaacggaagcatcctgcggcttgcgtattaccaccggatcagaatagaaaacgtaaaagtagagtgaatatatcagaaatactatactataaagtgaaataaataaaaagcttgttgacgaaaaagtggcttaacttaactaatgactaaggttaacttggacctaaaccacgtttaaattttagtcaatgcctcgagatccgtacagtacggttttacattggagtcggctttacgcttgcaaattgacattttctcgcatctttttctttatatttcctttcacatcatagacttttagtagtatatttttgtggtaaaacttttgcagactttgtgtgtgtgtgtgtgatgcttttatgtaaatgaagaaacaatctaatgctataataatgtggatgatggagtaggttcatgacaaaagatgaactttgaaaatgaatagaaaaaattaatgtagagacaaaaactaagaaaagtgaataacgtttgtagtaaaatatattctacataaaataataaattagaaattaccacatttattttagtgttcatatatgatatataccactcacaaaatagtttaattcaaataaacttctaaattaactttttaaaattaatatacgaatttaagttcagatttacaaattactaagtcaaatatggtcaaatattctaaaaatgaattttcaaatatatatacttttacagtggcgaaaatgaaaaagaccagaaaaagccgttgcaaaccgtgtcacgaaaactcgaactaaacccgtaaaccgcctctaaaagataaatttcccaaaataaaaagaacatatttggtcctaataataaaaaagtaaaataatcatttattcgttcttctcctcgttatacttttttttttctggttttgtttttgttatttctgttaaatccgttgggttcttccatggatcctcatcgtcatcgcctccatctccgtctttcttcttcttcttctgctcgattctaattccgtaagagagaaataataaaggattcatgttcacatcttctacctgatgagcataccatgattctctcgctatg

SEQ ID NO: 1251 - DNA, 3000 bp, Unknown
  misc_feature (1)..( 3000): cDNA_ID_2131973_gDNA_ID_1620376_Annot_ID_155160 3000 nt of promoter + ATG
tctttgtgacaattcagtccaacgtccaattattgaatcaaaacttagatttgtatttgacttaagtaatagtagtataaagttttatgttattcacaaatacagtacgtactttcgagtaagatgattaaggtcacatgcccactggagatggaattaaagtgcttcgttatgttcaacacaagtctaatgttgcacatggttgtgttttcatcactgatacaaatacagtacgtattttttttgttaaatctatattgcgaaacttataattaattgcagtaattcagtcaagttttcttagaaaaaacttcgttaaataaatgtaagctaagcattcattgttgatataaataaagtagtaaatttatatcaaatttttggccattagtaggggtattatcgtagttacagacaaagcccactatgagttgccgcacgtgcgccagaaccaaactatggagttccaaattttcgtctggtctcatcaattcatttattaaaattttacaagattcaaaacaaaatggaaggatttagatgcccttaacatatgtatccatatgcaacgtatatgattaaagcggatgattcaaattcttaaatttgttgatccacaaaattcgataatccatatattttagttaggatttcaatttcaaactttatgttagtgaataaaacgaataatatcaaaccttgtatcaatgagctcaattcattggttgcttatatgataaggacacgttcacgcgtaggcatttttaacttgcaaacaaacatataattttcacaataatctttccatgaaaacgatcaagattctttttcaaaaattagatttggatacttttaaaacttcgactattaatgtttttaacaaaaaacaatcgactagtatttcttatatcagatttacagaatatatttatacactttaactaaaaatgatgaggaaataagaatacaaaagtcatagtgtatatagtttagtttgataacgcttaggtcagaaaatcattaaaaaaccaaaagtttcaagggtgcacaaatacccatatagaaaaataatagagtattggttttcacttttctcccatttgtatcgttgagttttatgaaacctaggcaaaaaattaacgtagaaacgtagaaaagttgcatacgaaaaatatgtacaaggaaaaagggattggcgttaaaagttggtatacaatggcacttttcatacgtactcgtacgcattatactttcctttttttctcgtacgcattatacattttaattagttcttttgataatatttcacaaaccagttttgggaaaccttcactgcaaaaaacaatcttactatagaaaactaacaataactagaaaacatttgaaaagaaaacaaaaaaaaatctacgagttgagatccgatctttaagacgtggacctctgaagactatatactttacatacaaacttgtttcattcgtgcaaatccgatggcattgctgtaataaactattgagagtagaacgacgaaaatagagaaccaattggatgacgtcatccatggccaatcgaataagacggaagtttaaaagtaggaacaattttaagaagagacaaaaagaagataaatgaatacatcatatcatcgctctatgaataaataaagattttataaacaataagaattatataaatttaatgatgcaatataaaattatataaattaacgaataatttggttatatatacatgtttgttgaacatgttcttagccaactaaataagaaattaaatagcacaactatttctatttttattttaaatttactgttccattttttttacagttgttttaaaacgtactatagatatgcttctcgactaattttctgttctaaagacgtatatttttgtttatgagtagttatcctgtaaatatgaatatttgtttttttttgttttttcgttattctttcttgtggcgtgagacttgttgtggttgatatctaatttgaagaaggaattgagatataaggtaaaacactattcgttcgtctcattctaaaacaaatatatatttgaaaggttaaaagttagaaaattcgttgggtttgttatatattattgtcagcatgttgactttgttatttgctatgatagacattgtcacgtgcaatggaccgtctcttatttgcatgatattattgttttttgtgagtcttattgtaatattctgattgtctcctcccctctagactctagttacagtcttacaaaaacaactaatctgaagtgtgaatagattagacggtggatacaatataatcatatgaaataagcataacatatatagctagctattgtcaacaaaacatcaattttaccttgcaaccatagaaatgttatatatataaaaaagggtatgaaacacaattatcatgagcaaaacgagaataatagactagagagggttgaagtcacgaaaagaaacatataaaaataaagtaatattggttggtaagaaaataagtcaaaattaaataatcagagaaggtatatggagtatatggacatttgcatctttggcctatggacgtatatataagcttagcgtgtgagcaactgcatactgatacggttttggaaaaatcataactaagacaatgaaagaatgttgttattacgaaaaagacaaaatgcacgaccaaattattcgtgatcatattaatcgacatattattgtgtagttatatatataactggataacaagcaaatttcgattaagataaatcaaaaacgatctcttgtctttttacattctaacccaaaaaaaaaaaaaaagaaaaaaggccgaaacaatgataaaataacactatgggccaataaaagcccaatgtatatagtccatagaaagcccacagagcttaaaccctccaacgcctgagttttgaaggaaacaaaccctaacgtcacatcgaactctaaaccacactgagatg

SEQ ID NO: 1252 - DNA, 3000 bp, Unknown
  misc_feature (1)..( 3000): cDNA_ID_2131982_gDNA_ID_1620376_Annot_ID_155162 3000 nt of promoter + ATG
ccggataaataattagggtttcgatatttgtttcatatagttttttcttttcattttctctgcattttgaatgttctttatttatggtatagtacagttacagtggtacagaggaggttttgctctttatatataacatttaatgaaaaagccttgtcatttcttcaataactctcctgctcttatagccatagcccatatttttaaactacttcctttttgttggattctctgaacaataatgcattaactaacctagttattattaataatttagggtttaaaagaaaataaatcgtggtgggtcacatcacttcaccaattcttgatatggtaattatttgatatatgttggctttgttctacctactagagatgaaaaagagaatttgtgtgtatcagagtctaagatttgcttacacctttctgtctggaaatcttttaagtgttgtcccagaagatgcactttatacttgcatgtattatcaatttagcatcaatcgcatcgatcaagttctttatattaataatattgtttcttaagtctctcttttggttttacttatatttcctcgacttttcttgcagttggaaactctgactttgctcaaggcattatggacgcaatcgagtttttctttcttcctgattttgtcggacgtccaacagcgaaaagacactcaccacgtaaaagtcaaacgactaacaaagaagtcagcttatttggttgattttgagtcctgcagacagttttggtataaagtataaaccaaaggcctcgtatcaatttgaacaaaagatctccactccatcccgaaacaaatactaccttgcttttttttttctttgtaccctattaatatttttttgacatttcttttggttcaagtaaaaaaaaggagaaattagtgtttttggttgcaaatctatttgtaaattagatgtcaagagaagtgttacttgccctagtggtttatcacatatccgacgtcaaccggaaatattaaattaaaaagtatgaataatctatctttgtatatccgcatttacatttttttttgtttctggaaaagtatcgatcctgttatatatacctaaagtttaaaatgcgaaataagaaacaaaaagagtttagtttatgaaaacattatcataatgataccaaaaaggctaaggaaaaacaaattacaaaaaggctacatcattttttaaaagagagtgtgtgcttcacatataaacaaggaaacgcatataataatcatcaagtagctagatgaagctaaagaagtagttaagtgtgaatgcttggcaattaagattgtgttggttcatttattaacaatctttgaccactcactaatttatttttggctctctcttctatatcatcaccgttttatctttataaaccatccctcaagactctcccaatattacatgatgtgtttaatcctcacgaattcgcatgaatcaaaaccggctgaaaaacagatgtaacatttaagttaacatactcacaccaatctaaattattagactttcattcactttaacacatttgtccataccatgatgatcataacaatcagtagctaaatcaatgtgagtgtggcttagatatttgatctgaatgattcatgagaaacatggatacttaatgttcatgtgcatgtgcatataatagtatattaatctcaccagtaggatgcttagtatagcaataaagagaaggtggtgaaattgatgagcatcggccattaaattaagcactgacccattaattgcgcacttacccataaacaccattcactccttttcattaacttaagagtaaaattatacatacacctcgctatctctaacactagtcacactagtgtaccttcctcggtactcttatcaatgtctcgtgtcgcaataaatccatataaagatttctaactaggtcaatccaacatccaatttaatacaacagtccttagtagattctaatttaagtgtgtctctatatatatatggaccgacaaaatcaatgacctaagatttgactatatatttcatgcaaatatgataaaatgctattcatccaattaatcatcaatattgtaattgggctggccttttgcttatatctttaggcattttctttaacaaaattagagccaggcccatcaattaaattgaaaaatgcttagaagttgtcacgtcactgtccatgtcatccatggtgggattgggctggcctaaaggacttttctatgtaaaaattagaggcaggcccatcaactaaattaaaaaatgcttagaagttgccacgtcagtgtcaatgtcatcagtgtctatttctaacgccgtcaagtaacggaataacgcaaccgaatattctttcatcacatggccgcttctgcagcacgtgactttcaagcttctgttttccttatgaactaagtttttctgtttcctccaaactattttttttaattagaatatcttgttatttataacgaatatatcttcttcttttacttatttttaacacaaatatttatttgtttgatacgaattctcaaaatgagaaaaacgaagaaaaatagaaaaaaatcgaaacggataaatacagagaatttagagaaaaaaggtttgtattttaggagacaaggacgagtgaagtcgtgctttttctttttttatttcatgttaattttaatatttttgggttatagtttcttaggaagcaacatcaatcatcaaaacgcggcggctcttgtcgtatcaaagcaactgaacgttgtcgttttgggacaatccttatctcttggggcaaccaattattgccttttttcttcctctctttccttattcgttctcttcttgaagatatttttccatttattttctcgaatcttcttcttcttcctagattccagcgacttaacaacaacaacaacaacatattctctgctgggtattagattcgaatttctctttttgtgatcagaa

SEQ ID NO: 1253 - DNA, 3000 bp, Unknown
  misc_feature (1)..( 3000): cDNA_ID_2131965_gDNA_ID_1620376_Annot_ID_155158 3000 nt of promoter + ATG
cagatcagaagcccacaacctagcagaccatcttcaccgttgcattcggttgatagctcagctccaccgcgagatagtgtttcctcacctttgcatccgaggttgtctactgatgttacgaatgggcgacgtgattgctgcaatgttcatcctttgcctctccctcctggagctacttgttcctcttcatcagctgcttctgttccgtccccgcaggctcctctcaaactggattcattcccaatgaattcccagtggaagaaagggaagctaataggtcgtggtacttttggaagtgtttacgttgcaagcaacaggtagtcttttctctctatggtatgatctttcctacagtttttgagtgccaatatgcttcttcttttttagtgcaatcctgagttgtttttcatttgcagcgaaactggagcattgtgtgcgatgaaagaagttgagctatttcctgatgaccccaaatccgcagagtgtataaagcaattagagcaggtaacctccaggagagacaattctcccagtgctctcagtcacggctgtgtttggttgttcgtttgttatatatcttatagctttctatttatttatttcaggagatcaaacttctaagtaaccttcaacatccaaacattgtgcagtattttggtagcgagacagtgagtaatcaatctgtttatatatcctctgtttacatatatataatctacctacccaaggcagtgtggctgaaaattcattgagcaattctctgattgtgcatgtacaggtagaagatcgtttctttatatacctggaatatgttcacccgggttcaataaacaaatatatccgtgatcattgcggcaccatgacagaatctgttgttcgcaattttactcgtcacattttgtctgggctggcttatttgcacaataaaaagactgtacataggtaaagtcacaatattactgtaatcaatcttggtgaatattgttctagtgttgaacctaagcatattggtttccctatttttgttatcagggatatcaaaggtgctaatctccttgttgatgcttctggggttgtcaagcttgctgatttcggcatggctaaacacgtgagttctatatcctgtctagtattattgctgcttattgtcttttaagtgatgagtcgaatgtgaatatcatgctctttgtttagtttccgttttataataataaagttgctatttatattcttcagcttactggacaaagagctgatctctcgttaaagggaagcccgtactggatggcaccagaggtggtcattgttctatgatctttgaaataaactagactctataaaccctatatatatatatatatactaatatatacgtttactcacacagctcatgcaagctgtgatgcaaaaagatagcaacccagatctggcttttgctgttgatatatggagtttaggatgtacaatcattgagatgttcactgggaagcctccttggagtgagtttgaaggggtaagcatacacatatgccttctactaaagagagttttttgtttcttctgatatctaaaaagttctttgtatcaactttgccttatcataggctgcagctatgttcaaggtcatgagagatagcccaccgatacctgaatcaatgtcacctgagggtaaagacttcctgagattatgcttccagagaaacccagctgagcgaccaaccgcatctatgttgctagaacaccggttcctaaagaactctttgcaaccaacctcaccaagcaacagtgatgtctctcaattatttaatgggatgaacataacggtaagcaaaacctcaatacaagcgtgaatctctctcatggaccgccctatgtcataaataacaaaatatcccccccctgcaaattgacaggaaccaagcagtagaagggagaagccaaatttcaaactagaccaggtcccgcgagctagaaacatgacatcctcagagaggtaatcaatcattcatcacagttacattggcataaagttttgttttttgaacctgaaacatgtttgtgaaacctgtgttcttgtttttgcctctctgttgtttgtttgtgtgtgcttggctttctacagcttcttcacacgtacttctttttctccagtgaaagtgggcaacagcagcagcaacaacagtaccggtctcccgatctaacaggaaccgtgaaccgtctgtctcctcgttccactctggaggctatcccaagcccgtgtccttcccaacgacctaagcccagcagcagtgacaggagaagaacgggcgtcacttcagatcacctttgatttgcagctcgagaggttaaccaatagaagctacttctatacgtattcttgtacacgtaagtgtatgtcaatgtacgtatttagagtttggggtcgcgtgggggaatacgattgggatgaaatgaaaatcctgtgggtggtagatgaagaatattgtgtctgtaaaattataattcaatgttgaatcgatagaagaagcttttttctttcttcctcttttttttttttttttgcttgagagagttgtgtataaattattttaacgacgtcttgtgtacctttggtttcgggtctgtatccacttttagatttagatccatttaaaacaaaattaatctctgattaaaagtttcactttttttctctcgaatctttgattatgatgtagttaatatggaaagctcccgctggatttaaactgacatttataaattaaattattaaactcaagaaatatagattaaataaataaaaatttgtgattggtgaattcaaaaactggttatatattgtaaatacttaaaactagaaagtgaatcgtgtaaaatatccaacctataaggctacccactatcaaattcggattcaaaaaagggaaaataaatcagagagccgtttgatatttcttttgaattgtatttgtggtgattcctctgaacagatctctaatg

SEQ ID NO: 1254 - DNA, 3000 bp, Unknown
  misc_feature (1)..( 3000): cDNA_ID_2131947_gDNA_ID_1620376_Annot_ID_155152 3000 nt of promoter + ATG
gttatgacaaaacatcatgtcatatgtactgatgtacacggtctgacattttggcaatgcaaatcacttcatattatcccgacaataaaaagctaaaatgaaataaaagaaaaattaaagttgcagttaagtgtgttaccaaacattaaaaccaattaaacgcaacacaatatgttgaccaaacaaaatctaaaaaaaacaccattcagtaagaaaaaaaaaacgacccaatatacaataaatttaactattatatcaaaaaatattataatcgacgatcaagacttagagcatgttcataagtgatactcacaaagtatcattaagagtttttttagtattatttataatgtttgtttaataaatctatataatattttttgtttttgtcaaatgtgaccaatcagaagaagtcacgtcagatgatattggtatcacaaatattagtgggctgatactgatcaagaatattctaattgctttactaatataaaaataatttttggacttgtgatactctaaaaatatcacccatgtacatggtcttatatcctcttgacgaaaaaagagttatatcctaatgtattatattaatattgttatcgcgtcgcaactctaattcagatatgggtaatagcttgtgtgggaagtgggagattttttcatttggactactgaaattcaaatactacaattcacatagtcgagagtttttaaaaaattatatgtttgaatatctgattggtatggaaaatttctagatacatacacctatttatcccttaaaaaagaaacgaaagaaaaaacagttccatgtgtttttaatttagcaactgtatcggagcgtgtctcagcagaaattcttgggcctatttttgtccaaattccaatagccgaacagtcaattgacacgtgtataagacatcaccatcccaagtaattactctctattgtactgtacagattggtttgatgataaatattcaaatatatgccaaacagtaaataataactaatcaattttttaaaaaaaaatcaacgaatattttctttcataataaaaaccctaaataaggaataacaaagtaaaaaaacaaagtttttaaaaaaagatataataatattaatactattttggttattatggcttcatcattgatcctttgtgcataagaactaaatgagtaattgagtactatataatactgcacaaggctctctctgtgcaattgactgtccctaccaaaattaactctctctatctctctctctttctttctctgtgtaagaagagtctttaaaagtgagtatatttcgacacaaacgagctctgtctgtaatggcatgcttagaaatgtacaactccaatggtggtggtggaactcccatgagtcctagaatctccttctctaacgatttcgttgagattaggccagagacgaccaagacgacgagatcaagccctctctctaaacaagagggttcttcttcttctttttcagataatttcgagttctctgtctcaaactacacaatgatgccagctgatgaacttttctctaaaggaaagcttttgcctttcaaggaaaccaatcaagtccagagaactttaagagaagagcttctcgttgaagaagacgaagaagaaggtccacgtgatgctaccaacatcttctctctcaagccaccaatcttctcatcatcttcttcttcttcttcttcttccaagggaaggtggaaagggcttttgggccttaagagggcccatgttgggtctaagaacaatgaagagcgatttgttcatcatatgattaacaacaacaaacaatctcaggtactttctctgatctgccttggatttgttcatatatatgagcatggtgtcgatgaaagtcgtgtaatttgtttttatttctcttaaatacgttatgtaaaaatacactttttgttctcgaaatgttcataggaagcaattggtggaagagaagggtcaagttgcagggagatgaagaagagtatgtagagcttaaaaacaaaaaaggctttcacttggtttttgtttttttaggaacatggctgcttccaaatttttaaaaatttagatttatgttaatcttagatctgaaaaattactaaaaaaaaagacacttatgtgttgttgacggagatggtttatttcattaactgttttccactacacatgtttcatcgattcttctgagtttttatcttgttttttctttttcttttgaagggtgtgagtattagatctatctttgtcgactatttggaatggatgtagtttttttttttgtcgttgtacaaaagaaaaaaagaagaacagagtgtgagtagttcagaaaatttaagttccagttgttttttaaaattgaagcaacgcatatgtctattgtcttcgtctttagacatctcttgtctgtccattcgttattagctattaccattcaactccaacttctctctcgttgactgtgttatctagtgattactatgcctcagagattcagaaatatgtcatataaaaattactagcgtttctttattgcagtttccccatataatggcaatgcagcgagaaatttacatggtttcctaaaatattgaaaggcccaaaaattattgtttggtcttgttgggcctgaaatggaaataagcaaatacatattcatatttttttattttttttcaaagaagatattcgatatttatcaactgatataagataagctattgggcttctattttaacagttgtaacccgccagtaaaaaatgcgctagcttatattattaccgtgactcgatctttcaaaatgccacgtggcatttattatgtggatttggattttctaacttgttctcctcacgaaacaaaattcacccacacaagacaaagcgatcgtcgatcccacccacaatctaagatcgccggccgattctcgtcgccgacaaaagaagaaccgaggaagaggaaagcaact

SEQ ID NO: 1255 - DNA, 3000 bp, Unknown
  misc_feature (1)..( 3000): cDNA_ID_3061416_gDNA_ID_1620377_Annot_ID_155174 3000 nt of promoter + ATG
tggtgcggcttgaggagaagagcgtggggatcagagtcgatgtccttgttgggagacttgaccaacccggcggcttcaagagctctaaactgtgtagcagagcttcttaccagttggtaactgtacgtccatatgtagaaacccccgagctgcccttgacaaaaattaatcacacgatcaactcaacaattaagtctgagcagagatcagaagatcatatgtatgtatgtttgacttacggccatagagaaagatgcgtaggagagcccaatggatctgcagacactacgattcccaaaaggactgccttcctcgtcacagatggcagggaccagtataagcataaggttccccatattgcctacgtagacaggacagtaaatatgattcatgtgagaattcagggatatatctctcctccttgagattaaattttgaggttttaatgttacctgaggcacaagtagcaattatgaggccatgaagttgaggtttggggttcagtagcttgaccaccaaccatccaagaatgcctcctactagaaaggtgattccaacatttatgggcataaaccacctacaaaactaattttggtcaaatcaaagccacacgtatgtattctcagagggatgataggagactggtagtgcataccatgaaataatgtcctgcaatgtgacagtctcggcaaggttggcaaacatgatgcagggggtgaataccacgaagacgagctgcgagggaaaatgtttgttagtgatgatatatgaatgcatgcatagttgacaccaaacagaaaaaagaaaagcagagacggaggttgaccttgttcacggatcttcgggtgtcagcagagagaagagagcagtaatcggttgccaagaaagcgccaaggacgctgataagaagaacttgaacgattggcattgaagccacctccaacaactctaagaaacccatccctaatctcttctttttcttttcttttctttttttctggtttcttgtagaagaagagaagcagtcaaggttaaagatatagagatgaaaggtttgatatttgggctgtttgtgtagatggagaggattggtgggtatatatatttagattaaatacgtataggagtggggtacatgaagtgtaaaagaggagtctaacttttcaacataggaaaagtcatgcaagaaaggtgaataaaaaggacaagttggcctctaggtactgttggtctctcaggtagtgcatatgcaaaatcacatagatatcaaaattagaagattcaatattgggacgaaagacttttgggattgtctcaggttaataatgttgacagaatcaaagtaagactcatcgtcatgctgtagctaaattgctcccagtatctttctttccaaatatttttatatctttatttccgctttctttttctctagctagagagatgtatttaaactatccatggatattcgagcacatgagtcacaactaacaaactaacatttttcaaagtggccaaacttgaccttttaatcataatattatttgtctttatcacctaacataaagtcacgatacaaaacatctcttgaatttgacccccaagctgattgctatgccaagtccacaatgctcctcataggctcatactctctactttattacaaatatcaataaaaaaaatgtcaactgtgatatgtgtgactttcacaagccactctgctaagttgactgatcccaaccctgcacatatcacatatgcacacatggaaaacagttgcattgtaatttggggaaaataatctcatcctgcacatctcctctgtttcctctttacaactccacagtatcttgttcgaatttatttatccaatcaaaaaataagtgatatgctaaaaaaaacttgtgggattaaaaccaagatgaggaagaggaaaccgtcgtttgcttgtatgtctcggagaattacgtgtgctgatgattataataaattaaaagtaagagagtcaaatatttgtttaaacaagaaaacggtaagaaggatgagaccaggttttgtggtagaacaagtccgggagataagatagttgcgtgactaggaaatggcgtgtctacacaagggcaccttttgatttcgatcatataacaaagaagtagataggcctaaaagagcccatggtatgtatgtatgaggcagctattgtgaggcctatatatgggcttagctcattgtccatttgtttccaaattattcatatgatcaacgatagatgatcaaatgaagatatatttctaatacatttagttttatcattgtcaaaatatatatttctacaaagaaactttacaacatgatcggattacgtgaaactaaaaagagggaagaaacttgatagagacaaagaggagccttttgttataatcatattagttatcccaggctgagaaagtgatgattcctccatgcatttaaaaaattgtaggtacataaagaaaagaaaaaataaataaaggtggtagatagtggagcaacggccaagagtaagataacattctatatctctaaagttgcaagttgggttatatttaactaaaagtggaaatactaaaaggggaaagcaatcataaaagcataaccaaatagtcaaactgacgagtgtgttggacgattctgttcttctacccctctgatctctcacaggggatcaaattgtcatttagttttgatatatagagccacaacagtgacattagtttgttgttgactactgtaagggttgggtttcgaaaagagacatggaggagtgttattaggttgattgttctcaagtacctccagtgtcaaacaaacattgacgattgattctcttcccataatttattgttatgcattacatatcacagtaaacggactttcagtcaacaccgcatttatttgccctcttcattgtttcacgtacgtaatcaaggaccaagggattttcttcttttggctaccatg

SEQ ID NO: 1256 - DNA, 3000 bp, Unknown
  misc_feature (1)..( 3000): cDNA_ID_2133084_gDNA_ID_1620377_Annot_ID_155205 3000 nt of promoter + ATG
atcacagaaatcaacagaatacgctcttaacacttactttgcttgtgtggattttgatagctagtactaacctggtttgataaaatccgataaaccaaaatccgtagcctttagaggcgaatctagttgagctgatttgaacaaaaagttctgcaagaaattggaggaggagcaaaagcagaagatttattattagaaacaaaaagcacatcctaagaggtataagcaagagaatgtacctctggtttcatatctctatgtacaagaccgtgtagatgacattctcctgcaactttgagcatctgcctaacgacaacggctgcatctttctcggagtaccgattacctttcctgaaaaataaaaaaaggaaagcatcaataatgagaaggtaggttctttcttacgattccaccggtaatagattaaagagtagtgagagatgctgactaacttggataatatcctatccagcaattcgcctccttcgcacaacctagaagaaaggcaagagtaaaatgtgaatgccaccgatacatgaaggatagactataagaaatgaggaaaggagactcactccataacaatatagacgtaatcgtcatcctcaaaggcattgtgaaactgaacaacattctcgtggccagagagagcaataagaatctgaacctcacgcttgacatcctcaacagcaataggaagaaccatctgtgagcaaaacatggtgatgagtgacctcaaagcagagcagaggatgcagtaaaaccacagaacaatgttgcaaatgaaagaacagagaaagagcactaactaactaaacaaagtacaaattgggaatcagtgttaaactaaattaaaaagatccgcaactatttttctgatgtgaatctagtagatggtagtggaggaagataccaacaactagtaaaaggggaaaagaaaccctagtaagggctggaaaaagtgtaccttagacttatcgagtcttttgacggcgacgcgatctccattgggtctgtggatggcgacgtaggtgtagccgaattgaccatggccgagcaacttgccgatggtgtagtgatcgtggaagtctttggagtagccaaaatcggtacgcttgccgcaggggatggagccggttcggcgtttggtagaggccttggtatcgatgggagtaggagcagccttggatttggtctgactgcttcgtctactgctgctagcaccagtgactctaatggcggagaaacagacacccatggctctgatgaatcgagaaagttagaaaagaaaggggattaataaaagaaagagatgaaagaagaaagaagaagaagagaggaaggcagagaagattattagagttgagttggtcaaacccaaagcgccgagtgaacccctccaaggaggatccccaacgaaagatccttctcactttcccactttttttgccttttcttcttctttttttttttttattattattattatctgtgttttttttacctttgttttgttgttatacatttctgagaattttaactgtcatttcacgaagtcaagaataatgaatttgtattttggtgtgaaagcgaagaccactgactgaccacccctgtgggatgtgggaagctccatgtttgggcccgacaccatcccccggtaagactcaattcgattcaacttcagagtttgccattatcattatttattgccactaaattattatggactctgtgtctctcatttattactttctaacaaactccatattttagtagagcctcctcctactagcctggatcttttgtgtattttgtactagtattcaagtccctgtcttcaatccctactcaaactgagattactttaaccttagattattggtctactaaattgacttggtcttttcaaacaagatttccatttttctaaaacgtctatatatatttagtaatgtttataatacaatctaaggcgtatacgttttcttttttcttttctactggttcgacttcttagaattgaattttgcccagaggaaagtaacaaattatctcttttgcaaatccggtcactgacggtgcactgcatcacattcacgtgccattccaacgcacaaccgtattccgatacttttttccttcttctacccgtacgctgttattataagtaagggctcaaattatattttaatcatgtatggtataagaagaagaaattgtttgaattttttttaatgggaaaaccaaagtgtttttatgatgacgggaggcacttacttggcagtatgaactgaaactgatttttcattatttttttacttgtctcagattgaaaaacgtgtgcatgaccatgttattaaacaaatactactacttcacctaacgtattttaatgtttgttttgttatacaacttggatccctctcaccaattatgatcactagtgagcccaaccaaccgggcccaatacgctttcatcttttgggcccaatcatttttttcctcaaacttcaaaattttcattacagcatatcgctggtgtgtgcacggcatgcatgacaagctaaaacgaatggtggatataactaacatatacagcttatactatacatggtatacaaacaaaaatgatgatccaagctaacctactcactcatagttgtccatttattctttctcaaaacaaaatcccatacaccagacctctaagtctaagtctacgattacgagcatagtcacaatgtctctcgccaacagtctcttatcatcaagtaagtttcattattttctccccaatatcactttgtcgcatgcatttccatcctatcatttccccatccaatctcctttaaaaataaaaataaaattggatttatttctttcagtaaaaatgaaaaagttgtaaattagtatagtcttcattaatgttcatggaccttgattataaataaatgtcaaaaaatgaaactagacttgagttggtcttcctcgtcgccc

SEQ ID NO: 1257 - DNA, 3000 bp, Unknown
  misc_feature (1)..( 3000): cDNA_ID_3061372_gDNA_ID_1620377_Annot_ID_155203 3000 nt of promoter + ATG
ttcgtccctaaaaaggccatgattaaaagcccacactattacattagattttggaaggcccacctcttttatttgatcactgattttttcattaacacaaaatcatctttcataatctttagaatcttactaaaaacataaaactgtcttaattaagtcacaacaatctttattttagctgtcatcataagtcacataacatcctccgctggcttcattttctaaaattattcaagattgggcgagttggaatagtttcaattttttgtagcaacgttgacgttagcttcgttgtacgggtcttttttgttcatcagcttagataatctctcagcgaggctcttccttgtcgcaggggatacaccattcttccctatcatcgactcaagaactgcctcacccaacaacttattcttgataaccgcttttccagttttcgggactctctcctctttcgaaaatgcaatctgcatcacaagttgtcaaaagatctcgatcattcattcgaccaatattattcgaaatgataatccgaaaaataaagttgactcactgtgagagagcctttaggacagatagcgaagatgattgaagagccgggagggaaatcttggtttttgaagaccatcaagaattggtcaatggctttggcttcggatcttgtgtatttccctgacgctttcatgatctcctcacagttttctactactttctccgagtattgtatccccgttaacctctttttcatcgtcacccttgccaatttctcaaactcaccttttcccaccagagaagaaaatttaaaaaatgtaatatatgacgtgtttaacttgaccatgtaataactacacaaatcgtgtgaagtgtgaacgaatacaaaagtgttttaattatatttagcacgtaataaagtgtacacctgtgacgagttggcggaagaaagggacggattccgtcaactcctttgcattcttgcctttccacttagcggagattgacggcagtgccatggcttcaaggtagactccgatgaccgtcacaatcacgaacttgcctttaatatcaaaccatcatatccctgcgtgattaaaggtaattagccacataatgctgctgtgtgcattaattgtatagacagactatgatgctaacctgcaccaccgaggaaaagtcttttgtgggaagcgggcgactcaacagccggaggaaaagtaaatgcgtcgacgtggagtggcgtcacggaaggcagcggcatgggcgacgaggaagaccaactcaagtctagtttcattttttgacatttatttataatcaaggtccatgaacattaatgaagactatactaatttacaactttttcatttttactgaaagaaataaatccaattttatttttatttttaaaggagattggatggggaaatgataggatggaaatgcatgcgacaaagtgatattggggagaaaataatgaaacttacttgatgataagagactgttggcgagagacattgtgactatgctcgtaatcgtagacttagacttagaggtctggtgtatgggattttgttttgagaaagaataaatggacaactatgagtgagtaggttagcttggatcatcatttttgtttgtataccatgtatagtataagctgtatatgttagttatatccaccattcgttttagcttgtcatgcatgccgtgcacacaccagcgatatgctgtaatgaaaattttgaagtttgaggaaaaaaatgattgggcccaaaagatgaaagcgtattgggcccggttggttgggctcactagtgatcataattggtgagagggatccaagttgtataacaaaacaaacattaaaatacgttaggtgaagtagtagtatttgtttaataacatggtcatgcacacgtttttcaatctgagacaagtaaaaaaataatgaaaaatcagtttcagttcatactgccaagtaagtgcctcccgtcatcataaaaacactttggttttcccattaaaaaaaattcaaacaatttcttcttcttataccatacatgattaaaatataatttgagcccttacttataataacagcgtacgggtagaagaaggaaaaaagtatcggaatacggttgtgcgttggaatggcacgtgaatgtgatgcagtgcaccgtcagtgaccggatttgcaaaagagataatttgttactttcctctgggcaaaattcaattctaagaagtcgaaccagtagaaaagaaaaaagaaaacgtatacgccttagattgtattataaacattactaaatatatatagacgttttagaaaaatggaaatcttgtttgaaaagaccaagtcaatttagtagaccaataatctaaggttaaagtaatctcagtttgagtagggattgaagacagggacttgaatactagtacaaaatacacaaaagatccaggctagtaggaggaggctctactaaaatatggagtttgttagaaagtaataaatgagagacacagagtccataataatttagtggcaataaataatgataatggcaaactctgaagttgaatcgaattgagtcttaccgggggatggtgtcgggcccaaacatggagcttcccacatcccacaggggtggtcagtcagtggtcttcgctttcacaccaaaatacaaattcattattcttgacttcgtgaaatgacagttaaaattctcagaaatgtataacaacaaaacaaaggtaaaaaaaacacagataataataataataaaaaaaaaaaaagaagaagaaaaggcaaaaaaagtgggaaagtgagaaggatctttcgttggggatcctccttggaggggttcactcggcgctttgggtttgaccaactcaactctaataatcttctctgccttcctctcttcttcttctttcttctttcatctctttcttttattaatcccctttcttttctaactttctcgattcatcagagccatg

SEQ ID NO: 1258 - DNA, 3000 bp, Unknown
  misc_feature (1)..( 3000): cDNA_ID_3410225_gDNA_ID_1620377_Annot_ID_155200 3000 nt of promoter + ATG
aaagacactaaatccgggatatgtttatcaaaatgcatatggtatgtcttcttctttggctttttctttatttccgaagattggaaaagtcagtaaacaaggaggggcataatagtagtttattacagtaatcagcggcagtaacacaacagccgcgtttgacattttctgaaggaatcattcgtccgtcgtcgacccatcttcttctctccaatggagtctcctcttcttcttcttcttttctctttcttattatttccgatccagtcaatttctcggcttccgtaaaacccagttgacaagaaaaataaaaaagctttatcctttttaccctaattcctcaaagtttagtcctttctctttcgggtttctgaatctcgattcgccatttgatctgatatcgacgatggcagacatcgtcaagcaaatcctagcgaagccgattcaactgtctgaccaggtggtcaaagccgccgatgaggctagttccttcaagcaagagtgcggcgaactcaaggctaagaccgagaagctcgccggtcttctccgtcaggctgcccgcgccagcaacgacctttacgagcgacccactcgccgtatcatcgacgacacggagcagatgcttgagaaggctctctcccttgtcttaaagtgccgagccaatggcctcatgaagcgagttttcaccatcatccccgccgccgcgttccggaagatgtctggtcagttggagaactctatcggagacgtttcctggctcctccgtgtctccgctccggcggaagaccgtggtgacgctggctaccttggtcttccaccaatcgccgccaacgaacccatcctttgcctgatctgggagcagattgccattctctacaccggatcgcttgaagaccgctctgatgccgccgcctcgctggtatctctggcccgtgacaacgatcgctacacgaagcttatcatagaggaaggaggtgtggtgcctctccttaaactgctcaaggaagggaagcccgaggggcaagagaacgcagcgcgtgcgttagggttactgggacgtgatcctgagagcgtggagcacatgattcacggcggcgcttgttccgtcttcggcaaagtcctcaaagaagggcctatgaaagtccaggcggtggttgcgtgggctacgtcggagcttgtgtccaatcaccccaagtgccaagacgtcttcgctcagcacaacgccattcggctactcgttggccacttggccttcgaaaccgtgcaagagcacagcaaatacgccattgccaccaacaacaaagctacttccattcaccacgccgtcgctctcgccaaggaaaatcctaattccacctccgccaccgccttgcccaagggtcttgatgaggatcagagctctattcctcatcctacagggaagcaaatgcccaatcagatgcacaatgtggtcgtcaacaccatggcggttagggcaaaccctccgaggaagtcgactagcaacggtgtgagccagagtaatggtgtgaagcaacctagcagtgtacagcagcaccagaattcgacttcgagcgcatccaagactcgagagctggaagactcagccaccaagtgtcagattaaggcgatggccgcgagagcgctgtggaagctggcgaaaggcaattccaccatctgcaaaagcatcacagagtccagagctcttctctgcttcgctgttctgattgagaagggcgacgaggaggtcagatacaactcagctatggcgttgatggagatcaccgccgttgcagagcaggacgctgacctgagacgttccgcgttcaagcccaattccccggcctgcaaggctgtggttgatcaagtgcttagaatcattgagatagcggattctgagctactcatcccctgcatcagaaccattgggaaccttgctagaacgttcagagcaaccgagacacggatgatcgggcctctggtgaagcttctggacgaacgagagcccgaagtgacaggggaagctgcggctgccctcacgaagttcgcctgcacggcgaattacttgcacaaagatcactcgaggggcattatagaagctggagggggcaaacatctggttcagttggcctactttggagagggtggcgtacagattccggcattagagctcctctgttacatagcactcaatgtcccagacagcgaacagctggccaaggacgaggttctggcagtgttggaatgggcttcgaagcagtcatgggtaacgcagctggagagcttagaagctttgttgcaggaggcaaagagaggactggacctttaccagcaaagaggatcaaggggttacaatttcaattgattcattatttcgattttgatttcgtgaccagcgaacgcagaataccttgttgtgtaatactttacccgtgtaaatcaaaaacaaaaaggcttttgagctttttgtagttgaatttctctggctgatcttttctgtacagattcatatatctgcagagacgatatcattgattatttgagcttcttttgaactatttcgtgtaatttgggatgagagctctatgtatgtgtgtaaactttgaagacaacaagaaaggtaacaagtgagggagggatgactccatgtcaaaatagatgtcataagaggcccatcaataagtgcttgagcccattagctagcccagtaactaccagattgtgagatggatgtgtgaacagttttttttttgatgtaggactgaaatgtgaacaacaggcgcatgaaaggctaaattaggacaatgataagcagaaataacttatcctctctaacacttggcctcacattgcccttcacacaatccacacacatccaatcacaacctcatcatatatctcccgctaatctttttttctttgatctttttttttttgcttattatttttttgactttgatctcccatcagttcatcttcttcttcttcttctgatcaaccatg

SEQ ID NO: 1259 - DNA, 3000 bp, Unknown
  misc_feature (1)..( 3000): cDNA_ID_2133067_gDNA_ID_1620377_Annot_ID_155199 3000 nt of promoter + ATG
tctctctccttcttatagtcactttcctgttgattgccttctttgcacccagacactggacccaatggcgagggaggcacaccaggaccatcaggttagatgcaaagctcgtccacacactcccctgcttcaccttcactgattctgctcaccacaaggccggggaaacatgtgctatatgtctcgaggattacagatttggagaaagcctcagacttctcccctgccaacatggtacttactcctattcttctgtggaaataaactggcaacttgccacccttaatgtgttcattgaggtcttggaaatgtatatttatgagacacagatcttcccttcacaggattgaaacatgtgcttactattctaggaagactttgataggtttctcttagattctaactttataaaatagatttctttctagcataaattcctctgttttagggttgaaggtacaatatattccgtttctgtcaattccagtttgataggtaagcaccgaatgcgaactttttggtattactcattgcttcgaatgatatgatgggtcgaatatgtacatcagaagaataaattaaagatttgaccttttttagtttatgtaagtgggggtaattcatagcagttggttgatttgaagctcttatgcagcttttcacttgaattgcatcgactcttggttgacaaaatggggtacatcttgccctgtgtgcaagcatgacataagaaccgagactatgtcttctgaggtgatcctgttagactgaaatgtataaatcctttcagtagttattttgttgtttttgcgttgggttcaatacactgtttgtgttgttttgttgcaggtacataaacgagagagtccgagaacagatacaagtacgagtagatttgcctttgcccaatccagtcaaagccgttagagttattatcggcttagcagctgaacactcatatcagtgctcggttacctggatcaggtccaggtttgcatcttatattgaatggttaatcatggtgggataagtttaggtaaagggaccggatctgccatactggtcgtgctttgctggattcccagatcaaaaagatatgagttgctttgcctctttttctttgcatgtgtacatttacatacgctctgagtcatgtgtacatttgatcattgtgtgtgtgtgtgtgttatagattgaaaaaatgtgtgtgatagtacagatatgcaaacaaattgatagaaaacaaatgttggtctaatcagattttctctctccgatccaggcaaatctctaatgttatcttgttgataatttctttgcctaaagtttgtataatatgaatattgaatctgattcccttacatgggggaatggaatccattgaacgtggctttgattttgtcttgtctgtagtaataataagaaaagaacacgtcatcctcatctctacctaacgactcatccaatacgatgactcgttcatgggtttgttagttgcgcaattccatcaccaaaactttctattacatactcaacttcttttgattactaaattcagccaacatttccttctcatctctaatcagtgaacacgttttctatgcaggctttggggcctatcttaccatagctgtctaagaagactattatcttatattctttattgtagatttcatttacttgcgtatggaattggaaacaaatttctaattgttgaatcatataccattatttttatattggccatgcatgtgtataagtggaagatagaacaatattaaaacaatattattgtgtttggtcctatttattactctctgctctcttcctgaagcttcttcatctttttgtttgacaagaagaggtagagaagaagatgtctcaatcaatctcctccagcacaaaggcagaagaagttgttagtgtagatgtgagccaagccaagactctcctccagtctgggcatcaatatcttgacgttaggtgagcttctgatctattctatcatatcaccatgcatgtaccagctgctgcggttgttaatgaaaaatccttgcacatggcaggactcaggacgagtttaggagaggccattgtgaggcagctaagatcgtcaacattccctacatgctcaacacacctcaaggtaaatcaaatatcaatcacctttaattagagatatcaaccagtacatgagttaaagccttgtgatctctactcttaggtagagtgaagaatcaagagttcttggagcaagtatcttctcttctaaacccagctgatgatatccttgtggtaactcttttcttcctcatcacacccacaagaattaaaatctgccggtgaaaacgatgataaaatctggaaaatgatattgatacaaacagggttgtcagagtggagccagatccttaaaagccacaactgaacttgttgctgcagtaagtgtataatagtccctagtttacatacataatttactcctacttgtgtgtttaatctcaaagaatcaattcatatatacataaaaaaatagggttacaagaaagtgagaaacgtgggaggtggctacttggcttgggtggatcacagctttcccatcaacacggaggaggaggagccatctgctaattaataatcttaagattctcttcttttcttaatcaaataatataactgcctgtgtgatgtagtaatcattttcaatttaaaattccagtttcttgtaatcaaaactttcgtgtaccaaattcaataaaagctgtgtttctctataagtgaaaaccaaaaaaaaaaagatgaacaagtaaaagtgtaaaaactaagtaacaagcctttgtttgtttcatcggtcaaaacgtttgggctttttgagtatacatacaaaaaggctttgggcttcagcctaagcccttatcttctctgttctcgcccggcgattctccgacttaattaattttccgaccgaacacttctctctctctctctctcgggtttctc

SEQ ID NO: 1260 - DNA, 3000 bp, Unknown
  misc_feature (1)..( 3000): cDNA_ID_3061380_gDNA_ID_1620377_Annot_ID_155198 3000 nt of promoter + ATG
aaaaaatctccctttctttgataatacacaaatcaatcaatatagagataattaaaccacgtctttacagagaatagaagcaaatctttgagctagtaacattttagtataaaaatctcaacaacaagtcatttacatcattgcaactgttttgttctcttcatttgacttgggggttgtttgcttgcaaaggaggctttgtttgtacgtcgtcgtttttattccgtatataaaatataaattaacgaactaatctttaaagcctctgagacgagtagaaggttctctctggtgaagaaaccaatgcatttcggcgacagcctgaaactgaaaagccatcgatcgaccgagaaagcgaaaagagagagagatgagactcgtcgtctcaagctgtctactagttgcagctccttttctctcctctctgttacgagtctcactcgccactgttgtcctcaattccatctccgcctcttttgccgatctcccagccaaatttggtcaatttctccccctcttcctttttccttatccgaaacaatttctcgaacaatctggttaaaaagaagttgattttgattctcagacggctccgtgaccaaaaacggaatctgtggagctctatacgtcgcagatcctctcgacggttgctcaccgcttctccacgccgccgcatccaactggacgcaacacagaactactaagttcgctttgataatcagaggcgaatgttcttttgaggataagctgctcaatgcccagaactcaggttttcaagctgtgattgtctatgacaacattgacaacgaagatctcatcgtcagtaagccttttgcctcccacccaagtttaaaattccatcttttcttctcctgatgagctagggttgagctgaatttcattggagttatttaatttagtcaacgcccccataagtttggagattgaccaacatctgttttgcacagtgaaggtgaaccctcaggacattacagttgatgcagtcttcgtttcaaatgtcgccggtgagattttgagaaagtacgcgagaggccgagatggtgaatgctgccttaatccgccagacagagggagcgcttggactgtgttggccatctccttcttctctctccttcttatagtcactttcctgttgattgccttctttgcacccagacactggacccaatggcgagggaggcacaccaggaccatcaggttagatgcaaagctcgtccacacactcccctgcttcaccttcactgattctgctcaccacaaggccggggaaacatgtgctatatgtctcgaggattacagatttggagaaagcctcagacttctcccctgccaacatggtacttactcctattcttctgtggaaataaactggcaacttgccacccttaatgtgttcattgaggtcttggaaatgtatatttatgagacacagatcttcccttcacaggattgaaacatgtgcttactattctaggaagactttgataggtttctcttagattctaactttataaaatagatttctttctagcataaattcctctgttttagggttgaaggtacaatatattccgtttctgtcaattccagtttgataggtaagcaccgaatgcgaactttttggtattactcattgcttcgaatgatatgatgggtcgaatatgtacatcagaagaataaattaaagatttgaccttttttagtttatgtaagtgggggtaattcatagcagttggttgatttgaagctcttatgcagcttttcacttgaattgcatcgactcttggttgacaaaatggggtacatcttgccctgtgtgcaagcatgacataagaaccgagactatgtcttctgaggtgatcctgttagactgaaatgtataaatcctttcagtagttattttgttgtttttgcgttgggttcaatacactgtttgtgttgttttgttgcaggtacataaacgagagagtccgagaacagatacaagtacgagtagatttgcctttgcccaatccagtcaaagccgttagagttattatcggcttagcagctgaacactcatatcagtgctcggttacctggatcaggtccaggtttgcatcttatattgaatggttaatcatggtgggataagtttaggtaaagggaccggatctgccatactggtcgtgctttgctggattcccagatcaaaaagatatgagttgctttgcctctttttctttgcatgtgtacatttacatacgctctgagtcatgtgtacatttgatcattgtgtgtgtgtgtgtgttatagattgaaaaaatgtgtgtgatagtacagatatgcaaacaaattgatagaaaacaaatgttggtctaatcagattttctctctccgatccaggcaaatctctaatgttatcttgttgataatttctttgcctaaagtttgtataatatgaatattgaatctgattcccttacatgggggaatggaatccattgaacgtggctttgattttgtcttgtctgtagtaataataagaaaagaacacgtcatcctcatctctacctaacgactcatccaatacgatgactcgttcatgggtttgttagttgcgcaattccatcaccaaaactttctattacatactcaacttcttttgattactaaattcagccaacatttccttctcatctctaatcagtgaacacgttttctatgcaggctttggggcctatcttaccatagctgtctaagaagactattatcttatattctttattgtagatttcatttacttgcgtatggaattggaaacaaatttctaattgttgaatcatataccattatttttatattggccatgcatgtgtataagtggaagatagaacaatattaaaacaatattattgtgtttggtcctatttattactctctgctctcttcctgaagcttcttcatctttttgtttgacaagaagaggtagagaagaag

SEQ ID NO: 1261 - DNA, 3000 bp, Unknown
  misc_feature (1)..( 3000): cDNA_ID_2133061_gDNA_ID_1620377_Annot_ID_155197 3000 nt of promoter + ATG
tttgtgcagccaccttttggtgctttgttcattaggcatgccagcgcagaattcaccacagcttctgcctacggaataattagatgattactgatataagaaaaaagacaaaaaagaaaagagttttcatatatagtatcttacctcagaagcaccaagagcaaggcgtttcatgtaatcatttgttacatgctgcttggcagttccagtgacagcatcatggtgctgcgctatccctaaagcatccccaagactgtaagtgtttggacctccagagttcttgcccaccagaaattcaagttgccttgcagcctgttttggaaaaaaaacagacaaatgcaaggccatgtaaattcattttgaatttcactaagaaaatgggaaatcggactccgtaagatgcagtttgataccatgtagtatccgctaagagcccgaacatatcgtttaagagcaggacggctggtgaagtagccagtccagtaagcgtatgcccgatccgcatatctgcagagagtagggggaaattattgactattgagaaaatcaagttgttgaacaaaaggaatatgtaaatttatttggtgacagtactaaaggcactcacgggaaaaagtcatgagtcttgagaggccaagtaacattggcaacattcttggcatcaacatagagagatggtgtggagtacaaggcgttcacacggccatcctgttgaatggaattattggtgatgagaatctagtctccaaagacagcgagattgatattgagcaatcacagcaagcaagagatatgaaaaccttgttaacataatggataagtctgtccatctgtctgaaccaagactcggcgaactggtactgaaaatcatcgcccattgtccacatcacatggttccctcgactcacattagcctatgtccacattgactactttcagaattaatccaagattacacacacacttgaaaaaaaaaaaaatactactcaagacttacataaacaagagaagcattgacgaaatcattaaccgcctccttaatgttatagccatcgaaacgagggttgtcctgcaaaatgacgagtgaaccgaattcccctaaaccaaaaaccaaacgggagaaagaagaagcgaacctggaggggtacgtaatcgtcggtgacttcatagtgaaagccagtgggagggccgtaatgaacaaagaagatattggtgaatatctgagaagaagaatccagtgtttttgatcctctccagatgacttcaagtgatttctcggcctttcgcttttctctgtcttggtaatcgattctcgcgaaatgcacagaatccaaccctaactgcacccccaccaaattaaaacacactcataaggaaataaagaaataaatagattagaagggacctctgctccaaggaggtaagcttgaacagaggaatgaccaaagggatcgatttgccaagcagcacgtggagttgtgttgaactgttgctttataaaccgatgcccctttgtggtttggtctatcatatctatgtaatggcacgttgcttcatcattcatagcccatcctccatttctgcacattgattgtgtgaattgtatcaacgctaggtagccaaaatgataaaattaaggtcgtgacctacttacacaaactctagttgcccggatttcactagtctcctcacttgctcttgtctctcggggctttgttcttcccaccaacgcgtaaagaaggcctttttcatgtacattgatgttcacataagagaagaaaacatatattatggttttatgaacaaaaccattattaatgttttaccatttccgcaaacacaaactttctattgggatcacgaagtagagaatccaccaccgagtctaggacgttcctcacgcaagcgttctgaaactcacaattcatttgggatatatagtacgttagactcgtctctacatacatacatatatatgattcatcattcatctgtagataacatacctggattctgttgttagatcctacgtagtactgatcaacagttttcaaccagccgacatcgtcatgcgaatgcggaacaagatgaacatttagtttccccggaaccactttagcttcggttccatacttcacgtatcccccgcctttgacgctctcaaccaacgacaacagaagaagaaaaacaataacacaaagtgatcctttcaataaagacatacccggtttctccattttccgatggcagagttttcagatgtttttctttcttacagggtgtggaggaaacttataacaagaaaatggagagagagcaaaacaagggtcataacaaaagaccaaatccttatcgtttgtttttgctcagatccgtcggtctttgttagagtctctctattgttttactgtgactagattgtcatttcaccatatgtaataattaattaggttctacaataatcttattttcctacaaatttaattaaaatcttgaccctaaaatagtactttattaaatctttttttcttctactttgatgtcaacattaaaattgaagttgatctgttttgagttttgacaatagtcatttaccttttctttaattttatttaacaaatagttttgggaaaaaatctccctttctttgataatacacaaatcaatcaatatagagataattaaaccacgtctttacagagaatagaagcaaatctttgagctagtaacattttagtataaaaatctcaacaacaagtcatttacatcattgcaactgttttgttctcttcatttgacttgggggttgtttgcttgcaaaggaggctttgtttgtacgtcgtcgtttttattccgtatataaaatataaattaacgaactaatctttaaagcctctgagacgagtagaaggttctctctggtgaagaaaccaatgcatttcggcgacagcctgaaactgaaaagccatcgatcgaccgagaaagcgaaaagagagagag

SEQ ID NO: 1262 - DNA, 3000 bp, Unknown
  misc_feature (1)..( 3000): cDNA_ID_3061387_gDNA_ID_1620377_Annot_ID_155195 3000 nt of promoter + ATG
ctggaaacacccttgatgctcaatacatccccatggataatgtcacgagcaacctcagaagtttctacacaaaagcttatttaggaatatcttccctgcagcgtccaaagtattggctcgtgtttaaagcaaaggtgccaccacttggttggaacacattcttcatatctaaagcatccgcacaaggtatgcagacacaggctcatgctatccatagaaagttaaacagttgcctttccctcataattcattttttttttatcattcatgatataggaagcaacaatcacaaacactcttcagtgatgcttagtccgatgaacaatacgactgaaattggtccaggaaatctaaagatggtgttttcttcagactctggtcgtctcgaacggatgtacaactccagaacaggagtaatgtttcgtttactccttcacactgaatctttttggttcattcatttggttagacaaaatattcagtcacaattgcttttaataaatatctttcaggctgacataaaggtggatcagaactatttctggtatgcttcaaatgttggggacgcaaaagatccccaggtttctggtgcatatatatttcgacctaatggttccttggcgtatcctgtttcgtcgtccaaagtgagtctatgaatactctaagagcattgagatgctgaggttctatcatcaagatattagatcataattttttttagcttttctacacagcatcgttatgtaggaagcagataattgtctttgtagtttagaaatacagataaacccataaaatctatatgataaaagtaatccatgtaaatatttgtttggaagatatgtaccgtgactagtgctttcattggcaatggaaacgtgcagtcaaagttgcagattgtgcgagggcctttaatagatgaggtgcaccagcagtttagtccttgggtggcacaggtaagtcacgttttgtggtaactctaatcccatagaaattgtcaaccatagctagttgcaacgacaatttatattggagaatccttagttgataagtacatgtgttatctaggtggtaagactatacaaagaaaaagagcacgccgaatttgagttcactgtgagtgttgtccaaaactctatttcaggttatttaaggtgttttggataaaaagatccctcaagctcattctctttagcagattggtccaatttctgttggtaagggacatctaacaggaaaagagattatcacgcgaatggtaacagatatgactacagctaaggagttctatactgactctaatggaagagactttctgaaacgggtaccctaagatttttctgtgttctcgtattttaaacaccaatgagatcgtattgcccggtttcaacaaatagattaaactctattgcaggtccgggacaaccgaacagactggcatctcgaagtgaatgagccaatagcaggaaactactatccggtaaactatttgatgtccagcagaaattgcaaaaccaagaaaaatttggactatatcgattgtgaatggctttacagttctaacgcattgttagtgtatcttttcagcttaatcttggaatgtacataaaagacgagaaagcagagttgtcggtgttggttgatcgggctactgggggtgcaagtattaaggacggtgaaatagagttgatgcttcacaggttccaaatttcattagtgtcattagtctgtatttttaaaacatgaaacattattgtgtagttgacactgatgaaacatccatgggaacaggagaacgtccatggatgactcgagaggagtggaggagagccttgtagaaactgtgtgtgtgaatgacacctgcgcaggattgacggtatgaatgattaattgagaaattgtgtgtgttttgtccaggacaaaacttgatacatacttgtgtaaatgcagattcgtgggaattactatgtaagcataaataaggtaggagaaggagggcggtggagacgagagactggacaggaaatatactcacctcttctaatggcattcgcacacgagaacaaggagaaatggaaagcctcaaatactgtgaaaggttatgccatggatcatctctacaccttgcctcaaaacattgctctcatcactcttgaggagttggatctcgggaacgtccttcttcgcctggctcatctctacgaggtacgtacagttagatgttcttgaattgggatatacctgacagtaattgagtgttgagcgttgtttacaggcgggagaagacagtgattactctaaaatcgctaaagttgagttgaagaagttgttttccggcaaaatggtaagaaacacacttgctcatctacatgtggagagatactctaacatactagctagctaggtggtgaatgaatccatactatttttgcagatcaaagaagtgacggaaatgagtttgtcagcaaatcaagagaaagtaaagatgaaggagaagatgaagtggaaagtggagggtgaagcggaacaaccttcttccccgctaagaggcggacccgttgacaagtcgactttagtagtagagcttggtcccatggagattcgtacatttgtggttcagttttatcagaaacaacgaagaagaaagttgtttgtgggatgattgcgccaatatgtttgtacaatgttttaaatcattcattcatcaacggtttggttagttagaaagcgcgggaggaaggttcatgtattttttaatcgaccattatactgtgttaatgggcctgttatggaagttttgggtatataaggcccatttaaaggaaatgatgagtgcgcgatttgtctctcttctcaaaaacttgaagatctgagtagagtatttccttcttcttttttttttttttttttctgttcttggcttgtcgcagaagttgggattcgtctttttataatttgccctgaaaacgaaaacgaaaataaaaagcggagagagagatg

SEQ ID NO: 1263 - DNA, 3000 bp, Unknown
  misc_feature (1)..( 3000): cDNA_ID_1033176_gDNA_ID_1620377_Annot_ID_155182 3000 nt of promoter + ATG
tagacaaaagtaaaacataactagattagttcaacgtttatgaactccgtcaattacttctcattttagccacttcgatttcggcctgtaagtagttgctttcagcgatttccagtttagatttaagggcatcgcatgaagcttcccaagtctccttttccttttcctaaaggaacaaaaaaaaatcatggcttctatgaattacaacaaaagaaaatagaggaatttatatggccaaacaaatagaaactctaaacatgctgtctgatgacagactgacgccttagatcatgtttacaattatctatacgcactcctatattcattccctggttaaaaccatgctagtaaatctgctaaatgatggaaatcatttgacgagtagtatgcaaaacaatgtcttagaatatacgaatgggcaacaataacgaaggacaaatgacagttggcatcagagagtcctgcgaatccatctttaaacattccacttacattctctgatttaaggtgtgcaagctctcctttaagagtttctgcagcagcccttagccttgctgcttcgccagttgcagctgcctccatctctgcaattttagattccttctctgcaagcagtacctaaaagaggtgtatacttggtgtgaagaatttatcacttatttcaaactattctctctcgctcatttgaaaaccaaagcacatcatccagtaatagaactaaagaatttagtcaaaagactaacctgcagcgacgaaatggtttcggctgctttgtccctctcagatagagcatctacgacctgtgcttccaaaccctctaagttctgtcaagaaggtggagagaagagaaaaccttggatgtcattagcggaaaatggtggctcatagcatataagaagtaacacaatcgctgatgctgactaccttttgatgcttggctgacaactcagtaactgcaatttgctttctctcttccacagcttgtaattgctttttcaggtcctccagaatctaggattaaagcaagtacgcatatgaagcagagtatacagagccatccctccccccccccccccaccccccctctctctctctctctctgtctcttttgtctctctatttttctatatattgcagactagtattacagaaaatgaaagagatcaaacctggtccttatcaagaagtgactgttgcaatgtctcaatcttattttctttaggctgcaatgagccacgtagttcctcgatagtatccctgagcctgtgtaaagagaaaactccagtactcaaattcttagaggtagctggagaagtgggaaaggcgacattcattttatacaatttctgtaaaaattatcttcgaattatttacttgttattggcactccttagttgttgcctctccgcatccattgctttaagtgcttcattcgcctgttgcctagtgcgttccagctcttgttgcatggatgagtgttgagaagatgctcgttcagctgtttcattcacttcccggaaacgggcgtcgagatcatctttttcctgaagatagcaatataatataccactgagattaagacagcacatagcagcgaaatctatatgtctgaaaatgcagcatagaaattccgaaatagtataagatggtttttgaaactcacagtagcctcaaagtggctaaaacagaaagcattataaaatgtagagaaagacattcaccttttggatttcttgaatgcgttgtttagcccttttgtgaagcctggtgaatttggcgtccaggtcggcatatttctcgtcgcgctctttgatttcctggtccagtttctgttcaactacaccaacaatgtaatagcacaagttgagaaaaggcaaacactggttccggtcaatgaatgagcaaatagaaaagatggcttctgaccttgggaaaacttagaggagtattcttgggatttagcatcagcctcagagtatgcttcccttagatgctcaagagcttgctcagctgcaactcgagtttgtttttccacatcaatttctctgctcaatgatgcgacctgttcttgaagttgtttcagctgagcagagtccgcttccacttgctcagctttctggagagacctaccttgcgctacctcatccttgagtccctcaaattgggatctgagaaagtcattttctaatctcagttcagcaatcatttggagtagctgatcaccattttctgtcagagtctcgttggaggcatcatttaactctttatcttctttgatcacatggctctcctcttcttctccaaccacatcagattccttgtcttcggacatcttggcagagcagatgtcagaaagatgaacccagacactcaagagagcgacgacaactagtaagcgcaaaatcgggatttgaatcaacaatcaaaagagaaaggagtcaagtcgtgaaattcgaataaaccagcaaaagcaacgcaaggagaagagagatttgaatgtaatcagtgccagagaagaagcttaccttgaggtgagggattagagaagagtgtggaggcagagagagagaggtcacaaacaaggaatcacgatttcgaaatattggatcggatctcaacccaaaggttaaaaacgtcgtcgtctctttcccgtcgatcagtgagacggtaaaacgttgatctgatcgactgacgaagaatggtaagaattgtgtaaagggtgttttactaatgaataattgcattcagaagccttaaaccttttgaaaattcatcaagtaaacccaagacgaggttagctaaaatgatgccgttttggaatggtaatatgaaaatatgaaggacagtccgaaaacagcttagcccataaagcagcaacttaggcccattatgtatttgtaatatatggcccaattataatcactttcccaactaatttatataaaatgaaattattgaagtctttgtccagtcaaatataataataagccattgaaaaaa

SEQ ID NO: 1264 - DNA, 3000 bp, Unknown
  misc_feature (1)..( 3000): cDNA_ID_1378596_gDNA_ID_1620377_Annot_ID_155189 3000 nt of promoter + ATG
tgacgatgatccatcaggaaaaggtttggaagcatccaaagagggagacttgatggaagaagagcgagcagaaagagagagagcaggccaggattcggcggcgcccatgacagggccgacatcggaggagctattagaagaaggcatgttccagacaggaggaggcttcttatcagcattgtcgtagtcggaagagttatttccggtgggcggggagaccgaaggcgctgagaagggatcgtcctgggagagggaaagagtcggatgatcatgggaatcagaaggtaacaaccagggagaggaatcgccgtgacgtgatcgcgagatagaggaatcaatggagaagcgagatgcagaattagcggcactactcgccgtcgtagccatcatgtaacagaggaagagagagagagagaggatcaaagaagctggggattattatactctgaaaccaaggaaaagaattagagaagaagaagaaggaatcagccaaagagaaagctaacaacgccggtggctcctccgtttggaagacttgtgtgcctcctgccctttgcaaacaaacaaacaccaacgctccttgtacagttacttaaatacccctctcgctaccaatccgtgtgatttcacctgattggttaattaactaaccctcgtagctaattactgaggttaacaaatccctgttttaacttttgacgtgcctatcaaatttataagttgtgtttattaagcctcctgtagtaatttgattctattctacatgtaccaagtaattcattaggggataagattaaaaagattttctcttctaattgagttttttttttttttttttttttttttttttttttttttttaatttgtggccgaacacgttagtatgtgagtaacggagaaaacaaaggacacaacaacaacaaccatgataagacaggaaatgcttgacacatgcatctcacaccttgacacatttccatcccctctcctagtaatgctcttctacggcaaccaaacacagagaaaaataaaacaagtggtatgtctatcatataagcatttggcgggagcgatcacaagggcaagaggaggacggggcaggggatgaactcagcgagtagattggcgtcaatgtacttagagtggatggcttccatgctcatcaccaccagctccatcttcagctcatctgccacctctcctattatggccgtcgcttttttcccttccccaagcctctccaacagcttgaactcctcgaacccacctgcaaccaccacattatagttaacctttcttcaataagggattccaacactatagtttacctacaatttcctacaagtaattcctcaattttaccttcagacaaatgccaccggatgttggatacttgagtctcatgctccgaagatgattctctcttttcttcgtcaatgactgaatcaacaacggtggtcacagatgatcaacacggctatataattcatatgatacataaggggatattaatgcaacactaattgttcttacctacaactgtgatatcagctccatacttctttgccaagctggttgttgtagcagcagcctatcaaattaagtgtaatcagcttttttgtttggtgtcaacatgttctcaaaaagataacaagctaaacaataacctgtctggtgccttcagaaagataaggattccgatcaatcaccggcaggagaagatgcttcacattactgaatgcgtctcccactcccactggacttggactagcttctgcttcttttgcctgcgcctttactcgacctaagctaaccacaaactaatcattgttggctcatcaacaaactaaccatatcaacaactactcattacgattgtgctaatttgaatcactcccctcttcgttgtcccaaactatattaaaattcaaactggaaatgcgactgtacccaacaaaggtagaattggactattacgtttaggagaagcaactcgtattccaaataaacagagaaaaagaagagaagatacctttgagagcgacactgcgtagggagagaagctgctggcgaggtttagatcgaagagaagaaagagggtagagcgcagaggaagaagaagaagaagaaggaagtgttgcttgcttggaggccgcatcgagaacagaaacggcggctatggagtgagcagatgccattgaagttgcgacggagttcagcaactatcgcgacgattccagaaaacaaactttttttttgttctcttattttggttctgcccacggcttggactagagtatcggtgaggggcttgaattcttcttataaggccgaagctatatattaaatttattaacgggccatatattgaaaaatatcaaatagaaagggcccatataatcaaagcccaataaggggatgcattggtcaaagggtttgaaactttgaattgaatagagttaacaatggtggtgcaaggcaagaaggaaataataataatgagaacagctattgtatgtttgtaaatcccacatgggaggagttaaggagtgcacgtgcacacgtatgtgtgtcttcttgtcctttctttgatggtcaaatatagaagaagagttatttgagagagagagagagaggctctggaaatcttgtgatccataaattgtctctcttcttttcctctgttctcatatacaaggaaaagggcttcctctgttctgttcctaataaatatctgaaatcaaaaacagagagagtcttttctttttttctttcactctatctctctccacacatgttacttacaacttaatagtttctctatatctccttgagatctccatccagctgttgctttttttactaaacaaaactcctctttgtgtgagtgaatgaatggaagtttccgactctctcttcttttgttttttcaacatacttcattcattcattttagcataacaatcggtggttggggatgatatgagatgaggcccgatg

SEQ ID NO: 1265 - DNA, 3000 bp, Unknown
  misc_feature (1)..( 3000): cDNA_ID_1382662_gDNA_ID_1620377_Annot_ID_155190 3000 nt of promoter + ATG
ttgagagaggttctagatgtttctattaggtgacaagtggttgaaagacaaaattaattaaaattgaggtgacgaaacaggactttcaggtgggagagacagttagaagtttgccgcactgccatcatatgttccacctaccatgcatcgacaaatggcttcgcaggcatgcttcttgtcccttgtgcagaagacatctttgaattgattttgaactcttctttcttctcttctttgtacatgaggtataggcatacacacacacacatatatacacactagtagtcttccttgattttttttagattacacgttacacagattttgatgcaccaatcattgtaacttcactcatctcttggagatcctgtttatttatgctacttattcttggcttcatcattcaaaaaggacatgctgcacttcccaattttagaaagtttgggatcggttttgcatagactaaatcccaaatgaaaaagcatatatacatacatatccttgtcgtcgaaaacaatgctctactcttaagaactaagaagagagataatacattttacatgaactagtccgagtacaaaaatatttggcatgagatccaacatgtcaatagcttcagttttaaattatacatttcttataccaggaagagtgaacccaaaaagacaaaaaaacataaagaaagaaaaaaaaaacacatatctttggttggataaatataactagaagatggatggagcctggttttaaagtttcttaggtaaagtgataccaccaccacggatagaaacagaaggggttttaagagaggaggctctgctgagcagattggtgtccaggaagaggacgaccacagtgatgtcgtcatggaaatgcctcctgactcctctctcaatcttgttgagatcagaatatctcatctctcttttctttgctgcctcctgcagcgcagctttcaccagtctcctcgctatcccctgcatcagcattctcacatttactctttagaaaaaatcatctatatatgtttagaaactgagagtgtctcatacgtttcttgggtggttctgaacgatttcaacagcctcttggttgctaagctgctcccaaagtccgtctgatgcaaatatcagaaactgatcgtctggttggagatcatgcacggttatcgacggttcccaactcaagataggtcttttcattggctcccgcaatcggtactttgtgtacaaaggttccttgttgaactccgatttcttaagatacacgtctcctatggatcgtgatacctgcaaacacacagacaactaagctttcaagatttgacaagtggccaacaataatagcttatccaactcagtgaaggaacatgacataataatattggctcagattttatagcataagaagatctctttgtagagagcggcacctgaataatgcccttaacacgccagacattgtgttttaagacgacaatatgggagtcatcagggtgtaaggagtgcatttcctgcctcacagactctatgctcacgttatgctcagctgagagctgaagcgcattaacctcacctgtggccttgatgacctttcccaaaaccgcacgggagtccccaacgttagctacgtaaagcttcccatcgcagaccacaccgatcaggcaacaagagccaaccgctgctatatgtggcttcactgcccactgcttggccaccacccctagaaacccttcttcggttgcctcataggcctttcttatcacatccacagacatggaatcctgctccgctgcgaatcctgcagacatgaatgttcagttccaatggttccctagctaaataaaattcagtggtgagtagtaacaacaagtagttactcttgagatggtgaaagagatgatcgttgacaaaacgggaggtctcagggcctccgtggccgtcatagacgccaacaaaggttccatagggaccagaagaagagagggtggtcaaaggaccggattcgacctggctctgatcctcgaggaggttgttggcctggacaacggccatggagaaatcaccaaaaaggtggtgagcagagtctttgtaccagagaaggccgtcttgtttgcctttggaatcagaataagtgtgggaagtggtggaagaagagggccagagacaagaggtcaaaaagttgaagaaaagggataacatcgggcctcatctcatatcatccccaaccaccgattgttatgctaaaatgaatgaatgaagtatgttgaaaaaacaaaagaagagagagtcggaaacttccattcattcactcacacaaagaggagttttgtttagtaaaaaaagcaacagctggatggagatctcaaggagatatagagaaactattaagttgtaagtaacatgtgtggagagagatagagtgaaagaaaaaaagaaaagactctctctgtttttgatttcagatatttattaggaacagaacagaggaagcccttttccttgtatatgagaacagaggaaaagaagagagacaatttatggatcacaagatttccagagcctctctctctctctctcaaataactcttcttctatatttgaccatcaaagaaaggacaagaagacacacatacgtgtgcacgtgcactccttaactcctcccatgtgggatttacaaacatacaatagctgttctcattattattatttccttcttgccttgcaccaccattgttaactctattcaattcaaagtttcaaaccctttgaccaatgcatccccttattgggctttgattatatgggccctttctatttgatatttttcaatatatggcccgttaataaatttaatatatagcttcggccttataagaagaattcaagcccctcaccgatactctagtccaagccgtgggcagaaccaaaataagagaacaaaaaaaaagtttgttttctggaatcgtcgcgatagttgctgaactccgtcgcaacttca

SEQ ID NO: 1266 - DNA, 3000 bp, Unknown
  misc_feature (1)..( 3000): cDNA_ID_3061393_gDNA_ID_1620377_Annot_ID_155193 3000 nt of promoter + ATG
agaaacctggatgaacatggctgcttgtttccatacaacacaccacgaacagcaaccgaggcaccggctgactgtggaacatcctctgtgttgttatgtccactcatctttcctcttatatcagcgagaaggagatcagcatccgccaaatacgaagaaacacaccaggcatcttctatggctccgtcactcacaaaatctaacacttcattaacataaagagtccattttagaaaatctttcagtacgaaaagcacaaacaaatgtaagtttaggtatgctctcatgtgtcactctatcaaggaggaaatagtgcatatgctaactcaatactggatagtcaagacgaggtagtagttgataccattttcatgtagaaaatccacaacccgccccgcctgtccatgagcttggctgagaaccttctccggcgcatccattttcagtggcaaccttgcaaactcgtcatgaacaagagagctgctgcactctacacaaactttagcttagaagatagtgatcctgagctctaaattgcattctttaaatttcttaataacgaattacctgatataatgacattatccgtctctcttttgttgtggagaaacttgcccagagcgtgaaacaacgaaagggtctcatctctaccaaaacaggaagatattccactatccaaaccactgtacattgtctgctcgtttccatgataattgtcttccatgccaggccttggtgattttatcttagtatgatttagctctggcttaacggagaagagctgcaaagatgtaatagcatgtctgatgtcgcctccacttgcagttgccatctgatcaatctccatagttgttaccttacaatgctcttccctacatattctctgaagtacctttttaattgagttcttcgtgatgggattgaaagcaacctgagaatacatacctggacaatcaactagagttgaaaaaatgatatttctaataagatttagactgtaaatagtttgataaagcaacctttaaagcccctgctcgctcaagagatgactgtgtgtcctccatgcgtcgtgcagtctggtcagaagagtccgcgttattgtggtcagtgattaatatcactgttggaatctgcgttgatttcaccaatagtagtaggcaattttgcagcctttcaaaagcatgcctcccattggctagaggaaggtcatcaatcaaaagaacaacgggcgcctttattccgtcagtacttgatgaagccattactccgtatttcctagtactctcaacaaagttttcaaactcatccagcttcgacgtgtacttcagtcctagaagaattaatgaaaatccagtagattataaccggattagtacaacaaccatcctctggtctgtaatagcagtgccaaaactgagtaactaacaactataattccttcaagtacctgaactagtgttgtgcacatgttcttgccagatggtaggaataggagcgttccactcatgcactgtgactccaaggatagacgtaatcaaatggatggtagcagattttccgactccagcttgtcctgtgactagtagaacgttattccttaaaccattctgctgaaacagaaaggcaaaaaagtgaatactgccattaagcatcacgagctctgaaatcataaatcaatttcaaagataaacgaaacattacctttaagaaatccaaactttcctgaaaccacaatttgacttcgtcaacctaaagataacaaaaacaagaaaggagatgagttggtgaaccaaggagaaagcagagctaaaaggaaaagaaagaacaaagcaaccttcttcttgtgaacagaaagctcttccaaggtgcgaggcctgtatttgtcaacccacaaatcggtattcttgctcctttcataacctaaacaagagaccacagagcaatgaaatgacagacattataagctccaaaaaccgtaagaggaagcatcatagcggaacatcaataaaagtgtgaaaattgtggagtaggatccaggcaaagttggcgcgtaccagaagataccttgaagccgcttaaagcttcatcgaaatcttcgaaagacaatctaatctgcgagacatataaaaagcgaaactcgagaccttcatcaaggtgacaagccaaaacataaacatatgacagacactaggcaaacaaaaaatgtagaaacaaatgcagaccttatctacaagactcgagtcttcttgagtcgcactagcacccgaaaggcgagctctctttgacgctctaggattcgttgcggtaccagcagaggacctgggtttcgacttggcattagaacgcgatgaccttaagttatacgatctatcgtcatcttcatcttctagggatagttttttcttaagcattgaatttccttttgccgaaacctttcagaaatcccaatcgccttagggtttatggaagacgaacggaacttgatcactcaattaaactctctcagcaacgatccccaatttccagatgagcaggaaacttccgagtagtcggatcctcctcaacggcgtgtcgtcgccttccgcgtttttgtctcgaaatgaggagtgagtgttggctcgctccactaaatgactatttcatcgctcgatattttcgcgggtcaatcaaacggcatcgtttttatccgaggcgtacatgagaagacaagtagtgaggtctttacgtgacgtgtcaatatctagaccgcctatctcacgtgagtaaaataaataacctgttttagcgtagggtgagttgtaggagattacaccaatggcctgagagagtgaccaccacctaccccacgccgtctccgaaggcttcaccaaacaacaccacgaaatcaatcctctaatgtatttcttcaattcagtcttcttcttcttcaccaacccaatttcttttcttcaactctctcttctccccaaacccgacttctgatccgcatcgatttccatg

SEQ ID NO: 1267 - DNA, 3000 bp, Unknown
  misc_feature (1)..( 3000): cDNA_ID_2133032_gDNA_ID_1620377_Annot_ID_155191 3000 nt of promoter + ATG
aatgttcagttccaatggttccctagctaaataaaattcagtggtgagtagtaacaacaagtagttactcttgagatggtgaaagagatgatcgttgacaaaacgggaggtctcagggcctccgtggccgtcatagacgccaacaaaggttccatagggaccagaagaagagagggtggtcaaaggaccggattcgacctggctctgatcctcgaggaggttgttggcctggacaacggccatggagaaatcaccaaaaaggtggtgagcagagtctttgtaccagagaaggccgtcttgtttgcctttggaatcagaataagtgtgggaagtggtggaagaagagggccagagacaagaggtcaaaaagttgaagaaaagggataacatcgggcctcatctcatatcatccccaaccaccgattgttatgctaaaatgaatgaatgaagtatgttgaaaaaacaaaagaagagagagtcggaaacttccattcattcactcacacaaagaggagttttgtttagtaaaaaaagcaacagctggatggagatctcaaggagatatagagaaactattaagttgtaagtaacatgtgtggagagagatagagtgaaagaaaaaaagaaaagactctctctgtttttgatttcagatatttattaggaacagaacagaggaagcccttttccttgtatatgagaacagaggaaaagaagagagacaatttatggatcacaagatttccagagcctctctctctctctctcaaataactcttcttctatatttgaccatcaaagaaaggacaagaagacacacatacgtgtgcacgtgcactccttaactcctcccatgtgggatttacaaacatacaatagctgttctcattattattatttccttcttgccttgcaccaccattgttaactctattcaattcaaagtttcaaaccctttgaccaatgcatccccttattgggctttgattatatgggccctttctatttgatatttttcaatatatggcccgttaataaatttaatatatagcttcggccttataagaagaattcaagcccctcaccgatactctagtccaagccgtgggcagaaccaaaataagagaacaaaaaaaaagtttgttttctggaatcgtcgcgatagttgctgaactccgtcgcaacttcaatggcatctgctcactccatagccgccgtttctgttctcgatgcggcctccaagcaagcaacacttccttcttcttcttcttcttcctctgcgctctaccctctttcttctcttcgatctaaacctcgccagcagcttctctccctacgcagtgtcgctctcaaaggtatcttctcttctttttctctgtttatttggaatacgagttgcttctcctaaacgtaatagtccaattctacctttgttgggtacagtcgcatttccagtttgaattttaatatagtttgggacaacgaagaggggagtgattcaaattagcacaatcgtaatgagtagttgttgatatggttagtttgttgatgagccaacaatgattagtttgtggttagcttaggtcgagtaaaggcgcaggcaaaagaagcagaagctagtccaagtccagtgggagtgggagacgcattcagtaatgtgaagcatcttctcctgccggtgattgatcggaatccttatctttctgaaggcaccagacaggttattgtttagcttgttatctttttgagaacatgttgacaccaaacaaaaaagctgattacacttaatttgataggctgctgctacaacaaccagcttggcaaagaagtatggagctgatatcacagttgtaggtaagaacaattagtgttgcattaatatccccttatgtatcatatgaattatatagccgtgttgatcatctgtgaccaccgttgttgattcagtcattgacgaagaaaagagagaatcatcttcggagcatgagactcaagtatccaacatccggtggcatttgtctgaaggtaaaattgaggaattacttgtaggaaattgtaggtaaactatagtgttggaatcccttattgaagaaaggttaactataatgtggtggttgcaggtgggttcgaggagttcaagctgttggagaggcttggggaagggaaaaaagcgacggccataataggagaggtggcagatgagctgaagatggagctggtggtgatgagcatggaagccatccactctaagtacattgacgccaatctactcgctgagttcatcccctgccccgtcctcctcttgcccttgtgatcgctcccgccaaatgcttatatgatagacataccacttgttttatttttctctgtgtttggttgccgtagaagagcattactaggagaggggatggaaatgtgtcaaggtgtgagatgcatgtgtcaagcatttcctgtcttatcatggttgttgttgttgtgtcctttgttttctccgttactcacatactaacgtgttcggccacaaattaaaaaaaaaaaaaaaaaaaaaaaaaaaaaaaaaaaaaaaactcaattagaagagaaaatctttttaatcttatcccctaatgaattacttggtacatgtagaatagaatcaaattactacaggaggcttaataaacacaacttataaatttgataggcacgtcaaaagttaaaacagggatttgttaacctcagtaattagctacgagggttagttaattaaccaatcaggtgaaatcacacggattggtagcgagaggggtatttaagtaactgtacaaggagcgttggtgtttgtttgtttgcaaagggcaggaggcacacaagtcttccaaacggaggagccaccggcgttgttagctttctctttggctgattccttcttcttcttctctaattcttttccttggtttcagagtataataatccccagcttctttgatcctctctctctctctcttcctctgttacatg

SEQ ID NO: 1268 - DNA, 3000 bp, Unknown
  misc_feature (1)..( 3000): cDNA_ID_3061412_gDNA_ID_1620377_Annot_ID_155180 3000 nt of promoter + ATG
atgcccttaaatctaaactggaaatcgctgaaagcaactacttacaggccgaaatcgaagtggctaaaatgagaagtaattgacggagttcataaacgttgaactaatctagttatgttttacttttgtctatggactatagacatttcattcatataaattgtcaggtcagctgggatctgaaatgtccatgcagacccagatactaagcacaaaagatgcggaactcaaaggtgcaagagaagaggtacatagttttcttttggttcttttggaaactattgtagccttggttaggtgaacgaatttattagtcatccattcttaatcacataacgtgaattattatggaatcaaagagccattttgagctttaaggaatgttctgctttagctagtcttcatttaaccatattgaattccttgtaactgttcacagatcaaccggctccaaagtgaattctcttcttacaagatccgtgctcacgcgcttttgcaaaagaaggacatggagctggctgcagctaaagactctgaacaaattaaatctcttgaggaagctctaaaggtaagttatctagaatcttaagatggagatatttttagatggttgccaaggtgcttaccaactaattatctttttgggtggtgttaggaagctgaaaaagaagtatatttggtatctgcagagagggatagggcacagcaagatcttcagagtgctttggctagccttgagaaagaacttgaagagaggtatatattgacactgaatctttttcatgtttgattccggaggttggctgctcattctcctcaatttgccagagaaaacaactgagaaatggtgttctcaggggactggttatggagttcttcagacatatattggtcgtctgagctatttttgtttcatatatatttcagagctggagcacttaaagatgccagcgagcagatcaaaagtcttgaagtgaagcttgactccactgttgctcgcaatcaggcggagaaacaagcttgggaagaagaccttcgggttttagaagaaacatggcgacgtaattgattcaaatctaaattcggttttttcattagttcttggaaattgaaattcccttcctaaaaggctacagtaatctataggaagatgtgaagctttgaccgctcaaaatgaagcctcacctgcagaaggtatagaaaaagaactagaaaatgccaaactgcggaataaacgaatgaaggtaaatcactttttgttatactcataaaaaagtttttttgtctaactgacatacctgcaggaggagcatgaatcagtacgtgagcttgcagatagactcattgaggagaaggatcgagagatatcgagacttgtggatgagatgacaaatcttcgaaaatctatggagtcaaaaccagtagtatgtggatggttctttttttttttttttttgcttattaccttacttctcctttttatctttggttttacgctagtaacttttcatttaatttgcactgaaacttttcactcttcatgtggcattaagtggaacaaatctccatcccaggttcaccactatgggaacaacaacacaggtacaagatgttttcctgataccatatttttttaataagggctccctatatgaatgaatcagtgggttccctgtcatcaataacctattattttctttaaacggggtttcagagtcacaacagcaggatgtatctaacttgagcacttctgcagcagagcaccagattctggtaggattttgtaatgttagctgtctgcttgtgtgagcaaggagcgatctttaatcctagaacttaatttccttcaaatgtaatgctatggcctacgggacaaatcagtgagagctaatcatgacacataataatcaaatttcagatattggcaaggcaacaagctcagagagaagaagagttagcacagacacagcgccatattttagctcttcaggtgtagtagaattggttgcattgatctgtttctgcacatgttgcaattagtaactgtttattctgaatcaggaggaaatcgaggagcttgaacgagaaaaccgtcttcacagtcaacaggtatgtgattacacgagagtttggttgctttgccagtttcttaggatcttatttcaaacttccggtggtatgctaaattacaggaagcagtgctaaagacggagttgagggagatggaaagaaaacagaagagagaaggcgtggatatgacatacctaaagaatgtgatattaaaactgctagaaacaggttaaaaaacctggagattaaaggtggattcacgaagtagatgttttaggggtaaattaacttgtgataattgcaggtgaagtggaggctttactacctgtagtggggatgttgctgcagttcagtccagaggagatccagaagtgtcagcaagcctaccatagctcaacaacagcggcaacaacaacagaggcgactccaagtccggcaagtgagggttcaggtctatcagtcttctcaagattctcgttttcatagtcgggtgggcactggacacattcttttgggccaagatacatacacatacatacgacattgtgtttaagtccttcgtttttgtgtaatgaacactaaaagtcaagaaaacactttttgtccagatgtaaagaaaggataagccactgaattgagttgttgggccatttttaatggagtctattgtaatcatgcagaaaaccgctgattatcggaattaatgaaactaaaaaagtcaacgcaaaattaactacaaagatagtataataataacggtcgtcgacttgttgttattggtcaaccgttatgtacggaatcaatttgaacgggtctcactctcactgccttgaaggccattttaattgagcggaattcatttcgcctactagtttcaaatctcgtaacgaagaaggtgattggttcttcttcctcttgctggaagccatg

SEQ ID NO: 1269 - DNA, 3000 bp, Unknown
  misc_feature (1)..( 3000): cDNA_ID_2105173_gDNA_ID_1620377_Annot_ID_155176 3000 nt of promoter + ATG
aatacatctctctagctagagaaaaagaaagcggaaataaagatataaaaatatttggaaagaaagatactgggagcaatttagctacagcatgacgatgagtcttactttgattctgtcaacattattaacctgagacaatcccaaaagtctttcgtcccaatattgaatcttctaattttgatatctatgtgattttgcatatgcactacctgagagaccaacagtacctagaggccaacttgtcctttttattcacctttcttgcatgacttttcctatgttgaaaagttagactcctcttttacacttcatgtaccccactcctatacgtatttaatctaaatatatatacccaccaatcctctccatctacacaaacagcccaaatatcaaacctttcatctctatatctttaaccttgactgcttctcttcttctacaagaaaccagaaaaaaagaaaagaaaagaaaaagaagagattagggatgggtttcttagagttgttggaggtggcttcaatgccaatcgttcaagttcttcttatcagcgtccttggcgctttcttggcaaccgattactgctctcttctctctgctgacacccgaagatccgtgaacaaggtcaacctccgtctctgcttttcttttttctgtttggtgtcaactatgcatgcattcatatatcatcactaacaaacattttccctcgcagctcgtcttcgtggtattcaccccctgcatcatgtttgccaaccttgccgagactgtcacattgcaggacattatttcatggtatgcactaccagtctcctatcatccctctgagaatacatacgtgtggctttgatttgaccaaaattagttttgtaggtggtttatgcccataaatgttggaatcacctttctagtaggaggcattcttggatggttggtggtcaagctactgaaccccaaacctcaacttcatggcctcataattgctacttgtgcctcaggtaacattaaaacctcaaaatttaatctcaaggaggagagatatatccctgaattctcacatgaatcatatttactgtcctgtctacgtaggcaatatggggaaccttatgcttatactggtccctgccatctgtgacgaggaaggcagtccttttgggaatcgtagtgtctgcagatccattgggctctcctacgcatctttctctatggccgtaagtcaaacatacatacatatgatcttctgatctctgctcagacttaattgttgagttgatcgtgtgattaatttttgtcaagggcagctcgggggtttctacatatggacgtacagttaccaactggtaagaagctctgctacacagtttagagctcttgaagccgccgggttggtcaagtctcccaacaaggacatcgactctgatccccacgctcttctcctcaagccgcaccaaaaccaagaccttgaaatccaaggcaaacaaaaagtgtctaccaggacatacatcaaggacttgctccatcagattcttgaggaactcttcgcaccacccaccattggtgccgtaagtctttttaaaaaaagaagacatgattacgtttccaaccaacaactaataaatccactgctctgatgcgttgttatatgttccattcagattcttggcttcgtcttcggagcaaccaattggctaaggaatcttataattggggagaatgccccgttgcgagtgatccaagactcagtaaagctacttgggtatgaactcatcttttttgaatatggaaattacaattacatcacgactttgcgcctaatagttgacttggcagggagggcacaattccttgcatcacactcatactggggggaaacctgattcagggtctgcgttcatcagctgtgaagaaatcagtgattgtgggagtgataattgtgcgctatatcctccttcccgtggtgggagtcggggtggtccaattagcaggaaatctaggctatcttcctccagaccctctctttcgatacgttctcatgcttcagttcgcactaccgcctgccatgaatattagtaattactcaagccatcccccttcacttcattgttagctagatacggatgattaatcatacactatatatatatggattgcaggcacaatggcacaactgttcgacgtggctcaagatgagtgctcggtcatcttcttgtggacctacctggttgcatctttagccctcaccgtctggtcaaccatcttcctctccatcctctcctgagtctgatttgaaaagaaaatggagtttgtttggtctcttgtatggatttttttgatttgttaatactctcatagtatttttgttcattcacatgttgccaaataaaacagagaaagacaaaagtatgtatgtttcacagtgttgtgggcttttactcagaaaaaaggaagtgaggtatgggctcatagagaaagagagagcccaaaattggagaggcgtgttcaagttggccacagaagaaggggagacgtgcgatgcatcctccacgttgctttgcttcgattggttaaaacctcttcaatcatttctgaaacttctacatttcttcacacctgtcctctcctccttacctgtccgttttttgtttattgttctgctttttgatatactgtatcaaagatcgattaattaatttccgaattcaacagctcattcattagttgattagaaaatttagtttggttaagcacataagtaacacgagtcaaatgtcagagttttgtttattgcttaagcaaatactactatttcttaaattgagaaaccccaaacaagagccaatgaaagttttgtatctttttcttaatgacttaaaaaagggaaaaagataaaacagatatcatttgaccacacaaacatatacaacacacccaatcagagatcgatcgccattaacgtagactgtgactctcggctcttcttcactctcaatttcgatcggc

SEQ ID NO: 1270 - DNA, 3000 bp, Unknown
  misc_feature (1)..( 3000): cDNA_ID_2133115_gDNA_ID_1620378_Annot_ID_155232 3000 nt of promoter + ATG
agaaaaaaatgggtgtacttgaaaacctttgggacgacgttgtggctggtcctcgacccgaagccggtggccgtggccatctccgacgaatctccaccagcttaactagcttgaacaataccacaggtgaaccaaaatattaagcaatagtaagcattagcggaaaaatgaataaaggaataattttgttccactaattcttcttgaatatagttgatgatatttatttcttttaacttttttaacaattagaaatttacccaaaagaatgggttaccatggtgaaattttgaaacagtcaataattaaatcatatcatattgttctaattgtcatatcatttaaatatatacattcctctaatcggagtgttacatatgtgggggtttagaaggaatgtcagtggccggatcggtatctcttccagcgagtccggctactccggtgacaccaggatctggtcggaaagtggatgtgtggaggagtgtatttcatccggcaagtaatgtgaccacaagggagattggtgctaatgtctttgacaaaccctctcatcctaattctcctacggtttatgactggtaaatgatttatattatcaattttatagttgcatctcatagattttaagatccaatttaaccttataggtatacattttttatatgaatctaacaatgggtattaagggttacaaaacttgtaattaaattgcgattagtttttttattgattacaaaaagtgtagttttggttgttgttgttgttgctgcatgacaggatgtatagcaacgagaccaggagcaagcaccgttgaagcttaccatttatcaacgcaccgtcaaattaataaatcaagagttcataaaattaagtcgtcaatttcgattttcaagatggttaaggttaataataatcaattgcgtatgccgtataattaatgttttaaataaatttgaaagacgaacgatcatctttattgatttcaaacaatctttataacaatctttatagtccaaaaagaagtttctaacttttgcatgtagcgttcaaaggtttattcgttgctgcccaccgaaaactcaattaattcttctcttcgtaaaccttagtgatgtaataactaacctttcgtataacaacgactctaccttaacatttttcgtaatatcaatcaaacttagctcgtggtctcgtggataccttttgtggttcaaatacgattctaacactgaatgtagtgttgcaatatttaaacattatgttttcactgataccgttgtacgcagtggactatcccaatacccgtttctcttttgacatctaaaagttataatttttactcattcaaaacaattcatgttcgaccaccgtctttcagtcctagttgtccgttgacatttcttaattcctagacacaatcaatttatgtctataagtgtagttaggttggatgacaataaactcacaagaaattaagagtagcaaatagaaagaaaaaatgattgcttgtctaatttttaaatgcaatcggatataatgttacctctcattaagttgttacaggaggataattttcttgtaacatgttacttttatgtaggaatcaaaatttataggtgtgtaaaattttgaatacatgattaatttttgatagaacactatatgatcaattaaatctccagaaaaaaattaggacaattctcaaaactatcacacttaggttttcgttttccaaaaatatcatttaagttttggtttttcaaaaatacaacaagactaaaactaaactttcaactttcaaaactaaaccataaatctcaaacctcaaatcctatctcctataataactctatcgtaaatctaaaatagttacctgaacgggcaaaattaagaatataaattctgaataaaaactaaagcttgaaagtatagtaggttgaggaatttctcaaaaaaaataacatgttatgaaattttttcattattctactaaaacttaaataaatataaaattatactattcctataaaagtttaataaatgataaaattagaactatgaaatgttcattttgttttatttccatttactaaatttgttttttttgttttattattatctacttaaaacatttctccatatatggtcatctacatataatgcacaacaaaatatggtcatctacaatattataatctatataaaatactgaaatcaattaaacattttattcattttccaaatatggtcatctacaataatatcatattataatataaaatattcattttccaaaggagtagatttgaatttagtaattttagccaaagaaaataagtgatggagaaaaatctcaatctctctctccgttgacgttggcggctaagttattagctgtttgcataaatatatgtatgtatagattgtttacatacacatctctttctctgtgtcaatgcagtgtttcttcggtcaaatgataccaatctgaaacaaagaaaataataatccaatctacttttatttttgcgtacatctctctccatcttccattaaagtcttaccctttcttcatcacttgctcttgaaattttctctcccaaaaaaggtcaaattccccacttgattccacttcccctttcatgggtttgcgtttgaattgtgtttaaagactttatatttgatcatcagattcaaattcttcatcaagatcgttgttttctctgaaagttgttgcctttttgctatggaggtattagggttctacagtgtatgaattggattcttcagctgttgttgttgatgggttcagttttctttcttgattgagtttgaatttgacatcaaagttttgttttttgctttgtgtgtattcagggatggtgttgggtctcgctgagccattaaagttgttgtctttgttatggatgaattagggattaggattttgagctgttgttgttgttgattcttctctatcgaaaagaagttgttatg

SEQ ID NO: 1271 - DNA, 3000 bp, Unknown
  misc_feature (1)..( 3000): cDNA_ID_2105896_gDNA_ID_1620378_Annot_ID_155247 3000 nt of promoter + ATG
tttttctatacaagtatcaactttccaaattatggagtgaggtttatccgtttttgcgtattttaattgatttggaaatctaaccaaaatcttgtgattagattactggtttattactaaaatattgtgctacaagtttaatgattcttaaatactatttaaatttttttgttacttcaatatttcatttcacattgaaaatttagataaacatttagtttatttttttctcaaatttttataaatgttgtgttcagatttgaattttaacacatttagaagaaaaaaattgagttaaattatacaaaaccttacatttaagggtgaactatattattttgaaaagttatctagagactaattaaattagatccacatgtagagcaaactttgtggtccgcatgaattagatccacatgtttcaaagtcaatgaatttaacaaagattcaagcccaactgaaactagtagagcaagagttcagtggtctctagcctatggcaatttaaaaagaaataaaactcttacaaaagagtttgtggcgaaaagtttcaatattttcatttttcagatacgtatttttaggtaactacttttaaaattctaaaaataggtccaaccgttcaaactttatatatttcgcacattaaaaagtccaaaaaagtttgttcgtactaaggttttcaattatattggaccggtcttgtgtaaatttcttaatcacttggactacacaaatcgtaacacaatctataagcttttcagttttccacaaacgccaaacgaatatttgctttgtttaaaacgttaagggttgtggatcatttgaaaacatttatactaaatgcaacaaaacaataacaacaaaagtgaactatgtttcagtattgaatatttggtttgttgacttcagaattgcagagaagagcaagtttcatggattccctgcaggtgtttacccgagcttaggcatcggtgggcatataacaggcggtgcatacggttccttgatgaggaagtatggtcttgctgcagataatgttctagacgcaaagatcgttgatgctaacggtaaattactcgatagagcctcgatgggcgaggatctgttttgggcaattagaggaggcagtggagggagttttgggataattttgtcatggaaaatcaagcttgttcctgttcctgaaaccctaaccgtcttcacggtcaccaaaacattcgagcaagatagaagtttcaagattctttcaaagtggcaagaaattgcggacaatcttgttgatgagctcttcttacgagtgttcttcactgtatctggaaacaaagcaaacaagacagtgacgatggcctacataggtcagtttcttggcgagaaaggcaccttgatggaggtaatgaagaaggattttccagaacttgggctaactcagaaggattgtatagaaatgagttggatcgattccattatttacaactctggattcccaacaaaccctcctcctcctattgagattctgcttcaagcaaagtctccaatcggaaaagtttacttcaaagggaaatcggatttcgctaaaaaacctattcctgttttagggctcgaagggatgttcaagaagttgcttgaagaagacgcagcgttagtaatttggactccttacggtggaaagatggataaaatccctgaatctgagatcccatttccgcatagaaacggaaccaacttcatgattcaatattacaggagctggtcagatagtgagaaaagaccaaacagacgcaccaaatggatcagagagttgtacggatacatgacgccttacgtctcaagcaatccaagacaagcatatgtgaactacagagatctagacctgggacagaacaaggacaactcaaagtctaacttcatagaagctaaaatatggggagctaattatttcaaagacaatttcaacagattggtgaggattaaatcaaaggttgatccagataacttcttcagacacgagcagagtatcccaactctgcccgtatgaagctaagctcatgacaaccacacacaaccatatgatttgagtaaccaactaggtgttgttatccgattgaaccgtgttttgcaaatttaattacatgtcaaaaaaatatgaatccgtatgaaatcttttaacgtaattgcatttttttgtcaacttaatggacggtaatccacaaaacaagctaaaacaaagtcaacattttcaagacatgacaaaaattgcctaactgtcattatccgccgattcgtttgactacgcaacatgccaacatgtaaattaatgtaggcatagtcgtcgaatcgtcattaagcaacgacggtcatattatggagaaacaaaataatcgtaattagtactacctctgtttcatattagttgtatttaaggtttttacacacaaattaagaaaacataaaaatctcatttaataaaaacatcgtttattataatcaattcaactaataaaaaaatagataattaaatataattggttaaaaaatattaaatacatttattatttgcatagaaatttaaaaacaacatttaaattgaaaaaaaataaaaacccttaaactacatttatatagaaacagagggagtattattaacgcaaccaaatttctaattagacttgactaatttaaggagtctcctttgatcacaatattttatcttcatataaagacatttcttcattgaaccaaaacaactattcaattccatcatgtgaaaaaataattgtaattagttgtaaactcaaccaccttatcttatcttataaaattcatactagtgtctaagcacgttacttccatattatattgtcatcgactaatcaaatgaatcttgttttgacaatcctttataagtatataaacacattttcttcattgacgctaaaaagaaaaaaaacacaaaactcatccatttggcttctctcttgcatattcgctgcaaggatg

SEQ ID NO: 1272 - DNA, 3000 bp, Unknown
  misc_feature (1)..( 3000): cDNA_ID_3061448_gDNA_ID_1620378_Annot_ID_155241 3000 nt of promoter + ATG
ttttccagcaccaaaatgttttaaaaccaagcattggatttatcacgtttaaacaattgtcaattttgtttaataattagttacaaactgcaattatttactatattttttttggattcggcatctaacagcacgcatcatcatcaacatatccacctctcataccagcaattaatatggctagttctaaagaggttctatgtgtgtggtatctcaaatcttaacttattagaacaaccattgctcacagtaaaagagtaaattaggtgaaacaattatccaacaagattaatgatgagtcaacaattggtcaagtgctaaaccaacgaccaaactgtactaatatataagaaatagaattaaccaattattatttcttattttgcttctgcaaatcaccgagaaccaattggaacaaagagtcattcacgtttatttcccttaactccatgtaatgcactttgcttccatgcttgtaggaactagtagtggttccaatttccttattataaatagaaaacaaaacaaaaagagatgcagaaaaatttacctctatcaattaattaatgacagttatatataacacatgcatgaggtacatcaccagtgatcactccatgttgggatctttatatatagtatgatcttcaccatactcaatcattgtatcaaatattcaagtctattgtttcacctccttcgctgattgaattcttgtatcactcttatatagtgtaaagaaaaagtctcaagcgcacatcattaataagagcttaagaaatcattagaaataattaaatatgatccaacctagagccaaactagttttattacaaaaatctcaagtcctaattacatcacttaccaaagcttcacgtcctctatatggtttagaaagatattaactattttttaaggaaaaacttccattccttggatttgaagtcttatgattgtctttctctccatattgtagtagaagaggtagaaaggcacagcatagcacgtcgccaacacaatttcatttctctgagtcactccaacaaggcgtaagtaagcatcccctatcacattatgccccaaagctggcaatacacatgtatatgctttgaccattcttgcttatcgacatcttctagaacccaaaattcaatactctcacttgatctataaataaatatagacgacgtattggacataactgtagctaatttaccattgtagtttattagggttccataacctttctaatgaaggtttccaaaccttcttcaacgaatctgaagttctcatacttaacatcaaagcaaacgaccatgaaatcctttaacaacccagtgactgtacctacgtaatacaaaacaccgttaatgcatatccctttatacaaaggataatgtaaatggggtctgcagcatttgatgtttctccatgacggttctccaattcctaatgtgagaacttgatactcttcaaaaccatcaaaccatgtcaataccttgtattgtttctcaacaggatcataccctaaatagcttatcatccaatcactactcgtttccactttgggtaagcttacgaatgtcctgtgctagggttacatatcacctgcaccacttccttcttttccttccttctattctttagaaggatcaaactattgacatgattacaaattttatagttatacatatcaagaggacgaaaactcatatgataactggcgacaagaggaggcaacttctcattcggattctgaggttgaggtgacgagaaaaagagcaacttcttgtcttttacgtaggcaaacaatagctgcgggcgagccaaatctggaggacgaagtatggatgcccaatgcttcgatacacatcgacatgtagctatagacttaaatggcaacttcgagaatatctcgataatgagatcaattggaatatgtaatgagttttcttttttattctctaagctctttggtcgcgtgtcgcgtaaggtaacggttagatgattctcaaagacgtttttttgcagtgaatttccatagtggatacactaaaagtttaaaccctagagactcgttcgttgtagagtaaaactagagaaactagggcttcagaagaaaaaagaacactaaaaagttggaggcggaagaggaagatgtaggtcttaactcttaattaatttagatcattcttgctgaaaatgatgggcctttttaaattattgagaggtcccaacttatgtttgttccggccttagtagggaccgcccctgagaacaaatcagtgaaggagagtgtgataaaacattttgaaaattttaatgtgtgtattagatcatttagagacgcttcataatatttgttttgctatactaaaagtaatgggcctttttcaactatcgagagggcccaactatatgatctctgtagtcaaaacttgtttaattatgcataatcgttgtatccaaaaccggtttagcagatcctgagtcgaatactattcaaattaactagaatgaatctctcccttcaataaattttcaattttcaaaaataatgtaatttgtcattatgttataatttctataaacggcaaaaaaaactaattttctttgtactattaccgaatatgattattctattcttgttattaaaaataaacttaaatagtaaaaatatcttcaagacaagtgggacagtacagatatattttgaaatcctccgctgtcatacagcgcagagtacaaaaacaaattatctaaaactatcatgttacaatgtacaagataaaacaaactataaggaccaatttgaaaataactattttagaaaacttattgaagaagacgtaaactatatatagctgattattacctattcaacaaatccctctttttaaacctattcaaagccaaggacaagaaaaaaaaaaaagagtcgcccattttcttctcattttttttttgctcttgacgaagaaaccaaaaaaaaaaaaaatg

SEQ ID NO: 1273 - DNA, 2341 bp, Unknown
  misc_feature (1)..( 2341): cDNA_ID_2106958_gDNA_ID_1620379_Annot_ID_155257 3000 nt of promoter + ATG
gatcacagagtatacaagtctttttgttactagtgttttaattgtttaatcaccattgcgtaatgggttcattacgacaaatctagaaaagtatcctctgtttcgttttactagttgacaactataaaggttttagataaagttggaaaataccatttggatttttgtgttgtcagtgtcacctgtttaaatacttactattttaagaatatactatacatggcaatatagcttattcgctatttactagtctcggaattcggaaattacaacttaagaggtcaaaaggttagaatgatagaccagcgaaagtacaaataagcaaatttataaaaatcttcgtttcgactagtagtacatatatttgacaaatattgacaaatttaacgtccatgaaaatgtgtactttttaagaacgcaacaaacaacagaatattttcttatctatattcaaaaaagttataagaagtcaaaacgttagaatgagagaccaacgaaaatactatagattagaaaaactactagtacatgttaacacataatatctgacatatgttacttgtaaacatatgaaacacttgacaaaatttaacattttatcaataacaaggtgtatttttcaaactccacaaacaatagaatatttgaattgtcatatttattaaaaggttttattagtaatttgttttatacctcacattctacaccaacctaaaatgtcaactccgcgatctatccgagcatgaaccagaacatagaattacttgaccaaagacctccgacatcaacggaacgttctagaaatttgaatttataaatttcattcaaaattggtttatcttatagtatatccttgaccactattctatatataatccgacaaaataaaataaaaatgaggaaaacaacgtggaaaaagagagaatgggctccataacgtttagatgatagaaaaatcttctggttgagattagttagccaaccatccccactccttccaatagtacccgccattttttcaattgtattgccaaatttagtaatttcacgcattttaatttatacaaaattttaataatagaaaaaaatttggttatcatatttttttttcggttcttatttttctctttattataatatttttttattttcataattttcttatcaacaccagctaattttggttcttcgatacatgctctttttatgcttttgacctgccttatatatactcaactgaaaataatgaaacaaagtaaaatattcgtgttccactaaaatcaaaatattttctaatcattttcactatatatcgaataaaacattaccataacatgaaaatctcaaaaagtcatatacagtatatgtaaatccacaggaagctaaaagatgatttttcaatattactatatttagagaagagaagatttttctgttagaacaaaaaagattgttatataggtgaaatgaatgatgacttcattgagatatgttattcttatccatttcttttgataaagatatatataataataaactccgaaacaaaaaaaaaggatcaaaaattgaagtatctctttacctttgcccacaattctagagagaaaaagagggtctgctttggcggttggaagtagcagttgctatcaaaaacattgcttcataaacaaaacctcaggtgttagattaggccaaccgttatcttctatatcttcttcttcttcttctctttgattcttcaaaccaaagcattaacaaataaagattcctttttgttatggtttgatttattggtcgccatctctcgcccaacttcaccttctctgacataatcactacaccttcttcctctctgtttctatatcagaaacttcatcttcctctcaagttttctcatttcacactcaaattcaattccctttgttcgtgaggttgaatttcggttgcaaacatttgggtttgttgtaaattaaggttccgtttgtaaaagagattcctttttatttggggaaatcgaggagttcgtgtacggagctgagtttttgcctttttgatggttgcagataaggtatttgattatattcctcagtgaagtttcatgtgtgttattcttttgttattgttgttgggtcatggaaatttcatgactttaattcttttttttctttcatgtgtgtttcatgatcatttcgtgtatatagttaaggttccatgtgtgtgtgctcataacttataaacctttgttgcagaatctcatttaattcttctctctatgcaatctttttttgtttgtttgtcctgtgaaggtctaaaatcttgaaggattcaaaaatttccgatg

SEQ ID NO: 1274 - DNA, 3000 bp, Unknown
  misc_feature (1)..( 3000): cDNA_ID_4370965_gDNA_ID_1620379_Annot_ID_155264 3000 nt of promoter + ATG
cagtcgacttaatcattaggggtgttgagacattggttatctttttatcttttttttttatgttttcgtttgaactaatattttggaactattttctggagtttatttcttctatcgcttgttttcgtgaagattttttctctgaattcggtttgatgacaaaggttctcttatgcacaatcttgcaaatccaagcttattttggttatgtagcctataactaagttattagtatgactaatatggctaataaaatacatgaagcagctccaaatcatattgttaagcatctcagacaacacagcttacatattctttacaataataaataatttattgttcgacataatactgttgttactgtttgacttagcgttaattttctgcacaaatgttgttactactttgattaaaaaggataatttgtgtaacaattttttggtcagttttaaaggttattattatttttttaaataacttttacgattagaatatgagtagtgcaacgcaaaataacactgccgtttaagacgacggtcccttgacagaatcttcatcaacgctcgatttgacgtctgccgatttccttagctccgacgtaaaccactgatcgtcggtattcagctatattttgatttctcagctccaaaaattcccaacgaaatggagaaaatggccaaaggatggtttccgatgagcggcactagtagcagcggagatcagcagcagcaaccgctgcaaacaggaggaacgtctctgctagctgattggaattcttacgcagcatcgagagattttgaagaagacaccggaactttaggcttcgatatcgaatccgccgttagatctgccaacgacactgtttccggcacctttaatgtgtaatccatccatctctttctcttaatctttaggggtttaacgattgatcgtgaccgtatctgagaaattaggcgttttcgcctgctattgaggattggattggtgtaaattaaatctggaatctgagaaattgtgattaaccatatagtttaagctttgccagattcgttgatcagatttacaaattctcagggtttgaagctattgttagtgaatgattttgattagtgtcttctctcaatgacttagaattgattaagagtcttaagcatatctttttcttgaagtgttactaactttttgattttgaattttgttgtactcaaatctggattgttaacagtgtttcgaaaggagttagagataacctgcagtctgcaacaagtagtatgccttcaggaaaagctttgatgtatttcggtttacttctagcaagtggtgtattcttcatcttcattgccttcaccatgtttcttccagtcatggtgcttatgccacagaagtttgcaatttgttttacccttggatgtggatttatcatcggatctttcttcgctcttcgtggcccgcaaaatcaactcgctcacatgtcatcggcagaggtaataactaataacaaaaccttgtgttgtgcagcttcttatatctgctgtatttcgtttacatttttctctttggaattttaatttcttgtttgctggcttctccagaggcttccactaactttaggtttcattgccaccatggttggcaccatatatgtctcgatggtgctccatagctacattctctctgtgattttctctgcattacaggtacttaaatttcatcttccttcccgactcttgttggtgtttatatcctctgtttttcatatgttaaaattttcctcttccccatttcacaaatcttacctatgaagttcttttttaccctgcatgtttcatctagtaagctcttgcctcgtcgaaacataatgtgtttagtaaaaaacatgtagactttcttattgctgttttaaaatacaagttgggttagtatgaattatgaagaagccttgaacgccatatctttggttggtctcttggcttgtttttgcaaatgcacttacttgcgacagaaacagctttgatatattattactcacccgttatcgatatggaatatatactttaagaactcactaaatcatatccttcatgtcggtttaaagattagtcacgtatctgcacattctgtaagtatagtaatctcataaaaaacctggtctctgttctctgtgaatccataggttattgcactggcgtactactgtatatcatatttccctggtggatcatcgggaatgaagttcctcagttctactcttacctcctctgtcttccgaatgtttgggagatgagctttcgctttgacctatgcaaagaaaataacttgattctctcgtgtataaagaaagatgaaagatcttcaacagtggttaaatgacaaatctggtaaaatatgttggtccaatggctcaaagacagttttgttataaatttcctatattgatactttctgctaaattggttcaaaacttcaaatcactagccactggatgaggtatggaacttgaagagttgcttggtggatacattctctaatctagggtaagtcgttagcttcaatgtcttactgtgaattattacatcagaattaagaaagttattacacgtatgttttcactgagtttactacactggcaatgtggcatacatctcttactgcaaattgcagacaagtggtcaatcaaatcttttttagttgggcccaaaatgtctgttattggatacgttgggccttaaaatggcccccatcagtcaaaaacatcactgcttggagaaggatctagaaaaacttgcaagttagttcaaacaaaataaaggaaaaagaacgatctagaagaaagaaaaaaaaaggaaaagaaacccttatggaggttcccacaccactctatatataataacatccttctcctaaatcccgcatcagtacttctctctgctctcaagataattttgttctctcaatttcattcttaaaccctagttcttcgattttttccgatctacgaca

SEQ ID NO: 1275 - DNA, 3000 bp, Unknown
  misc_feature (1)..( 3000): cDNA_ID_3061501_gDNA_ID_1620379_Annot_ID_155270 3000 nt of promoter + ATG
attggatacaagaaagctctaagaccatgagcacttcttagcatcaccacagctccaggagccatatgcttctctaaatgctcaatagctttgacctttgactctttatccatcccaacaagagctgccaagaaaacaacatcgtattggtctaacccctccttagcgtttaatacatcagttgtgtggaaaatcatgcgtttggaaaggtcagaatcacgagaaacgaggtttgaagcgagtgtgttggcgtgtgagtcgatgtcgaagttgtggaacgttgtgttggggaggtggaacttggccaagacgatggaagtaagtggcatcggaccggaaccaataaaggcgactttggtcgggacatgggttgtgtgttgagataggagatcgaattcgagtttgcctagtttgagatagttgttgtaataggggaagatgtgtaaatggtttagagggttgtcttcaaaagagcctaagattgctgaaaagtgttgctctaaataaccttcggcttcaccacaaagcttgatgagatgagatctcatgtctttgactttttcatcgtgtatctctgtgacatcgatgttcgtgtccgttggtaagcacgtggacacaagttgtctgaacaaagtgtcgacattcttggatggttttaagctctcgaggtttgagatttggttgtataagtccatgatttgcttcacaacgaggttgttttcgcaagccatgtcgacactatgaagagagaatattgagttttgaaattgttttcaatacttggaaaaaagcttgtgttgttgtgttgccttaaccctcgcaaggggtcgttatttattgacgcatgtggggtccattcttggctaaattttgttattttatttatttgattcgattcatataggttacaaatatttcctctaggtcattttaatgtatgttttagaactattgtttttttgtttcaaaacgtttcgtttccaaataagtcctcacaaattttataactgacctttatcattactatcctcaaaatagtaaaaataccatgtacaacttaaaaaatgtaaaaagaggacaatactgttacctattttcacattgcttaggaatgagagtaattaatggctgatcaagttactttagtcacaaattggcggggaacaagacaaactagtaacttatagaatcatatacactcttcaactaaaaatcgcgatatgttccatttatggattttattgggtttggtttcatgacgaatgaatttaccaaaataataagagtttaacacacattagaattggcttcttttgttacacataatagttttagacacatattttgtaaatcagtaaatggtaaatgccaacatgcaacgcaaacatttttttcttttcattttgtttatcgtgttttcatttacaaatttttaggtctattaattatagttataaggtaacggaaatgaacattttaactatattttcatgaagaaaaacgaaaaggtaaccaaaactcaaaaaattaagagtaatttttctccacaaattcacattaaatattagcgttactcgtcgagtgtaaatattccattagtgatgtgtgcgtatgcgtatgcttatgcttgtcattacgtaatctcactgttatgcatgaatggaatctaaaggaaaatactacgatttagtcattatacgtgtagtcgtgaataattgttaattgtatcaatcatacgagataacgtatagttagagttggtaatttaggcatgtctcataacatttttaagtcgccacgaaaatgcatcatattttttttttttttttaatgtaaaagaaataaagatgaagtaggtgatgatagcccgaaaaaataatgttctatctgaattttatattatatactgttgaattctaaacagtcatcaaacttaaaaatcttagattccattcactactcatcacatgctaatgctttgttgggaataaatctcagtcctttggggtcactcatccaattcagacatgtttttgtttttgttttttgaagaatattgttagacacgtaaattaattgaactcgctataatatccgaatcaaagtttgtattctaaacatgttttttagaactgaataattctgaattacatataaaaaggaaaaaataaatctgttttattaaagcaccaaactgaattaaaacatactactatataggttttgcaatagactgatgttacacatacattaatttatatcaataatgcctcttgcatgaaatgaatggccaattttacgtagctctcatcatacgttaaacgatcctataaaagaaagaagcggttctgttttcagatttgaatattaaccgtactttactaagatttatattcttgtcaaaatgcatctattaattatctatagtagatatggtaatgctataccctttaaattaagtgcgtatacatcatggtcatgttgagtttgagtgcgacgatccacgtagtcatatactcatatggtatcaaaatttctggagatttagtatggtaatcgaaaactcaaaaccctttatgatttttttgttaaaacttaaaacaaaacctttaataataaataaaatttgataggtatttagatatgtacttgcatattatgtcggacttttaaaataaaagtttagatcgtttgaacatccaaaaatcattaagtaagtcagataaaaaaaaaaaaaattattttttttatcataaaaaattaaaggaaaaaaaaaattaattgtttttttgctattgatgtatgttgtttcctgttttcgttcaacacatcgtgtcgtttttatacccggacattgttagtgtctaccatatagccaccacagcaaaacccgaacccggaaatattcgggtcgggtcgaagttgcagaatgagatttgatttgccatactttttgtcgcctgaacgcaaaaaccttgcttaaaccctagagagatagag

SEQ ID NO: 1276 - DNA, 3000 bp, Unknown
  misc_feature (1)..( 3000): cDNA_ID_2133326_gDNA_ID_1620379_Annot_ID_155275 3000 nt of promoter + ATG
aattgatgtaattcgggattagaattctgatcttgatcttattaatttcattcttcgttaataataaacaacattgcttgtatagtaacaaatttttgcaataaataaaatgccagattcagaactgcaaactttcaatgtatttagtgatactgtaagattattccaacttgatatactgacaatacatatttaggtacactaggcacataaactttttctaactcaacaaggaacaatcaagtggagttgtgtatcatgtttcccgattcagtgctctgttcctacgagctctcaaaaccaaatatccggaaaacacctgcaaagagatccaagttgttgtcattgttcattttctgctaccaatattagagttttgagttgttgctaacaatgaagtactaatacgcggtagtaccttcatcagtattatacttgggattcttgtcatcacctgcatatgcaagtaaattgtatttgggattccactcaacactgttcatggctgcccgacatggaatctgatgcaccgtccgcccggtttggacattagcctgtttggtagttagtggtcagatacgaggaactaatctcatattgaggaaactacattgaaattagcagtgtttaagtctgggcaatcacttacaatatcaatgaataaatcttcactggctgaagcaatatactctcccgaatagttgaagcttattgttctgactggccacctgtgagaaatagttataaattactaacatgtaacagaaattaaacctttttctactctatggaaaattcatgttgatactcactcaagtttggtaaatgttctcaaacaaagcatgtctgagatatcccaaaggcttactaaggaatccgcactcccgacagcaaaatatctgttaaggtaaagaggaagaattagatgcaaaagcaaaaagattatcattcgtgtctcagaggccagcccacaaatgtaaatatatattacctccctttaggatcaattgcaatacaataacacccggctgtgtgggctgtgagagtgtcaagtggtttaagagatggatatgaaagaacttcaacagtgcctgagcaggacaacatacaaagtaactttcagtaagatcattttctcaagttcaaaaacaaagaaatctttggtagggaatcgtgtgcaggaaagtacagaatttaaaatcctcaccaagtccagtagtcaagaagaaaaaatctccaggcatgttccaagcaatctcattaacctgttacaagaagacaaaagataagagaacattccatacggcaccagaaaattacttgacgattattacatgaacaaggaacttaggtgacatataaccgcatgagcttgaaacaggagatacggaagagccttataaaaaaaaagccattaataaagattaacatgagtctgagcttacgttacctcataattgaatttgcgcctgtgtagaggtttaaacttacggacatccagaattgtaagctcatcatcctacattggccagtaagagaaaggacaacgactatgaaaagggatctatcaagtaatccatagacagtaagaacaatgaaagtgtaaagatatggggctcgagacaataccctattaccaacagctacatgtgtcccgtcaggtttgtaggtgatgtttatattctctccactaagttctacctgctgtgtgcattttccacctgtagaactcgaagaagacatatctcagcaattgatagtaaaacatacaatagtagccacatatcaaaaacctgatcaaattcctctcttatggaatctggctaaataactaatttataattctaagaaacttagatccgatcctcatcaatcaatagtctccgcgatatgactcaaaagcaaaggccaagattgcgagaaatatttgtgaatgacacatagctaatccattagaaaatatacagatttctaaaccaagctccaggcatatttcaggagcaaaactaaacgattaaaagaatataacttactgcgagcatcccaaagacgaacgcttttatcaccagaggcagtagcaacaagatctgaatgtttgggatcccaacatagctgatccacactatcagtatgaccctttagctcaaggtccttagccttgctctgtatccacacaccacacaaacaaccaaattacaaaaactacataactcaaaaagtaacaatgacaaagataataatcgagttttaactcaatctacaatacttctccatatgtattcatcatcatcaaaaacacatagaagttcccatagctcaaaaaggtaaagaaattacatgaccgtgtggttcgatattccaaatgcgagccgtttgatcaacagaacccgaagcaagctttgttccattcgaattccaagctactgaatgtaccttcaatccaaaaattcccccagattcagcaaaaaactagggtttcgcaagttttattgagtacagaaaattagactggagatagaaaaaaaaaaccttcttcttatgaccttgatattctctgctatgtaagctcttgaaaggaatcgtcgtctcctccattttttaattctcaactcttcttcttcaaccttccttcgcggcctactgaatatcagagcttcgcttcctgaaacgcagcgtttagtcattccggtatagataaaccgaatcgaattttagtaaaccggatgtaaaaaaccttctagatggttaagagtcttcagagagaaactaacaagaagagcggtaaaattgggtaaaatatgaaacaaagaaaaaaggtgaaaaaaaaaacagctaagcaaacaacaagtaatcatttcacagtctctataaaatgacctcttaaatccaccgacgttatagagagacaacaacagctttggttctgcctccgccgcttcttcttcttcttctaatctccgacagatttactctgattctgttgtcttcgagatgatgatg

SEQ ID NO: 1277 - DNA, 3000 bp, Unknown
  misc_feature (1)..( 3000): cDNA_ID_2133334_gDNA_ID_1620379_Annot_ID_155277 3000 nt of promoter + ATG
atgcgtaattgcttgatctgtttctgaattgttcgttgattttctctctgtttgatcgaattctgatcggattgtctcttgggcttgagtgtttgatttcgagatttttctggttgatttcttcaggaggtgtatcttaggctaattatcaaagctgatttgcataaagtctttccttttaggatagctatgttcttgctccatatgttaactggtttttgctgtgtactgcttttgcatctgtacttgtagcagtatagtaatttttttgatttgattttgttcctagctagcagaagctaggactattcaatggcgtcgaaaagaattaacaaagagcttagggacttgcaaagagatcctcctgtgtcctgcagtgcaggtgagtgttttaatctatgatatctactgtgaaatttaaagaaccactttgatagattcagtagatgatgtagcattaacctcagaatcagttttaggagaatgtttttttttttgtccttaagatacattatgagctatttagattttaatgaattggtgatgttattaggtcctacgggagatgatatgttccaatggcaagcaactatcatgggtccagcagatagcccgtttgccggaggtgtgtttcttgttaccattcacttcccaccagattaccctttcaagccaccaaaggtaacagaagttttttgttttttgttatgtttatttgtgtagcttaatgaatttgttcatccacaccattatgatttagagagagtgttcaatcaagtaggctttttgtggcaataaaccttcattgtttatgatgcaggttgccttccggaccaaggtttatcacccaaacatcaacagtaatggaagtatctgtcttgacattctgaaagagcagtggagccctgcacttaccgtatccaaggtgatcaaattgtttcacttccttactttttagtatagcattagtctattttccaccacaccttcttgtgaccatgtcttagttaaatggtcatgtcttagttcgttctctgatgtgattatcttctttgaccaacctctctttacattggttttatgaacaaacaacatcgcaatcccttggatatagtcaaggccattatcataaaagattgagctctgttatttgtacccttgtctaaatgctgtgatatggattagtcaagtaaattctagttatctcttttaataggagtgttacattatgttataatgtttaaaggccttcattatcgctgttgatgacatgttatctagatttaatttgtttaatgactctcattagcgagacaatgataatcttttatttgcatataagctgaagaactaaagttggtggtgcaatttccgcaggttcttctgtcgatatgctcattgctgacggatccaaaccctgacgatcctttggttcctgaaatagcgcacatctacaagacagaccgagtcaagtacgagtccacagctcaatcctggactcagaagtatgcaatgggatgataacaagcaataatacccaccaccagtacattgcgtattaaacaggagaaataagaaagaaagaaaaaaactcagtttggcttttactttggctacttttgcttattagttttttttttttaattatatcttgaagctgtgtgttgggtgtgtacatgagctttatgccttatttgaaacattgagatcttgcaaatgcttttaagccaataatccgctatcatgatgagtcccttgctagtagtgtagaagaatatcacataagtttgcagataataaaacatttgcgcataatagtgattgtgaaattagattggagttggaccaacacattttggtgatcgtgacaagtttatacggtgttagattcctattggcaaactactataaaagtcttgagaatagaataacaactgaatatgactattgacttgatccatttgtacggttttctctttcttttttatttgaaaatttcaaattgggtttggaacaagttatatttaactggtttacgaatttagctacttattcggtctttttcatagctgacaaagatacataatgtatatagctgttaaataaaaaaatgaattccgtgtgacttcaccattagaacgcgtttttggttgggtgaggtctgatgtgcatcagaaacaagtgattatttggggggaaataaataaattcgaagaagaagtgtttataaatttaaatcaaaatgttgaattcggttaagtttggtcgaccatacgaagcttcaaatattgatgacatttaagaaagaaacgcatgaggtaacagtgtaactcaacagttaatgcgaaatacacgaatacacgcgatgcaaaaaccgcagaagaaaacgtgcgcaagcaatttattaccaaattgatcccaaaacgacgtcgattcgattcacataaaccaaaacgacgtcggattgatgcaatcatataaaaaagaaaggcgtggaaggagttaataaaacttggaatgagacatgtcggccatttcatggtgttaagaaaacagagccctcaaatactttttaaaaagaaacagagtgcaccaaaatcctcttaattttctcaaaattcaaatctctctacagatcatctgagaaattttagattctggaatctatttgattgtctctctctacagatctctctgtatatagaaagaggtataactgtctatcgccatctttatctccttggctttttctctctgttacaaactattcttcctatttttagatatcttctctctttgtaatttacctttcgttaaacactttaaggattcattagggtttttgtcgatttccttctgcattgcttttccttccttttggaggaatttttaggtctcggagttttgatttcgacctttaaattttgcttcagaggagagattctatccgttacagttcgtgaatttcgcgtttgaagaacttgaacttgattctgaaga

SEQ ID NO: 1278 - DNA, 3000 bp, Unknown
  misc_feature (1)..( 3000): cDNA_ID_3061490_gDNA_ID_1620379_Annot_ID_155280 3000 nt of promoter + ATG
ctgaaatttcaatgcaagagttctgatattttggagcaatatccatcagaaagcactgaagtgtgaacaaggcttacctgattaactgcacacactgcagggacgttcatgtcaaacaagacattgaaaatagcagtcttaagttgccgccttgatgccttggctgattcagtatctgataacaaatttaataaaaccttaaaactggaaccacgagatgtaatcctgaacataaacaagtataataacagtagctaaccatcaaaatggcagagaggtagtgataccactattggctgcatagagggctttacctgcatcctgtaagcaaactatccacatgaaatcgggaaagcaaaagccatagagacaaatgctaaaatcattcagctgtcactccaaaagaaacgaaaaacaaacctggtgaaaatggttgcaaagaactgttgaagtctagcataaatcggtgactcaatgttaccaaattcctggcgatcgatcaaactagtaagaactatcttgtgttgcaagagagaagacgcaagcttactatctttgtaaatataaataatgatccgcatttagtacaaaaactatctcaccaaaaaagtagcagaacgtccagaaggagacgcatacttgctccaaccaaacttacaatatccagaaccaccttcaatgagtcgtagacgacacatacagaaacaaacgagacatattgagcacaattgaatgacataaatctatatgattatccagaaagaaaaacaaaaacacaaagcataccatcaataatgatagaaccaggaacttgtgccctctgactataaatgtgcataaacgacaactctcctgattgactagaaatcattctgcaaaatcgttaaactttgaatcatctacaatgttttaacactgaaactaccaaattcaaaaagaaacaaaattcaaaccccatcaccaaaattctctaccgataaaagcaagcaaaaaacactcaccggagaggataaccagaacgcaaactagtttcagcgaagaaaatggagtcccatggctcttgagaacactggagataaaatatccagagacgattaccactagctacgcatttccaggctttgcacgttaagcccaatttcacagcatcttttggctccatcatcatcagtatctggactagaatatccatcggtagctgatcaaacgcaccaagagacgatgaagaagacaataacagaggaggaacatcgatcgctctctgatgattcaccaaatccttgccactattcgatcggttccacaccgatccccatactttcttcaggatcatcgtcgagtttgcggatttttgttttttctcgaaatcagaaattttcccaagaaaatcgaatcaggaaaatttgataaacacggcgttttttctttggtgtgacgtcgtttctagttgggatgagactgactgacgtgtactgtttaatataatgacacgtgttcaatagcgttgaagaattttggtactggctcactaatgtcaataatcataacgatattttgtgagcccaattggaaaaaaaaaactcgaagtggtcaatatcacgtgctcaacttttattgttgttgttgtgaattacaaaatttcatagaaacagaaaaataccaataagtattgtttttagtggatttttcttaatctggtcgactccaaattttgttattttgttgtgagagcagtcctcttcctttttaagagtgttttgttaccaggcctgatcatttggttcctctttaaaagtgttgttactaggcctctgatcatttggttacttggatcatttttggatcgtatccattcagattcggattttgggtcttgggattttggttttgttaagagattttaattttcggtttcgatttggttcaattatatatggttcccaaaaatatttagttctacgaaaaaaactttcaatttcaaaaccgtttataataaccttagaaaaagtattttgttactttggcttccaaatttttagaccggcctacgggttaccattcggtttggttcagacttggtactggttattctagtataggaatcgagattctattcggatatttatattggtttattatgttcgggaattagtccgggcctagttgttaattgggttaatatctgatccaaaccaatttggcaaaaataagtaattccatgatgtatctgacacgtggatactaggtattggctgctattagttgacgtgtatagtatttgaaaaaaatgattaactaccttttttttatttacggagcatagatttttttttggagaagctgtgtataaattggatcctcagatccggtgattacctaaatcgcgtcaattctcaacccagttttcagatttggtattcgattttatttatgtaattctcatgttatttatcttttctgttgaaacctctctttctcgaaactactaatattagggttttctgggtttgagaccacgatcttatcgaattattaatatcctttttttttcctgtttcaaacatagggttttagtgcatgagatcgaataatatttatttttgtttccgtttctagggtttattcaattttttgcgtttttacgttgcaatttttattgaaattcagatttctggagaagtgaattttgcggtaagcgtaatttagaatttgtaatccgtattctcatggaggattcgaatataatatgagctctaaattgattttatgtttgcaactttgttttgtttatgtttttttttaattggtttgtgaattttgattataactaaatttatgaattttgcatggttgtgaattactatattgcaggtttttggaagctaacttattgttggaggtggagagatatggctgactttggtttgttctgtttcccttgtttaatggaagttgtttcatcatcatcatcatctctgtgattgtaattgatctcacacc

SEQ ID NO: 1279 - DNA, 3000 bp, Unknown
  misc_feature (1)..( 3000): cDNA_ID_3061494_gDNA_ID_1620379_Annot_ID_155279 3000 nt of promoter + ATG
gtgcgtgagcagaagctcacaccaggtctatcgagatgctggttgcagggcgcaaaaaacacaaaattagaacatgaataagcaactaactcctttggcattttaaatcagtgaaaagagacttcatagccagttggtggaatcaccgcggtttgctatcatcctaaatatccattttcaaagcctctaaactaaccttgcaaatgagttctccttggaatccaccagcaactagtagcctttcttttactgcaagagtgctaacttgagtctctgtaaatccttccaacaaactctcgggatgtttctgaaaaatacggaacatcggttttagctaaacccagcagagacgaaaggaaaccacaagtcaaattaattagatggtttagataagacttgagaaacgaacctcagacggagccacatgacctttaacgttaagaatttcactcctacaacctgtcaaagaagaccagtggctgatggagtagttggacaataaataaacatcgtgttttgaggtagcccagaccaaattcctcaactgtaacaaagaagcaaacataatttagtcttaactatgatcagcttcacataaaactatggttccatcagcaatactagcacagggaaggtctacattatgattaaaaaactaccaagttacatttagaaaccccgagagagccaccaaattgttggaagcataatagagacaggggttatataacgcactagacaaacctgaaaatggagaatcgttgatctcacggatctagaattccttctgaactcatagaaagagctgcctttctcagtattcatgcatttctggttccaatagacaagactagagtgagaaaagagcaacataggtgcatctactaataaataaccttaaagaaacatgaaatgtaattcaccttggcagattcatcaccagaattgggtatattttcatagtttttatattgttctagcctagtttttctgtaatcttttctagtaagagtaagactatcccacggtataccctgaatatccttcccattccgtgcttgagcagcagaagtatctgcagccttgttctgaaaacactccatatacaagcaattgtgtgttaagaaaaatatacagagaacacaaagctgaagagtgtgagaaacagaggaagaagacaaaccaattgatcgaaatcttcgacttcggaatcagaagcatcgatatctcttccatcaaacgcggcattcatatcatcctcgagatcatccatgtcatactcatcagccatatattcatcttcaagatcatcaccattgtaatcagacatggtgtgagatcaattacaatcacagagatgatgatgatgatgaaacaacttccattaaacaagggaaacagaacaaaccaaagtcagccatatctctccacctccaacaataagttagcttccaaaaacctgcaatatagtaattcacaaccatgcaaaattcataaatttagttataatcaaaattcacaaaccaattaaaaaaaaacataaacaaaacaaagttgcaaacataaaatcaatttagagctcatattatattcgaatcctccatgagaatacggattacaaattctaaattacgcttaccgcaaaattcacttctccagaaatctgaatttcaataaaaattgcaacgtaaaaacgcaaaaaattgaataaaccctagaaacggaaacaaaaataaatattattcgatctcatgcactaaaaccctatgtttgaaacaggaaaaaaaaaggatattaataattcgataagatcgtggtctcaaacccagaaaaccctaatattagtagtttcgagaaagagaggtttcaacagaaaagataaataacatgagaattacataaataaaatcgaataccaaatctgaaaactgggttgagaattgacgcgatttaggtaatcaccggatctgaggatccaatttatacacagcttctccaaaaaaaaatctatgctccgtaaataaaaaaaaggtagttaatcatttttttcaaatactatacacgtcaactaatagcagccaatacctagtatccacgtgtcagatacatcatggaattacttatttttgccaaattggtttggatcagatattaacccaattaacaactaggcccggactaattcccgaacataataaaccaatataaatatccgaatagaatctcgattcctatactagaataaccagtaccaagtctgaaccaaaccgaatggtaacccgtaggccggtctaaaaatttggaagccaaagtaacaaaatactttttctaaggttattataaacggttttgaaattgaaagtttttttcgtagaactaaatatttttgggaaccatatataattgaaccaaatcgaaaccgaaaattaaaatctcttaacaaaaccaaaatcccaagacccaaaatccgaatctgaatggatacgatccaaaaatgatccaagtaaccaaatgatcagaggcctagtaacaacacttttaaagaggaaccaaatgatcaggcctggtaacaaaacactcttaaaaaggaagaggactgctctcacaacaaaataacaaaatttggagtcgaccagattaagaaaaatccactaaaaacaatacttattggtatttttctgtttctatgaaattttgtaattcacaacaacaacaataaaagttgagcacgtgatattgaccacttcgagttttttttttccaattgggctcacaaaatatcgttatgattattgacattagtgagccagtaccaaaattcttcaacgctattgaacacgtgtcattatattaaacagtacacgtcagtcagtctcatcccaactagaaacgacgtcacaccaaagaaaaaacgccgtgtttatcaaattttcctgattcgattttcttgggaaaatttctgatttcgagaaaaaacaaaaatccgcaaactcgacgatg

SEQ ID NO: 1280 - DNA, 3000 bp, Unknown
  misc_feature (1)..( 3000): cDNA_ID_1032019_gDNA_ID_1620379_Annot_ID_155276 3000 nt of promoter + ATG
gtatgactactaaccattaacataactctctaattcatactactgcaatagaagttttattgacttaagttataatactgacataacatatttgactgcttttagtcctagtttatcatgacaggtaggctaacacttcatatccgtaatgtttgtatgttcataccttagatcaacactaattagatactccactatcctcacgagtaggattgaaattaatgctataattttctcatatatctgtggtcactgtatgcatattattaggatataacagctacaggttgaaatgccttgatacagtgaccactctcattgaatgaagttccagggcaagaagttgcagtattcatgtgcttatgcttaaaggttgatcttgcttctaattttgttggttgatcatttgcagagatctgttccatcatctccgggaccaaattggcttaactcacctggtagttcgtccggtctcatcgccaagcgtacaatcagggtcgatattccagtcgacaattatccgaatgtatgaactttcatttctacactgagatatactacttcctggttggaatgtaactccttaattttctatatggcagttcaattttgttggtcgcctcctgggtcctagaggaaactccctgaagcgagttgaagcaagtactgattgccgtgttcttataagaggaagaggaagtataaaagatccaattaaggtatttattattaaactttacaacttcatttgtatctacatttcaatgtttgtacaaggtgttaatatatttcttcttgtaggaggaaatgatgagaggaaaaccgggatacgagcacctaaatgaaccacttcatatcttagtggaagcagaattaccgattgaaatagtcgatgcacggctcatgcaagctcgggaaatacttgacgatcttcttactcctatggtttgtttttagctctccccctccctttgattttaaaccagttattgttacaaagttttcacactcggtttctgttttataggaggaaacccatgatatgtacaagaaacaacagctgcgcgagctagcattgctcaatggaactcttcgtgaagaaggatctccaatgtccggttctgtttctccttacaatagccttggtatgaagagagccaaaacaagagaagggtaaaaaccatcgaacagtttggctgtgatcataaagcaatatgaaaccgatccaaaagtcgacacaaaaaggccataccactcttgacgacacggtactgtctcttgtccttggggtagaaatgttgtatatatgatttatgaaatgtgtttgtcagtctatgtatcattgtcccggagagagatcagatgacaaaattgcaacggaaacacaagagctgatgagtctctgtctctctccgagactttgattttgtttttgtttatgtttttatgtctggaaagttgggttccaacagttttcttttaagttttttgtttatttgttgttttagcaaaaagaaaacattaaatcatgatgatggtttgtgtctggtattggtaatgataataatcataatatgttttggatacataaacgtcaaagtaaagcttgtttcaatatgatatgtggaattatgtaaagcaaatgttctgttctcgagtatttttcacatttttattactggaagtcgacattttctattacatgtcaactctgttttcaacattgaaagattacttgattaaactttaaacagatctatatatttaagtaaatcggttagtatacccatatgtcaatcggtttaatggcctgtgacccttataacctagtttcttgtgatgcaaggtagctttcctttactgttttacaaaaaaggcctattcaaaaattgttatgtactttatataaaagataattttaaaatcctatcgaatttggtaagagtaacatcttacatatgaaatctaccattcacaaatactactttattagtaatatgcaaatgcataacaatttttgtaatgtatagattttatttgcatataagaaagtgtttttcttttcatataagaaagttttttaagaacaaaaggaacatatgtcaaaaaaaattgtgataagttttccacttttcccttttccccttaaggtaccaaatctttgcaatctgaaataaatatcattttcttttgatttcctgtttcttttttgaaaatttcttgtttaatccttcttctattttctttttccaaatttgcataacgtttcttattatggacaaaagagtcaatgggctccgtcagtaaacgattgggccttattatagcccataagtacagaatctagctcgctacgtggcaaagcttcaccgctcgaaagagaggaatctatataaaccgtatcgatgctaacaagtttcatcttcaaaacaaccccttgagatttccgaagatcatcaaatccaaaaccctagaaaccgaacaaaaggtaggtcaaaattagctccgataaatctcgatttcgatttgaatcatcgttactcttagggtttattcgtttcccagttcttgatcttcgtcgtttgattctctcgcggttttgtttccttgcgtcgatccatgtgttttttctgttatcttggttctagaatattctcgtacctacttctgatgatttacctttaactgatgcgtaattgcttgatctgtttctgaattgttcgttgattttctctctgtttgatcgaattctgatcggattgtctcttgggcttgagtgtttgatttcgagatttttctggttgatttcttcaggaggtgtatcttaggctaattatcaaagctgatttgcataaagtctttccttttaggatagctatgttcttgctccatatgttaactggtttttgctgtgtactgcttttgcatctgtacttgtagcagtatagtaatttttttgatttgattttgttcctagctagcagaagctaggactattca

SEQ ID NO: 1281 - DNA, 3000 bp, Unknown
  misc_feature (1)..( 3000): cDNA_ID_2133315_gDNA_ID_1620379_Annot_ID_155272 3000 nt of promoter + ATG
aagactgaaaaattacttaaatttcagcttgatcatcgccttctggcaaccacaacattaatcgcaatcggaacaatgtggtggttcacaaggaagctagacatacatccagctgttaaagctttgatcggaagtactgttggaatgactgctgttcaggtaaaatcaatcatcataaactttaatggaaacctaaaatcaaaaccattgataaggtttccctttttgtattttgcaggtgacattaggtgtatcaacgcttctgagttatgttccggtttcactaggaagtgcacaccaagcaggagctttaacacttctcactttgatgctacttctcaatcacactcttcggaggccatcaccttctcttctcaaatctcttccacaagttgctaaatcaaatttcagctaagccctcttcaccaaaatctttcctttttcattatttactaaaaaaacaattctttggctcactatgctactagcaagctttcatcgaatcttgtgtcaatgatgttgtatggttcgaaaaataaagtacaaaaacaattaacaaaagtttcatatgaatcccagaactctgataactttcattgatagcttcgtgttgtttgtttcattgccaatagaaaatcattggataattctagttttagagtcaataatttcttataccaatttggttcagtggtaaattttagttcggttttagtttagatacgattcggttaattcagtccggttcaaatccgtaagccttgtggttgtggataatgtttcgagacagttttttggcgttttggatatacaagactatccacgtgtcgtaatactgtagcttatcggtatccacgtgtcagtagcctaccatcttcctttctatatagccatggtacaaaattctttgttcaacttcacactactactatggagaatcctggaggaaggagaagaagagacatagccataaccgatggagaaagaacgaccggttcttcggttgtggctgcaaccgtagcagctgttgcagtggtaggaccgctttttggtctgatgagtttcagctttgtggcgacggtgactctgtttctgatcgcttctccattgctgctgatatttgctccagcttttatggtaacggtagcggttcttgtgtcggctatggttggtgttggggtagctgcagccatgtggatgatgggaatagccgctttggtatgttgtggccgagagattggtattgaaaccggactggctgggaggatggttgagtcggtggtgagagaattaggttacggtcggagtcgttacttgcgagacaaatcagaggatagttattcaacttcttctccttcttctcgggattactcttcttcttagttcaaacttggaaaaagtctcatgattcatgggaatttcaagaagatggtgaataaagaaacaaaaaaaaacagagacatggctatgataagaaaacaaaattaagtagattttttcgagagtgaaaatttgtaatatctatccaaagaaaatctagtaatgctatatcatttttttcaagttgtgttttttcccaagtcaagacaaatagcaaacagatgaaaaccaaaaataatagaataaataaattgtaagtttctttaggtcaaaacagattgttaagtttaattgatataataattttcaaagataaaattaatcacaagttgtgggggatggattatccgaagtacaatcaccatgtctatctgaattgtttgaattatccaaatccacattatccggattattatccatattatcgaaaacatagttttccaattttttttttttttttttgataaaatgtgaattatattaccaaaaggaaagaggttatttacaaagctgggggcaaggagcttctatggccaaaaaaaaataaaaagccttagataactattacagagaaactgaaactaattttccaatgttaacaagataaatacatatatgtctgtaaagtataatgtattaattatcaattgattttgaattagaagtctaagaattttataagtgtctctcatctaattttcaaattcaaaagtatactactatatctattccataaatattactatatatttacattttgatcgatattcaagtttgtaataatgtggatttaccactacttgtttacaacaaaagatgacacaagtagggtccttcgtgatttagaacaaaaggtacaagttcgtacgcgaaaaaggtacttctacaagattctgtgcttttcacgaatgctctcatagtctcactaatgcacacgaacgctttcgcaatattctccgtacttgtcggtacttcacgaatacattcccttacaaaatgaaaaaaaagttgtcataactttttaaaaaaaatcgtgtcataacttcaatatgatcacaaattatattaaaaaagagtacaatttcacttcataatccaaaggctagtttgttatccaagtcgttctaccaatccccaaaatgtttaaaagttggagtttgcatagagaatatcagaagaattatataatctaagtgtaaatatatgaagaatataattttatgggtgaataatctgaatgtaaaaggagttgaccaggcgttgagtgggtgacctaccggcttaagggaatcacacgctctgtagcgttgaattctttaaagagtttaatcaattcatgcacatctgatgctaatttttactatgttttcatttttgttaaatcaattttattatatatatacatacatttcctttcttcttttgcaatttaaaagccttgattacaagaaagtacaaaaatcaaaagtttggcagttttaattctttgggtggggcaatctttgatatatataagtttttttcatttcttaaccaaattttcttttttctcgttagtaaattaagtaaagagtaatcaaatcgatcaagagataaaaactagaaagaaagaaagaagaa

SEQ ID NO: 1282 - DNA, 3000 bp, Unknown
  misc_feature (1)..( 3000): cDNA_ID_3061509_gDNA_ID_1620379_Annot_ID_155265 3000 nt of promoter + ATG
ctttgattatatattgactatgtgattcgtcgtccacattaatttaagcatgaatctaattattcgccttttctaaatactaatattagaaaatttcctcttttttggattggttggttttccatattatcagcaagtatctaaatggttttcttactacagtgtcttcgtagtcgtatgagtggttacaaccaatggaattttatcaacatggccactcataagacgtagcattatcatgatcaaccataatatatgttatattcattggatcgacaaattaacaaagaaataagtagttttgatcgatgcccacttcttttcacacttctgccactacattcttggactgcttctgctactaaataccccacagtggaccagtttttattattataattgaatttataaaattgatacagacaaatgcttgtatatacttaattagcagaaagaaagaaaaaaaactaagtaaaaaattgcccatcataatcatcgatcagatccacttaattagtaatttataacactcacttagtaatatttatccttagttgcttatatatatatccctagacgtattttctattgctctatcatcatgtggtgagatctctgacctaatcgaaacgtgatatagatccagatcttgttccattgtcgtaatcaagtctacatcttttaatttatcttaattgttatcatcactattaactttcttaaaagtaagaaaaaccatcacacttcattataataaaaaccatcacccttcattgcatacatatgtgaacatgtataatttggaagctgcttagctataacagtcattaattgtcgacgacactaattcaaataacgatagatgcgatagacaaaagaacaatatggaccatttaatgataatcataagatttgagaaagaaatcaaaattttaacaagtttggaaaatacagttgggtacttgtcttttctcttgcatcttttgctgtctctttacttccttcttgtttgttggtttttggcttattgttttcccttttatttttcctctttatggaccatattcatttaactctccccacacatgttcgtctcttattttaattttattttggtatgactctcttatttatttattaaaactaaacaaatactccataagttataaaccaaagaaagaagttatagatcaagggttgacaaaacgttggagcttagtccaaatgatgaaatgcctcacacgaaatatgtacatacgtcgaattcaaagcgttagcaaaacttttggtcttaaagttgaggtcatttgtaccacggtgcgcctgagaatgatttagacacactagtactgtttatgcaaatgatttagtatgtacatttcatgtaaatgtggtagaccccaagagatattcgtatttttgtgagaaagaaactttgttacttgcttaccattaatgtaactctttaaaatgaaagaatatctgttgtctctaacttacaacaaaagttacatattacgaaacatattacatcaatatatgattaacatcaccagtttttaagtgaaatttacggtaattagagtacacactattccataattaaatacctgcagaataaaaccatgttgtcgaaatgctttctctcactttactatgtgtatagatatgcacatgcataaccatctctctacatatctattgatacatatttaatcttttgattctactatggcatgtgacttgaggtgtggtgttatatctttatatataatcttcttgacctaatgatgcttgacccatgatcttaattttagtttactttatcttttccataatctttttgttttgtccagttcctcctttttaatttttctaatcagtattctaaatttccagtccaagaaattggatctaaaacaccttcatcttaattcaatatatgtatgagcaagtgtatatatgtatatggatattaattagtattagcatacgtatgatataaacagataattacagcgaatgaaatggaccgacaatgctagcagagatgagcattagtaaatttaattaatctttcacataaattcctagctttcatgtgcatttcacactcttcaagattccatgtttcaactactaatttaataatttatatatcagaaatccaaagtagatatctccatctttctttcagttatttactaatctcatttttaccactatatagccacttcagactctcccaaagtaaacaaaaaaaaaaacaaataatcacaatccaaattatctaaatgtttctttcgaagcattagaaaaccccaattatgttatgcgtcgtttatcaataataggtagtagtagtactactagtagtagcattcaacaaatatcattattagtaactagaagtctagaagtcattattgatctgagtaaacgttatcttccttttgtttcttaaaagataacaatccagaaataacaaataatagggccaattctaacatgtcattttctgaatttgataacctaattttcttagatgatttatgactatgtaatagttagatctataggagttttttttttttaccatttatgaataatattatcagcatgcctcatctagaagcatttaccacagataaatccacttacaagaaaaggaataaatataatttaccactcttttcatctatatttttatttaattttcaacttatataattctgttttgttcacaaacaaataatggtgaaaaaataaagtgacattgtttggaaaataataataaagggaaaaaggtagaggtgctttttgggatccagatcttcctttactacttcttcttctctctctctcctttggtttgctctgtttttatatatttctataaaatcaaagtaaaaaccaaatccatggggttcttcgcttcacaatcccaacgcacctctctctctatctctcacttcttcttcttcctctccctcttcacca

SEQ ID NO: 1283 - DNA, 3000 bp, Unknown
  misc_feature (1)..( 3000): cDNA_ID_3061517_gDNA_ID_1620379_Annot_ID_155261 3000 nt of promoter + ATG
agcttcaggttcttagagaaagcctcatagaacttgttgtagtcctccttgttctcagcaatctcaaagaagagctcaagacacttcttcacaaggttcttgcggatgaccttgaggatcttgttctgctgcaatgtttctcttgagatgttgagaggaagatcttcagagtcaacaatacccttgacaaacccaaggtactcaggaatgatgtcttcacagttgtccatgatgaagacacgacggacatagagcttgatgttgttgggcttcttcttagtgtcaaagagatcaaaaggagctctcttgggaacaaagaggatagctttgaactcaagctgtccttcaactgagaaatgcttcacagccaaatgctcttcccagtcattgctcaaactcttgtagaaagcagcgtactcctccttgttgatctcctctggcttcctcatccaaatcggtttctgcttgttcaccaaatcccactcatgagaaacctccttaatcttcttctttttcttctcctccttttctttctcctcatcaacttcctcaaccttgccttcctcatccttcttctcttcctcctcttcatcatcagagatctccttctcaatggtcttctcaatccagagagagattgggtagctgatgaactcagagtgcttcttcaccaaatccttaagccttcgctcctcaatgtactccatctggtcttccttgaggtaaaggaccatcttagttcctctaccaagagcctcaccagaggtgtctctggtgacggtgaaagatccaccggcctgagactcccacacgtactgctcatcgtcattgtgcttggtagtaacaacaaccttgtcagcaaccaagtaagcagagtagaaaccaacaccaaactgtccaatcatgctaacatcagctccagcagccaacgcctccatgaattctttggttccagatcttgcaattgttccaaggttgttcaccagatctgaaaaataaaacaaaaacgtattagccaacacaccaaacacataaataatcaacgaaaaccaatacaaattgcttttgactgaaatcaattacgtaccagccttggtcatcccaataccactatcgataatcgtcaaggtgttgttagtcttgtcgggaatgatgtgaatgaagagctctggctgaccatcgagcttgctcttgtctgtcaaggactcaaacctaatcttgtccaaagcctgttttcaccagagtaaaatcacaatcgtaagtaaccaaccaatacacagaacgtatatacaaattacatataagcaaactttgtaaatctaacaagagtctgcttaatcgttggtatcaacactaaaactaatcaacagatttgaacacaaacagcttcgcaacttcaattaccaaccaaaattctaaaatcggctagaacactaaaccctaatcaatcctaaatctacagatcgaacagccagatcaatcaaacgagacagacaagtataaaataaggtgtagagagatagagatcgtacatcagaagagttactgatgagttcacgaaggaagatctccttgttagagtaaaaggtattgatgatgagggagagcaactggttgatctcagcttggaaagcaaaggtttctgcgtccgccattctcgttgatcggaaaaaaaatctaagagctagggtttatgaatcaaatcgagagataaagagagcaaaattttctttagagagcagagaagtgttgattgatacgagactttggggaaggatgttattatatatagtggtgtggggactgggaacctataagggtttctagatccttcctatttgatttatgttaatttgcttttcaggtccacataatctgcaatataattaaatggaaattacaaaatacaaaactattttttggtagaaaaatacaaaactttattaaattttttaaaattttattcccttttattttattttggagaacaggtgtaatttactactttttgtaacaggttttagtttacttctttttttttttggttaaattttgtaatttactattttattttattggttgatgataatttactatttataaaaaacagtcagatttaattctactccctttttattttgcagaacaggtgtaatttactacttttttgtaacaggttttagtttccttttttgttaattttgtaatttactattttattttattgatgataatttactattttaaaaacaaagcaataattttattttttgcttacaactttttttttcctgtttacagattggtatgtgtatcttttaataaagtttcaaaaaaatcaataattaaataataatattgaaagttgtaaaataaataaattaaaacaataacaaaaagaaacacatattctctaaaaagcgtggggtttgtggggagaaaaaattgattttttttttttaacttcagaattgattaaaactttttttttttttttaacacaactatttatcttgttgttataaattaaatacataactaaaatttgaaataaaattttgagatatcttgaaactaagggattaactttatcgatttcaaaaaataacccaaaactaggaccgatctaaaaaaatctaaacatagataaactagaatgaatgggaacttgtaaattcaaatccataacaaaatcgaattttgtatatggagaaaaacattgtttttattgattagtttagctaatagaaaaatttaacaaaaaaaaaaaaaaaaaaagtaagtagcacttgttccaaaaaaaaggaaagtaaaatattatgacaatttttatattttacaatttccattatattatgacgtctgtttccacatcccctatatattacacacttttcccccttaatcaaaccatcaatacttctctgcttctcttaagaatttgctttttgattcacataaaccctaattcttagatttttttcccgatcaacgataatg

SEQ ID NO: 1284 - DNA, 3000 bp, Unknown
  misc_feature (1)..( 3000): cDNA_ID_2133275_gDNA_ID_1620379_Annot_ID_155262 3000 nt of promoter + ATG
gcaatcttggttctgttttgggagtcctcgtggatgccgagcttcaggtttttagagaaagcctcatagaacttgttgtagtcctccttgttctcggcaatctcaaagaagagctcaagacacttcttcacaaggttcttgcggatgaccttgaggatcttgttctgctgcaatgtttctcttgagatgttgagaggaagatcttcagagtcaacgatacccttgacaaacccaaggtaatcagggatgatgtcttcacagttgtccatgatgaagacacgacggacatagagcttgatgttgttgggcttcttcttagtgtcaaagagatcgaaaggagctctcttgggaacaaagaggatagctttgaactcaagctgtccttcaacagagaaatgcttcacagccaaatgctcctcccaatcattgctcaaactcttgtagaaagcagcgtactcctccttgttgatctcctctggcttcctcatccagataggcttctgtttgttcaccaaatcccactcatgagtaacctccttaatcttcttctttttcttctcctccttttctttctcctcatcaatttcctcaaccttgccttcctcatccttcttctcttcctcctcttcatcatcagagatctccttctcaatggtcttctcaatccagagagagattgggtagctgatgaactcagagtgcttcttcaccaaatccttaagccttcgctcctcaatgtactccatctggtcttccttgaggtaaaggatcatctttgttcctctaccaagagcctcaccagaggtgtctctggtcaccgtgaaagatccaccggcctgagactcccacacatactgctcatcgtcgttgtgcttggtagtaacaacaaccttgtcagcaaccaagtaagcagagtagaaaccaacaccaaattgaccaatcatgctaacatcagctccagcagccaatgcctccatgaactccttggtaccagaccttgcaattgttccaaggttgttcaccaaatctgtacaatagaacaaacacgaatcagcaaacacaaatcaaacacatagataatggttttgaatgaaatcaagtacaacttgcttttgaatgaaatcaattacgtaccagccttggtcatcccaataccactatcgataatggtcaaggtgttgttagtcttgtccggaatgatatgaatgaaaagctcaggctgaccatcgagcttgctcttatccgtcaaggactcgaacctaatcttgtccaaagcctgtttcaccagaataaaaagctcaatcataagtaacaaaatacacacaacatatatacaatcaaaaactaagtaatctaacaaatttgaacatgaaaaggttccatcaattaacaaacgaaaatctcaaatcgaaaagaacactaaaccctaataaaacctaaatctacacatagatccgtcaaatcaatcgaaggagatacacaaacacattaagcttaaagataaacatagaaagacagagagggagagatcgtacatcggaggagttactgatgagttcacggaggaagatctccttgttggagtaaaaggtattgatgatgagggaaagcaactggttgatctcagcttggaaagcaaaggtctctgcgtccgccattatcgttgatcgggaaaaaaatctaagaattagggtttatgtgaatcaaaaagcaaattcttaagagaagcagagaagtattgatggtttgattaagggggaaaagtgtgtaatatataggggatgtggaaacagacgtcataatataatggaaattgtaaaatataaaaattgtcataatattttactttccttttttttggaacaagtgctacttactttttttttttttttttttgttaaatttttctattagctaaactaatcaataaaaacaatgtttttctccatatacaaaattcgattttgttatggatttgaatttacaagttcccattcattctagtttatctatgtttagatttttttagatcggtcctagttttgggttattttttgaaatcgataaagttaatcccttagtttcaagatatctcaaaattttatttcaaattttagttatgtatttaatttataacaacaagataaatagttgtgttaaaaaaaaaaaaaaagttttaatcaattctgaagttaaaaaaaaaaaatcaattttttctccccacaaaccccacgctttttagagaatatgtgtttctttttgttattgttttaatttatttattttacaactttcaatattattatttaattattgatttttttgaaactttattaaaagatacacataccaatctgtaaacaggaaaaaaaaagttgtaagcaaaaaataaaattattgctttgtttttaaaatagtaaattatcatcaataaaataaaatagtaaattacaaaattaacaaaaaaggaaactaaaacctgttacaaaaaagtagtaaattacacctgttctgcaaaataaaaagggagtagaattaaatctgactgttttttataaatagtaaattatcatcaaccaataaaataaaatagtaaattacaaaatttaaccaaaaaaaaaaagaagtaaactaaaacctgttacaaaaagtagtaaattacacctgttctccaaaataaaataaaagggaataaaattttaaaaaatttaataaagttttgtatttttctaccaaaaaatagttttgtattttgtaatttccatttaattatattgcagattatgtggacctgaaaagcaaattaacataaatcaaataggaaggatctagaaacccttataggttcccagtccccacaccactatatataataacatccttccccaaagtctcgtatcaatcaacacttctctgctctctaaagaaaattttgctctctttatctctcgatttgattcataaaccctagctcttagattttttttccgatcaacgaga

SEQ ID NO: 1285 - DNA, 3000 bp, Unknown
  misc_feature (1)..( 3000): cDNA_ID_3061544_gDNA_ID_1620380_Annot_ID_155297 3000 nt of promoter + ATG
gagaagtgaactataataattaataaaaattaatatgataatttagataccaaatatagtttgttgattttaattggttacttttttggaaattaataatgtatttcgtttttctaattaaattaaattaattaaaatttagatatcaaatcttatatgttgattttgattggctattatttttggaaattaataatgtttttcgttttttaattaatttaattaattaaattagtatttgattttttaatttttaaagagataaattaatttaatttttaaaattttatttctaatggcatacttatgtaattacttacaaaaattaaagttatatttaaaatataattctcaaataatatagtaggatgttttaaatggctatatataaaaataatgtataaaataactaatatatttatatgttgtaggattaaatgacatcaaaataacatcaaattataaatttgaatggaaatataatttgccaaaaaaaaaaaaagagaatataataaattactttattattcgtttgtcggcgatattctgtcctcgtcactcgtcactcgtcactcagtagcttttctatacttttctatacttttcgatatgttcatcggctgaatcagagtaggtcactggatctctcgtaagtctctcttctttctttgtttttcgatgctattaatctcatattgctttttatattcatcgtgattcctcttttttgatttggtaagatctgttgatactcgttactaaatcccagaaattgagatcttctcttgattgtttcgatcatctgttattggactatttatgtatgtacaaaaatttcaaggatcctcaggatagttcttctcttttgtcattgtttcagaaacctatttgatgctctttcgtttcatgtttgaaatttgcagatccgatcataggttcaacaatatggaacaaatttggaattgatgcaatataagctacattgaagtatgggatctgtatcgctgaagattggcgatggaaccgcaagattcaagcgatcaacgcttttttcttcagctatcaacctccttatgcttttctctatagtcactacaaatctctttgcactatacgccttctcgtctcggtctcaatcccacacgccacaccctcttcattccaacaatgtctctttggtttctcaacatctctcactcatcctcagagaaatcgattcctcccaccacacactcactcagatggagaaacagattattggttatgaatctctcgatctctcgcaacaagaagttccacaagagcttaaacttttccttcaacaacatcagcttcctcttggtaaagattctcgtactggtatcacacaaatggttgcatctgttggacattcctgtgaaatgtctctagatttgttatctcagtatatgtcgtataatgtctttgaaaaatgtcctgatgattggagcctagctcagaagttgattctccgtgcttgtgaaccgttgccacgccgtcgatgtttggctaaaacggtgcataaaccaggtctcgctttgtttcctgattctttgtggagaccagttggtaacagtagtgttaactggagcggtcttggctgcaaaagtttcgaatgcttgaaaggtaagaaactgagccgggattgtgttggttgctttgatctagctactagtcatgagaaagataggtttgttaaggttaatgggaagactgatttcctgatagatgatgttttggatttaggcgatgggaaaatccgaataggattcgatattagcagtggatcaggtacgtttgctgctagaatggctgaaaagaatgtgaatataatcagtaatacattgaatatagatgctcctttcagcgaattcatagctgcgagaggaatttttccgttgttcatgagtttggatcagagattaccgttctacgacaatgttttcgatctcatacatgcatctaacggattggatttagcggttagtaataaacccgagaagctggagttcttgatgtttgatcttgatcggatcttgaaacccggtggattgttctggttagacaatttctattgcggtaacgatgagaagaagagagttcttacgcgtttgatagagaggtttgggtataagaagttgaaatgggttgttggagagaaaactgatgctgaggtttttctctcggctgttctgcaaaagcctgcccggatttgattgatatatatttttttgaaaaatcaagattttgatcttttcataggttataaaattttgagctcattacatatttttttactattgatcccaagagacaattgaaagtgtgaatttgtattttgaggttttgtatgaattatgattgttctgctgtatgtgtgtaagattgtttgtaagatctttataagatcttcggatgtctcccaatgcattgttaagtttttcgttaagtgatcctataactccatgaacatttcctcatgttcagccaatttgtctctgagatggagctctgccttcttttccttatgtgccgaataagccagcttacagagtagtctagcaaagaggaacaagttcatgatacaaatccagtctaacagggttttttttccggctcaaacgagaaagaaacaataaatccgagtaaaagaattcgagattaaattgaaactcaacataaaatttgaggtttcaaatcactaggtgcaaagtttatgcttggaattcgcgatttcgagcggtgtagtacggtccggagcgattgaaaacattttctgtaattggatataacgttagcaactgcaatcacccgcaaatgcagcgttagcggcgggtagcggaaaaaccagttaaacccttaaatgatattttcccaaatatgtttttttttaattttttttttaacattttattttcttttaaaaattgggagggaaggggaaggggactggagcgagagagcttctgcgattgtgaaatg

SEQ ID NO: 1286 - DNA, 3000 bp, Unknown
  misc_feature (1)..( 3000): cDNA_ID_3061530_gDNA_ID_1620380_Annot_ID_155308 3000 nt of promoter + ATG
ttctgaaaggtgcaaaatgcaattatttgtcataaaagagagaatcccaataattagtgtatagtataatctaaccattatttacttaacaaatatggatttggaagcaaaaggaaatgactgtaaccagattctgcatgaaccccttcttatctattcaatgtattcaccattaatgccaatataacaaaaggacatatattttggacttccaagattttttttttggtcgaaatggactttcaagattttatattctaagattttgcaatcaaaactcagtagaacaaaaatgaagattgtaaggatagtgaaatcaccttaccttgtcatatgttgccttctcttgatcattctttggttattgtctcatcatgatcataatcatcactcttgtgctccatacatgaatactatcagaggaacacaattctcgcatcttcaacctgtaagatcaagattatgatccaattatgatgctttttatttaataacattatatattgatagatttggtatttctgatcataggaatcttcaggcttatcgagtctacttaaagaagcagctacagaagacaagatagtgattattaccatggtcgatcgagaatgggcaaaacctgactctattcttgatctattcctggagagtgtacggattggagaaagaaccaaacacttgctaaaccatttgatcgttgtggctttagatgatcaagctcttcgatattgtcttcgtgcccacccacattgttaccttcatagatattctagaaaaaaatcagaatctttaaaaccagatggtcttgttaccggttggaacaagaagtctttggttaaagagatcttagaactcggctaccacataatgttcaccgtaagttctcttaatgcaaatgtttccctttctacaaccagtttttatagaacaagtatgactttgtattcaagaacctaggttaggtacttaggtgggcacctagctagattggcatatcccgctccatgaataaccttagatggtggatttatgagttttttccacctaatatatatttttttttattcaaatttattgtttttgtccatctaattcttcagaatcattatttctaattattatatatgtcttagaatagtgaaacaactagagtttgaagtagaagaaatgttctgatatcacaaagccaaaaaaatagatcaaaatttattttatttttatctaaatcatttgtttgtaacaaattgtaatattgatttgttaacaagttttaaaattgaattattgattgtagtgtttatagaccatgttgtttacgtttttggttacatagacgcttaaaattggttgcaggaagcagatgtgatgtggctaagaaatcctctaatgcactgcaacccacaaaatgcaatatcagtggcttgcgggaactcattaattgatcatcaacatgatcatttaacaacggaaaacacaggaggtttcttctatgccaagtccaatgatataaccatagacatgtttaatatcttgaacgtagaaagggttttgtatcctgcaactggaaaccaatccttgtgtgatattgtcaagcgcgaagatgtaatcaaagcccttgataagaaagtcaccttcttggatgatgctaactttgggaagttttgtcaaccaaatccgcaagatcaaagcaagataacaacagtccatgcaagttgttgtcatgatacaaagagtaaggtgcgttacctaaagctacttctccaggaccggaaaaatatgaatccgcaatggattattccaagccagttatgcagatgattttattcgttacaattttttttaacatatgtataacattttgtacaacatgaaagaacgaaaaactacattaccttaagaccatgtttataggtgattttatttgagtatcataagcccaaaaatcattttttaatgcagtaaagcatgtatttgggcatgatctgtatcagtccactgatacttttgatactgagtatcagatgacgtgacatcacaccattggttcagcgaaaacaaagaaaaaaaagaaaaatcttctctcctctctcactgataatactatttttctttcgttctcttctacaaacctaaaaaatcagagcgataaacgaacaggtatgattgaactgaacctaaaaaccattttcctttcgtttttatatatttattttcgatgttgcaatttttttctttttatgatatttaaaccggtctcaccaatagaaatcgatttattacgagtatcatacaaaatcttaaataataaacaaacattaaaattaatattaaaaaattactaatgatattctatgagtatcaactatatacatgctctaagttttgaccaaaaagtagcctcatctgaagattcatcctctaaataactcatcttttagactttgtggcaacagttgaaggcacatgggatcaatgttatctaccatgtagattatccatccgaaggataggcgcttgagatcttttgtctatatgcttttaaacaaagttctcggcgggatggttatgaagagcatgcagcaaaagtagttaagctttgcggtaatcttccactggccattcgtgttgtgggttcttcttttaatggagacagctaagatgagcggatgcttcaattatatgggacagaaactaatcttgatagaaaaattgaggatttcgtcttcagagtgggttatgacaaattgttggagaaacatcattctcggtttcttcatattgcatgttttatgtgacaaccatgggtcgaagaccccaatatatttttgtattctttattgggctgactttatcataaagcccataaggcccattactttattctgtaggattcgtgaaacggccttatgattatgaattctgcaataaaaaaaattcgtgatttgtcgttacggaagaaaaaagggaaaaaatcgcgaagcttgagaacacatagat

SEQ ID NO: 1287 - DNA, 3000 bp, Unknown
  misc_feature (1)..( 3000): cDNA_ID_2133226_gDNA_ID_1620380_Annot_ID_155300 3000 nt of promoter + ATG
atttttccataagaatagaaaaaataattttggagggagtgatagtctgatagtattagataatttataatttatttaattaattttggataaacaaaatatatatatatatatacaagttaattttttgaataggaaaaaaaaaaacattgctgttaaaaattaatcaacgaagataacaattgaattgaaatatgctaatgctgattattgacttcatatttatatttaccttttctaaattctacagaaaaagaagtaaataaataatataatactaccacactaaaagataacgactagtttgatggaaatgtgagctgtctcactccttcacgcatcgttaagagcgtttaaacgtttataactgcgcacagtcattttgtataacacgtgtccggttaaaagtctacgtggcgtttaagtgacagcgacatctcatagaccattggtccgacgtggcattacgttgcgaatgggcctgaatagaataaaattatgcccaataaaaagtctctcgacctaactcttaaaagcccaataatttgatcaattcttatataagggcctgactggtttaaatacagcgggtgcggttacggttgcgcaagtttgcggaaacggccggttgcggttttaagcgttatcaagccttttaaacgactggttaagcgtttgataatgggtgcgttttcgggagttttatgaccggtaaaccagcaagtgtgatagtaattaaataaaaaaccaaaataaatataatatattactattaaaagaaagaaaaatacaatatattattatgataaattgataatattagaaaaattaaacatgcttaataattaaaaccataaataaaacattaaatttaaaataaataaattttgtaagaaaaagtttaatactttatgcatttggtacataccaaaaattgcatcaagtagtgtgataaactataaataacgttgaactcgcgggttttccggattgcctctatacatatgataaagtttcttcaagatatccaaacgatttttaacacatctccaactcaaatttttcccaaactggtcgttaatattcttaagaatattttctttttgaacatcacttagaaatctgattttgggatctttggaatcttccgttaaatattgattaggttttttttaataagaataagatatatagggtttgggtagaagacataattattttaattaattaaaaaaaaaaaataacctaactgctaccgcccgcaaccgcaaatgcttgcgggaatgagcttttgaaatctggcgattttgaacggtgtaaagcagtatctagcggtttctatgattgatgtcaatcgctaacaatcgctagcacccgcaaatacagcgtttgcgagtgacaaagggaaaaccaattaaaccctaagtaattgtctttgtctttgatattcctttcttctgacccaattaagacaaaaccctctacacacttttctctttcgaagacaaagatgaactgcattaataattcaacgagcccaaacaggcccaatggcccaatacggtccatcgactaaatatatcagaccctagttcccaagaaatgtccccgaggaagaagatgatgatgcgaaacatgaatgctcaggtaaaacatgaccagtaccgtgcaacaactttccccataatttgcttgtcgtgttgtgtagatgtcaagtgttttgctaaatctaagaaaacttgcagtgtgatacagagacatataatcaaatatgtagtcagcggtgttaaaaacagaatctgtcaaaccgtcttcttcaaatccacggaatgagaagcttgattaatgagatgctcccaaccatacccaaatattaatcagacattcattattgtctctagaggttaatgtctttgagtgtttttaggtgttcctagaacacaatttatgggaagatccagctgcatctccatctcctaatttggagtgaaagagcctagtctttcacaccaattttgagtttcaaatatatgtgcataaatgaatgaagatgcaaggtttggatttcgtttttatgactcttgtctaatcttacgtttgaggtaggtgagcaaagatgctatcacagcaaaaaatgctaaattactagattcaaattacgaatctaccctctgcatagctccgagagtgatgtgattccccttgaaagcatcaaagggttagtaaccttttctagagagtgccctttcgtcgtcagaaaaacgtaagcaaaaatgctacaaattaaaaagtgtctccaacatgtgcatattcacacacaagttggtgtcaacgctcagacaagaaaggcgtgtgttcattgttgaatcttcccatttcctcatccaaattccgacataactatcctagccgccatttgttctccacattacaaaaccctcagcagcttcaaaactcttccgatctctccctcacgctcgcaattctctcgtctccattttaatagtttttcttctcggaatcacaaatcttcggcttcttgttccttggtgagtttataatctatcttttgctctgcttcgatacttcaaagtctgttccttttgtctctctgagttcggtttttagttgtgttttatttcgacttctgttttagcgctttttctgaatctgatattgaactctttatcagaattaaggacccagatcatagttaggctcttcaattatatctgggttttgtgccaattgaagaaatcagtgaataatttttgtcaaattaaaatctgggtttggtcctacttgttgctccttgatgaatccttctcttgtagtaatcatatgatttactaactatagtttctgagtttaatatatgttacgatgatgttgatgatgttgctgttatgatgatgtggatgatttgatggtgttgatgttattaatgatgaggctaatgatggatacgaatcttgtacaggcgtgtgtgtgtgttgttga

SEQ ID NO: 1288 - DNA, 3000 bp, Unknown
  misc_feature (1)..( 3000): cDNA_ID_3061538_gDNA_ID_1620380_Annot_ID_155303 3000 nt of promoter + ATG
ggaaactttcagcatagtaattttacaggttatttactgactgatgtgatgaaaaacataaacgatatagatgaagagaaaactttttaccactttctaaaaagttatttagatcgttgtatttccccaacagaatttctggttctattacaactactggttcaagtttctagttccttctaaactgtgtgtttcgtaatggctttaatattttttatttgggcttccaaatattgggccattggctctgtaaaacttttttttctgatgctttatataataagacaataatgcttaattgttttagaaaaaatcaaaatataacatgcttaattgattaacattattatataatttattattttgtattttttgaatataaaaaccttttctatatacatatataatttagtgtacaatttcaggatttaatatgtggtatgacaggcagaatctttttttagtagtatagacaataatgttagattttacaaatttttttttgtattaaagttaataattgtgtataagtacaattaaaaaaaaaattgatgctgataaaatattcaaataagatttaaaccgtattactacttttggttgatgatattataaatttgtattaatattgatccaaacccgttccaccatataactctcgtgaaatattactttttataagtttaaatattaataatgtttataaagtttaaatagttcaataatatatttcaaaaattaatatgtttttgccttttacgtaatgacattttttgtaattcttactaaaacaaaataactctataaaatgtaattcaattttttaatgtagataatgttaaaatttataaataaatatttagtttaatcataatttatgattgatatgtatttgagtttttggactacctttcacgtcatttaatagcctacattgggtagttttgtaacattctttgaaataataatattatcttaatctatatatacatttttgcagtcattttagcaaataaatcttatagttggacttatttacaacccaatgccattagcattaaatctttttccaaaataattaattttactttaaatttttaatttaaattgtcaattacattatcaatcaaatttaatccaaacaaacttcacatcaatcccttaaaattagcataaacgtattttattaacaatattttaaaacaaagttttttgtttaaataaatattgttcttactaaacgttttttgtttaaataaacaaatcatgtatttgaacttatttacaatatcatgctacttacattaattatttaggcataaaaatatttatataagatttaaatcttctaaattcttgcttttagagttattatatcattacctaaaaggcaaaaaatattatttttttgaatattattatttgtatatttaaacttcataaaacattatcaatatttgaaattatcaaaagtttaatatatcaaaaaaattaacatcattatataatatatagagtttaaaaaaatctcaaaaaaaatttcgtcatattttgtgattcgaaattttaagaatgaacatatattaaccaattggcaaaaaatgtgtggattcaacgtcccgcaacgactaaaatattttgacaatgattcataaacatattataaagaagatcaacattaataaaataaatagtttttttttttgtggacgggtttggcaggacgttacttagtaacaatggtaaactataaaataatttacaaatttttatatatattaattttagaaaatgaattgtcttcatggtgtaccgcgggttaaaatctagtacatgtacattttactaactgaaaatatgagattgattctttatattacactgataatgaatgattcaaaactaaagatcagagtgtaatatagtttagcttagaaaataattaaaacaattttattatttatttagtttcctaaattttagtttagattcagaaaataattgtttaacttctttagaagatgataaacatatatggaagatttgaatctctattcatatatatttaaaaaatcaataatgtcaatataattaaaggatagtttagaagaaattttcttgaattctaaataattaatttgtatttttaaacaaatattaaatactgtaaaaacgaaatattaaataaatatggaaagaaaatcctgccttaaaagattttgtattattgaaaccgatttttttttacagcaaatttaaaccaaaaattaataaatacttaaaagagatcttaggaatgattttgtttgaagtaatgatttagtcgcaaactctagcaactaatcaactcctaaatcataaaaaccccaaaatatgcgtttttctttaaataactataattgtaattatctttaaaaatgtaacttttaaaattataaataatgtttaagataattataattgaaaatttcaataaaagcattttagagcagaattttgttttatccacttttggactattttgatctcatatacattttcctataacaagtgtagctttgttgattggtataaaatggaagtaaaaaagtggaatattccttattatgtcttttattttcacaagcccaatacagtttctacgaaatgtatatctatttatccaccaaaaaaaaaatgtatatctattttatttgtttcttatttaattagcatcaccacaatttggtgcaataaagagtatcaaattatcaaaacataaaataaataaatttataagccaaatattaaaataaaatctaatataataagatttgttcctatcccaaatcctaaatgtaagtacaacacattatttataataaacaagacagaggtctgatatttgcgttgaacagaatcgttgtcacttgttcagtcttcactacggagctgttttttttcgattcgccggaaaaatcataaaatccaaatctacaaccacctttttatcgcaatcca

SEQ ID NO: 1289 - DNA, 3000 bp, Unknown
  misc_feature (1)..( 3000): cDNA_ID_2133244_gDNA_ID_1620380_Annot_ID_155306 3000 nt of promoter + ATG
acccgcggtttacagcgggcaatcggtttatttggtttttatactaaatattcgaataaatttgatattctaaacttataaatataattttttagtgattagtaagaatcgtaatatatgatttgaatattatttttgttgaacggttttgattgaatcggatcatataaagtttaggagattgttaagacaaaattacccttaataattttgaatagcataaaacaaaatccaaaattgaaatcaaaattgatgtcaaattagacaaaatttcaatttgtacttcctttttaataataaagggattctcagttgaacaaaaccatgctcccagaccccatagcaatcttgcaattctaggattttagtcccacactatccatagtacccgaactagctaggtaacaatataatgtgtttgtcattgtaattaaacaaatggtacaactcattaaaatagatttcctgcattaaaaacaaaatttatataaataaaaagaagtaaaggttatttatgtactagttatcaacttttgaatcctaacaaatagagcaaatttcgaataactactgtgacgggaaacatagctaaccaccagtaaaaatttgctcgaagttcatttagatttgattaatcgcttatgtacaatcacctcagacgctcaataccttagagctaatagcattttcttagagtatttatttcatatcttctttttgggttgtataatttctatggttttgccactcatacttttgaatatttatatattttttttcataataatttctcatatttagttatgggatacttcagtctcatccatttcatattgatttacaacttataagtatatatataactaaattatacttattcaacaacaaagtagactaagtagtacacaaaacatcgtataatgttaaagattaattatatctacgtttatgtggtcaaatatatttctccaattggacgtttctagggtccggaatatataaatcacgtgtttggagaataaatgattagagataaatactcgtacaagagaaaatttaaaaagggctgttcgatgacctcaagggtcggaattcttttgatcgttggatcttggaattatcgaacgaatgtgtaagattacacatgttcatacttattggttacaaaggtttttgctgatctgtcagacctagtggctgagttgtcatttgacacaagtcaccaatttaacagaagagagatatagtcacttggccagtacgcaaccaaatgggcaaatggctgatcaatgaagaatcaagaatgaattatatgaattagaagaaaaataattacaaaatcttatttaaatgttgatatttgatttcttctttccatatttttaaaagttaagtaaaaagtttgaatcgatatttatatgaaaacggatgaaatgatatatgaaaaaagtacatgggagaataaaaaagatagaagctacttattcaggtaatgtgtgatgtataatgaaaaatgaaggaattaaaaagaagattattattgtgatctaccatgtgtacacaagcaaccgaaacaaattttgtttatgtcccctagtgcaaattgtagagtattctatgagtaatgttttttatggacaatgtttgaatatcattagttttatacatgaaaacagaaaagatttgtcaatgccttagagatccacatgcaaccgtctttgtcgatccaaaacggaaaagtatggagagcgttggtctgtgcaagaaattcatgaaaatatttaaaatgtctattttaaaataattatgtatttgataaattaataaataactaattgtgatattaatagttgttagggactattacttagagaaatttgggatatggagtagtatttttggacttccacatatgcatttttgacagtacttttcaagaaaccctattatgaaaccaaattatacaagttgcactatgcgcccaaagattttggaactatcgacgtaaaacattttatgtctgccacaaaaattcttaaaagttaccttaatgtttatgtaaatcatttttctttccctcttcaactttacgtcaaaatcacatattgatttgtaatgaaagaaataaaaaaattgagtacaaattaatagctagataatagtcgatttctacacacacaaaaagggttatatccttagtggataagaattatttcaatataaaaaaattcgtcgttgttcaactacgtcaaaatcacaaactaatttcaaatttattttgggtattaatatacatgaaaaacgagtaaaacaaaagtatgtatatagctaaagacaaagtagatttgtacacacaacaaaatggactaaaaatattgataagaataaataaactaatatagggtttgtatacagaattataactttcttccttctaacttcaaaaccaacaatggatttcaaaactatatactgtattcactattcagattgaaacatagctagagaatagtagatgcctacacaaacacacatatcatgccttcattttaggttttttttttttttttttgatgacaacctttattttaggttatattatttaagtaggcaatataatatagaccaatgattgtcttatctttagtgagaatagcatatggtacccatccacccactgtgactcctcctcacaacaaataacatttaaattaaatgttatgtttgtatcaccatacatataatggtgtatattgatgcatgcatgtatcatatgtagagagagatctataaagcttcataaaagtgtttctctagaaaaaacgacaaaattcgcagagaaaatccaaaccaaaagtagttttgtaacagagagatagatagaaagctcttgaagatctaaccaaaatctacttttgttcttcttcttcttcttttcataaattttcggagtggtcctatttattgtttcttggatcattagagagacagctatcgatg

SEQ ID NO: 1290 - DNA, 3000 bp, Unknown
  misc_feature (1)..( 3000): cDNA_ID_2133240_gDNA_ID_1620380_Annot_ID_155305 3000 nt of promoter + ATG
cagtcctcttttcgatttatgctgtaggatttgtaagcataggttcatctaacctagttaggtagctttattttgtgtgtgtatatgagacatgagtaaatacatggaaattctgctctagggaacatctcattgtgtctcttctctggtttcttcttccttttctgcttcctactgttgtttttttactagataactctatatgttcttattccatcctttgagatgctcctctgtaaaacatctcttttatcttctgagcttcccatgtgcctaatttgttttctgaggatgttatgttcgtttacagtatgcaaagtttgtgaagccggcatttgatgacttcgtgctcccttcaaagaaatatgctgacgtgatcattcctcgaggaggtgataatcacgttgcagtcgatttgattacgcaacatatccacacaaaacttgggcagcatgatctctgcaaaatctacccaaatgtttatgttatccagtcaacatttcaggtattttctcactcttgctctctttgatacttgatttagatggtaagtgttatcgatggtctcactataggatcatgattgcagataagaggcatgcatacacttattcgggaaaaggacatatcaaagcatgactttgtgttttattcagatagactcattcgtctggtatatctctcccttatgtcttctctttcaacgtcactcacttttcaggctttcttattttaactaatatcagttcaatttcaggtcgtggagcatggtcttggtcatttgccattcactgagaaacaagtagttactccaacaggtatgagaagagaatgcatgagctgtaacaatactgtatacacttttttatataacttggtcatcagatgtccgtctccttcacgtcaatctagttagagttagcttattcaactcatttaaacttatcttttccacaccaggagctgtatataccggtgttgatttctgcaagaaactttgtggggtctcaattattagaaggtgagcctttgaaaggtattgtatttggttaagtttgatatgataagatgcttattcttccaactgttttacatcatgcaaggcataaatttacttgtttgcgattaaattatctctcctacgtggtttctgttttgtatgtttttcctagtggtgaaagcatggaaaatgcattacgcgcttgctgcaaaggaattaaaatagggaagattctcatccaccgtgatggcgataatggaaaacaggtcttcctattaatattttgctctgtttttaaaagtatcaagtataatctctttttataaacacgaattttgaagtttctcttgtcgtgataatcagcttatttatgagaagcttcctcacgacatatctgaacgccatgtcctgcttctagatcctgtcttagccacaggtactctgtctctctacgctgtatatttcgattttggtcctttttgatggatttttggttctcgaaattcatatctcgtgatattgcttcttcttgaaggtaactcggctaatcaagccattgaactactcatacagaaaggtgttcctgaagctcacattatattcctcaaccttatatcggtgagtgtaaaaagctatatatcgatctttcgctcttttgtgaatgtagaagctaaagatctcattatgtatctgcttctctatctctttgcttctctctttccctcgtcatgaccttgctttctgacaggcgccggagggaatccactgtgtctgcaaacgttttccagcattgaaaattgtgacgtctgaaatagaccaatgtctgaaccaagaattcagagttataccgggcttaggcgagtttggcgatcgttacttcggcaccgacgaggaagaccagtagccaccactcaacactgtgactggtttcaaaggaaaagcctaaatttatgactagagcgacagtagaggcacttgcatgtctttgtagtttgtgctaaagaatctttatcttattgtttatgaagctcctcttgcttacttgaattatttttgaaaaactacgttaattttctcattaaaaaaatgatcgggacaatgctagttttctaaaccggtggaaaaagacataaccaatccttttatacatgattttgacaatcgtacgaaaattccagttctctctaattttaatttctttatttacatgttgattaatatatatttaccatttttcttaaggatcttagggtttagggattatgacctaaacctaatgatagaatttaaccttagttggacccacgaatgatgggcctaagttaagcccaactataaattaatgtagcgtaaccgccacacgctcatctataaatacaccactcctatgcaagacctatagttttatttcagtcgactcttgaccttcaatttcctccgtctctaaatttccttttcttttggctctctctgcgatcgagttcgaaaccgttccctaatcgaagatctagattcaacatacgttttatctctcaggtttgcttcttcttcgactacgttttctccgcgattatgatgatgccttcttcttcctgctttcactttgggttgcgtttcttcatctcctcgattcgcgatcctcctattcgcatcgatacccagagatctagggtttccaccgatatggatatggataaatcttagggtttcaccgataaggattatggattcgagtttctcttctatgtacattgtcggagctacatcttctcttcttgttgttagtgttagggttttgaataggttttaggtgatgaattataggtttagagttctgaattagagatttatttggttttttctgtggacgtggtgctctatgatacctggattgaatttggggttacagacagaagaatgtgttgcttttgattctctagcgattggggaattcagaaactccttgcttctggacttgttacccttgtgaaaatttatgt

SEQ ID NO: 1291 - DNA, 3000 bp, Unknown
  misc_feature (1)..( 3000): cDNA_ID_2133222_gDNA_ID_1620380_Annot_ID_155299 3000 nt of promoter + ATG
gaagaaaaactattaaaatggagacgagagaattgcgagcgtgagggagagatcggaagagttttgaagctgctgagggttttgtaatgtggagaacaaatggcggctaggatagttatgtcggaatttggatgaggaaatgggaagattcaacaatgaacacacgcctttcttgtctgagcgttgacaccaacttgtgtgtgaatatgcacatgttggagacactttttaatttgtagcatttttgcttacgtttttctgacgacgaaagggcactctctagaaaaggttactaaccctttgatgctttcaaggggaatcacatcactctcggagctatgcagagggtagattcgtaatttgaatctagtaatttagcattttttgctgtgatagcatctttgctcacctacctcaaacgtaagattagacaagagtcataaaaacgaaatccaaaccttgcatcttcattcatttatgcacatatatttgaaactcaaaattggtgtgaaagactaggctctttcactccaaattaggagatggagatgcagctggatcttcccataaattgtgttctaggaacacctaaaaacactcaaagacattaacctctagagacaataatgaatgtctgattaatatttgggtatggttgggagcatctcattaatcaagcttctcattccgtggatttgaagaagacggtttgacagattctgtttttaacaccgctgactacatatttgattatatgtctctgtatcacactgcaagttttcttagatttagcaaaacacttgacatctacacaacacgacaagcaaattatggggaaagttgttgcacggtactggtcatgttttacctgagcattcatgtttcgcatcatcatcttcttcctcggggacatttcttgggaactagggtctgatatatttagtcgatggaccgtattgggccattgggcctgtttgggctcgttgaattattaatgcagttcatctttgtcttcgaaagagaaaagtgtgtagagggttttgtcttaattgggtcagaagaaaggaatatcaaagacaaagacaattacttagggtttaattggttttccctttgtcactcgcaaacgctgtatttgcgggtgctagcgattgttagcgattgacatcaatcatagaaaccgctagatactgctttacaccgttcaaaatcgccagatttcaaaagctcattcccgcaagcatttgcggttgcgggcggtagcagttaggttattttttttttttaattaattaaaataattatgtcttctacccaaaccctatatatcttattcttattaaaaaaaacctaatcaatatttaacggaagattccaaagatcccaaaatcagatttctaagtgatgttcaaaaagaaaatattcttaagaatattaacgaccagtttgggaaaaatttgagttggagatgtgttaaaaatcgtttggatatcttgaagaaactttatcatatgtatagaggcaatccggaaaacccgcgagttcaacgttatttatagtttatcacactacttgatgcaatttttggtatgtaccaaatgcataaagtattaaactttttcttacaaaatttatttattttaaatttaatgttttatttatggttttaattattaagcatgtttaatttttctaatattatcaatttatcataataatatattgtatttttctttcttttaatagtaatatattatatttattttggttttttatttaattactatcacacttgctggtttaccggtcataaaactcccgaaaacgcacccattatcaaacgcttaaccagtcgtttaaaaggcttgataacgcttaaaaccgcaaccggccgtttccgcaaacttgcgcaaccgtaaccgcacccgctgtatttaaaccagtcaggcccttatataagaattgatcaaattattgggcttttaagagttaggtcgagagactttttattgggcataattttattctattcaggcccattcgcaacgtaatgccacgtcggaccaatggtctatgagatgtcgctgtcacttaaacgccacgtagacttttaaccggacacgtgttatacaaaatgactgtgcgcagttataaacgtttaaacgctcttaacgatgcgtgaaggagtgagacagctcacatttccatcaaactagtcgttatcttttagtgtggtagtattatattatttatttacttctttttctgtagaatttagaaaaggtaaatataaatatgaagtcaataatcagcattagcatatttcaattcaattgttatcttcgttgattaatttttaacagcaatgtttttttttttcctattcaaaaaattaacttgtatatatatatatatattttgtttatccaaaattaattaaataaattataaattatctaatactatcagactatcactccctccaaaattattttttctattcttatggaaaaataggaaattgcacaattaaaaaggagaaggttttttttttttttttttgatcaacagagaaggaagtatcaattaaaaaaaaatgcataattaagaaggtgtgattttctggtcaccgtctaattaggaaaatttaaatttatgacacctaattcaaaacattttcaatttccaaaactacataacttgtcaatagactttaaaaagtttaattactctaaaacgacttgaaaataaacagattaagcgtgacttaacaagaaaaaaaaaaactaaaattaaaattaaaagaaaaaaagttaatcggtttagtaagaagcttgttccgtacaccgcttgaccgtttccttctcctcaatttcttctctccctcgcttcactattttacgaagttgctcgctctctctctctctctcgctgctctcttaaaaaaaactaacctttgtctaaaacccagaatctggtaaaccttcacactcaaaaatg

SEQ ID NO: 1292 - DNA, 3000 bp, Unknown
  misc_feature (1)..( 3000): cDNA_ID_2133371_gDNA_ID_1620381_Annot_ID_155318 3000 nt of promoter + ATG
ccaattttaatccaaatctaattctgtaaactggagaataacgataaaggatttggaaataactctaccaaatttcgttaccttttaccacgatttgatatgacgaaactgatttctcccaaaccctaacgattctgctcattctccttttctctctttttctcctttataaaacgaaaagtggctaactaaagccctaatttcgagtttccttcttttataggcaaactctagggtttctaattaacccaaccaattaaaccggataatttaaaaacaaaccctaaccaattttctggttcacgggcgttacagaatcattggatagatcgaatatatgtagtgcgttttggtgtttagaaaaaaggaaagacaaggagttttaattttctgtagttgcttaggcccaacgaaacctcttaatttccttttttttttttctggaattaagggagaagactcatcaattagagtatacacactgtgactaaattaatttgatagtttactactttatagatttattaaaatttgttttcaccggaaaatgtatacacctatagaatatccaaatctgatcaaattaatatctaattatgtttcttttgatgcataatcacaaatcaggatgaactttattgacacacattttcaatttttgtatgtcaggggttgagtttcacaagtttcctataccgtatatatgtatacatgtgcactacatatatttttgttaaaattatccctttaatatgaaacggagagaataggtatttaggtataaaaatgtgactaaatcatgtggtttagcattatgtccgaatgatatgatgtccctttgtagttcctttttttttttgttgaataaacatttgtctccttaccatccaccaaaaacaaataaaaataaaatatcccttgtcttgctatatatatatatatatttttttacctgcattgttgaaataatcttgttattattttcttgttaaacgaattaatcttgtacaaaataaagatagatatgatatgaatcttatcatatcatatgatattgacttttcaatattagtaacgtctagttgtagaacaccattaagcatttcagtttcattaggaagaaaggaaatgaagaagaataaacgtacgtcaaagttatcaaaaagaaaatgttgatgaatacaattcgattttgatcaaacatacaagcaaaaacatatatacaaatataatgttttttttaaaacattattagatatatctgaatttggcaaaaacgtccaattaaacttgtgataattaaataatttttggctagtccaccataaataaaagacaagtccactcaacaaaaccaatacccctctaattccaaagccaaaaataacaaacgaattttaatctcctcacaaaaaaagaacaattgaaccatagtccatagttttgttgggtaccttatcttttattgtcactaatatttagtggtgtttacgttgtttaggcagagaatcttgctaaattcatgtctcaagattccaattgagtaaagtcaaagattctcataaattcaggtctgaatgttgcatccgattcaccatccaccgactcacgaagacaaatcttcatcagaattcttactttattactttctattaaataatcatatccattaaataattctatctatccaatgacatctcgtatggtcacacaggtcacgtccttggtgtctctgactcgactttcttaatagatttttgtttttccgaaacaaatatgttctgtcagaaaattacggcgaaattcttctcttactctttactccaaattaattagttttatttcattttagatttttgattccatttcattgttaaatccttatctgcaaatataattatcacgtttagtaactcttgggatttactatgcttcaatccgaatcttatttatcgcattaactttcattacggtttctttgatataacgaatgcggaatttacctatcaagaactatatatggattattattatgatctcctattaatgagaccataaattgcaactaaaattagaaaaccacgtagtattgacgtcaagtcaacatcaaaaagccacgtgatatttgttatgcaaattatgaagataagctatataacttcaaaatatgcctatcaaaagtttagagtttatctatttaaaatggtaaccagcccctaaacctccaatatttttttatacttcaagagacccaaatttattttggatgatttaaaccttatttgtttaataaattaaaatttgaagaaactgatttattactaaaatcatgaatctcaccattatattaaaaattatattaattagattcataaattataaatataataatttctgatagactaatatagtttgccataaaataattaaaactaagactttcaattttaatactttcagtaactttgatcaaacacatttttatttaaatagaatcaattttttaaaacattaattgaataaattatatatttttttgtttgtatgtacgagatttttctttcagtccattaatatgtaaatccatatatatatatatattaacaaataaatgagaagctgaaatgacttatccatcattattttgtttgaaaattctataactcccgtcaaaccaaaattaggcaattttcattttttgaaagattctctcctaatttttgataattttttccggattctatcaattttaagaacatttaaacttctactatgatattatcctaataagacatatagtaacgtatattgacatctattagattattaccaaacatatgtacacacacacataaagcttgattgtataaaattataaatatatgtagcaataacacaaatacacacaaaccccaacacacaaaaacgcttgtgaaaaataaaaagagaaacccaaaaacagaacaaaagaaagaaaacaaaacgttcttaagagtttaa

SEQ ID NO: 1293 - DNA, 3000 bp, Unknown
  misc_feature (1)..( 3000): cDNA_ID_2133614_gDNA_ID_1620382_Annot_ID_155340 3000 nt of promoter + ATG
gacgtctattaaattgaggatataaaatacaagcatgatgaattgatgagtatatgtaatcagttgagttttaaaaaaatatttgtgtattcttttatacactagtaaaatttggttatattcaagaaacatcagatatttaatattatggaagagctaattttaagcgcaatataataagattcacacgatgggccttctcattacaagaaatgggcctttgaaacatatctcgtatttagatcagtaaaaccggacgcggatgcgattcaattttgcataaccggatcattgttcctcgagattactgaaagctcgtgtagattacgaaatacgaacgagcctcgtctacaattaaacgctagtatcggtgaccgaaacatctgaaaaagcatgccttcattgagcggcccaacttacaaaatttctctagtttacattattcggatggggtaaatgtcattttgaaatcaaaatttcataagaaatcatgtagcataatagtttgataaaagtttatggtagtgttgttgatgtgtgatattatggtttaaatttgacacatgtttttgagtaataatatttggtggatttttaaaaagcattggataaaggtgtttggtaatgtgacctttttacctgtttagctacatatttaaatagatattttatataaggggtggtaaatttcagatttttggtttttcgaaaattatgtaactgatcattcatgtcgtgtgatcaatgtttctagaagacaaaaaagaacatcaagaatctagtggaattagttgctttcataggataaccagctcatcaaccaaactctgtttgtaagattatataattctcaatttaaaagaaacaccaaacctattttagtttatatttttctattctaagattttagatgggtacatacgaaatcatcatattagttgtcacaatacaaatgactaatctttactaatatatacacatttaacaaaaagtcccaactccaaataccttttttctttactaatcccaccttgcttttatgctctttcttttgtcaattaaatatatatatatatatatattatattttattttattttctcaaaatgactgttagatgttttctctgtataattgtattgtttgattcagaaacacttaaaagtatatattatttgtataattttaatttttgttattaactacaaagtaaaacagttggtaaaaaggttagtgagtaattcaaactgtgaaaaagaaagtcgatttacttgtagaattacaaagtaattgaacttttttttaatgtttcttatctattgtcaatatatctataaaaatactactgccagactaaaataatacattttgtagtaaatgggcaagatcgttacagagacagacagacagctatctcatcaaagctttgtctcctttcccattacccaattttaaaaatattttgcagcgtgtgaatatcctttgtacaccacatactcttttcacatatataatattaaattacactaaaatttgtgtacaactattacctatatgtatatatatgtcagcatgcagcagctaacgaagcaaaaaacatgtattaatccgactgtctatatatgtaagtaacttgcgtttagaaaaagaaaaatatgtattagggacttgcattgcgtttcttaatcagaatgtaataagttaataacaatgctgaaacacattgacactaattttaaaaaatcttttcggttagagcaaatcaatttgcatggccaactactggaccgactactattgcaacttttttttgttttgtatagtatttcgttgcgtgtatctgcaatatatatcacccatgacccatgtctatatttattgtatttaaacgaaggttggtccagtgtattaatactgattgattatgacattttaattgaaaatatcccaaatatcaactctactgtagtccgtagagagacctgaatctctaatttactgttttttaaccatgccatcaaccaatccaataagaaaaacaggaacaaaatacaagtgaaaacgaagtagcaattgcataatttgggactccagaagtttttttattaatcctatagaatcaaatttttttcggaatcaaattttaactttaactattgtatcattacgctaactatgagaacatcttatattattatatgatttttcaactgttaaatttaaaagttgatcattttgttagtatatgtttcaaaaaatttaattttcaaaattatgtcgtagtatatgaaaaagcaacgagtgttttatatgataaagtagaaactaatgattttgaactaatttaatgaatctttaaaatctatgccggctcctaagtagccgagctgaaaacccatggcattgtcatgattcacgtcctggaccaaagtctcatgagtaaaccggtgtctaactctaaccattgtaagctattttgcatttaattacaaagtttaaaaaatcccccgaaattcctgaaataactcaagatatctccaacacttcctctagggttatcctgtcgtcttatttaaaacccggagttggggtgagaagccatctctctccctctctatctctctccctctctatctctctcttaccaatttccatttctcgggggaaaataataatacgacttttgaaatctctcactaatatttcccaagaaaacctgatgaattaaaagttcatattttcttggtgttgattggtattagatgactatttcttagtattagtcaattctctgtttccatcttatatggatagtctagacacagagcaaagatccttctttggagaaaaagaagatgagagacgagagaggatcgtttcttcacgtattggtcgtagatagatcttaatcgataaccatctaggccttgatctaaccattcaatataaactttatttccttcttcttttcgatctcaattgttccgaccaaacaagatg

SEQ ID NO: 1294 - DNA, 3000 bp, Unknown
  misc_feature (1)..( 3000): cDNA_ID_3061589_gDNA_ID_1620382_Annot_ID_155356 3000 nt of promoter + ATG
aaagtcgaattcagttccacaatatggtgacgaacaacttcgagcttttccttggagaccgtcagtgttgcaatgttacagccaggtggtggatctaatcccattttaattctacgaactgtacaaaatcttactcttgtaagcactactgcgatttctacaagtggtaaaatacagtggaagggaaaaaagatacaaatgtgtataccttggagtttaatttttccaatagtcttcttcgattttggaacagacgtctcagtaaccaactcagaaggtccctttcccagtaactcttcttcagaatgaaggaaaaacctctgcaaactaaatgcattccgcattatggtgcattcattgttgaggaagtaagaagcctcgctgacactatccgttgaccatgaatgaagacataaccgtacacaggcttcataggcaatcatcgcagaccatggaccttgctcactgcattcaaaccacacaaaaaatgatggaatgaataatcacagaggattaaaaaaacaagaaagcaaaatctaagtcagcaatgtaactcaaacctcgcatgaaaggtggggaaacgaggcaatgaacttgttgaagtgcttgtcccgttcagagtccttcctgaagttccagcctcaacatttcgtctttcaaattcattatgtgaagatatattgttccgcacaccacaagcttctgcttcctgtaaacatgataatcaaatcagaacatatttagaaacggtaaaggaaaacgagagacaagggggtaaaaagtaagtacatatgaaacttcagtgctagtagctgagtcagataaatcatcagcagcaccaaagaccttagcaccattacgtccaagtccattttgagctgcgacgtgaggcaaaccaagatgaattctataatcttgaggagagtgttgcctctcgaatatctcttcatctgaatcagaagcaatgtccatgtctgaacttgaaccaccattgttattacctctcacgggtttaattgatgaagacaatggaggagcactcctgaatccaaaaccatgaccagaattggcattgggaacagacttagcatccaatttccgattaccaatcgtccacctcgaatcaacatcctacaaaacaagcattagttacagcaaaatcaaacaacatcgaaaaatgcagataaagtttttgttcgtacctctcctatgtttcttaagccagcttccctgaacattgctccttaccttttaacctaaatttcagaagaaaaattatcaaaattttcattcacattcaacaatcaaatctcagttctataatgaaatccctaaaacatagcaactgaaacgaaatcaaacgaaatcaaacgaatcgaaggctacaaaagcgaaattctagtgaaaacggcaaaaagagaatgtagcaagaaagatgagaattactttttctctctttcacgaaattcacatgaaagaaagcgaaatcgtgaacggaaactcacaaaattgaagaatcgatctacttctcaatgccaaaaaatgttaatgcattagcttacttacactgcccagagaagactcttcggagttttttcgtttctttttttccagtgaaagagtcaacacaagtgtgaaaccagaaatttttccagtagaacaaactggttaaatttcttcaaattgactacaggtggaaaattcgaccagtgacagtcattggactcaaatttcacaatgaagaagaagaaaaatggaagatcgattgaggaagctcttatatttctttctctttttttatttaatcttcctttttttttatgtaagtttagtaaaaattgcgccaccataggaaaaaaatatatacggtgagagcggagaagaagagcggcgttggatggagacgtcaattaacggtgacggcgacttttattacgcttagcgtaaaactgacgtggcaagtgaagatacgccctttctttctcccataacggcaacgttatgcgcgcgtgacggtgcgtctatcagagaatcaatttgcattacattagttttggagaatttaggttttgttataaattagtaagaactacgagtgtatacagatttttgttaacccaaataatctaaacaactttccagtattaaaaacatgagtaatcgatttcttcagatttttcgatctaatgatttggtcgcatttgattaaccaactctttattattttgtttttcatgccaaacaaatgtcctgccggatctcaattatctcatttgactaatcaaattaatatagcataattttcatcaattctcatttattgaaatttacaatgaatcaacaaataaaaacccacaaaaaacgaattcaattaatttgatccggtcttttaaatttaaagtattggaaaatgaaaataattaattttctttaatcaacaatataagaaattaaagaatatgagtattgaccaaaagaaaaattaatatcaacgaaagaaagaatttggacaactttttcttgtcttcatatgccttttctccgaccacattagttgtgtccaggtcacgccgaaaacgcatatgcttagccagcaaggtaatagctttaacaggcttcaaaaagcccatctaaagcctaatcaaaagcccgtattctaacatttgaccttgaacagtgtcaactagttggggaagctgacgcactaaattattatcgtccattcactcgctcttatcaaaaaaaccgaaacctagccacgcgcctcgtacactcaacgtgggtttcacgctgttaatccttatttcaactaacgacgtcgtttatcagagtgtgttaatcacgcgcgagtgaagagaatttccttttacagctcattatgactcggctttgaagctttttattcttcttctcaatttctttttttcttccagaaatttcctccgatttcaaaattttccggtgaaatcgaaaaaaaaagcgagatcttcttctctaatg

SEQ ID NO: 1295 - DNA, 3000 bp, Unknown
  misc_feature (1)..( 3000): cDNA_ID_3061585_gDNA_ID_1620382_Annot_ID_155357 3000 nt of promoter + ATG
aaggaataatttggttaatgtgaagcgttagtcaaaaaagttatatcaaaagaggactttgcagaatgtctttttctttagaatctctgtttattaaaaagaagtgggtccgttcagaaagaagaaagagttactttttataaacaacttgtctatttctggtaaaggtttcaaaattccttcaaatcaacccaacacaatgaatacaagatggggccaataggaatagtaaaacaagtggtcaagttagtaactcaaaatgcaaattacactctccctaaccaaacttaagacaatgatgatcagacagagaaactctacttgaaacaaacatgcagtatagtggatgaagaaagagtacctgtttcgccatgctacaagctttctctgaagagttgagaatctcgtagtaaaacactgagaagttaagagccaaaccaagcctgatcggatgtgtaggtgctagatcagcaactgcaacgtccttcaatacaaaaacccacgaatgagcaaaaatacatattttcagaacaattatatattactaagacatattagggaagcaattgatcttaagcccaaatagtaaaagttgactacttctaacgataggatcaatacaatagctagattcgagaccaatttacttattatgagacaactgattacagattagctaattgaagtaatctcagaaatagggttttagctccacaacaggatcgattcaaggatttagggaatcaaagatatacctgagcagctttgtaagcgatcatagtatcttcagcagcagttttcctctcatcaccagatttaaactcagccaaataacgatgataatctcctttcatcttcaggtaaaaaaccttagactcactggcagtagctgaaggaattagatgcgaatcaagtaacctgagaatcccagaacagatcgaagaaagctcagtctcaactttagatctgtaatccttaacaagcgacacgtgttcttcgttcttcctgctctcttccttttgctcaatcgaagacacgattctccatgccgcacgaagagatccaatcacgttcttatacgcgaccgagagaagattcctctcttctacggtcagctcaccggccggtgtagctccacttacgagctgttccatgaattgaaccatctcttcgtaacgctcggcttgctcggcgagcttcgccatgtagacatattgatctctgcttaaggtcgtcgccattagagaagaagatctcgctttttttttcgatttcaccggaaaattttgaaatcggaggaaatttctggaagaaaaaaagaaattgagaagaagaataaaaagcttcaaagccgagtcataatgagctgtaaaaggaaattctcttcactcgcgcgtgattaacacactctgataaacgacgtcgttagttgaaataaggattaacagcgtgaaacccacgttgagtgtacgaggcgcgtggctaggtttcggtttttttgataagagcgagtgaatggacgataataatttagtgcgtcagcttccccaactagttgacactgttcaaggtcaaatgttagaatacgggcttttgattaggctttagatgggctttttgaagcctgttaaagctattaccttgctggctaagcatatgcgttttcggcgtgacctggacacaactaatgtggtcggagaaaaggcatatgaagacaagaaaaagttgtccaaattctttctttcgttgatattaatttttcttttggtcaatactcatattctttaatttcttatattgttgattaaagaaaattaattattttcattttccaatactttaaatttaaaagaccggatcaaattaattgaattcgttttttgtgggtttttatttgttgattcattgtaaatttcaataaatgagaattgatgaaaattatgctatattaatttgattagtcaaatgagataattgagatccggcaggacatttgtttggcatgaaaaacaaaataataaagagttggttaatcaaatgcgaccaaatcattagatcgaaaaatctgaagaaatcgattactcatgtttttaatactggaaagttgtttagattatttgggttaacaaaaatctgtatacactcgtagttcttactaatttataacaaaacctaaattctccaaaactaatgtaatgcaaattgattctctgatagacgcaccgtcacgcgcgcataacgttgccgttatgggagaaagaaagggcgtatcttcacttgccacgtcagttttacgctaagcgtaataaaagtcgccgtcaccgttaattgacgtctccatccaacgccgctcttcttctccgctctcaccgtatatatttttttcctatggtggcgcaatttttactaaacttacataaaaaaaaaggaagattaaataaaaaaagagaaagaaatataagagcttcctcaatcgatcttccatttttcttcttcttcattgtgaaatttgagtccaatgactgtcactggtcgaattttccacctgtagtcaatttgaagaaatttaaccagtttgttctactggaaaaatttctggtttcacacttgtgttgactctttcactggaaaaaaagaaacgaaaaaactccgaagagtcttctctgggcagtgtaagtaagctaatgcattaacattttttggcattgagaagtagatcgattcttcaattttgtgagtttccgttcacgatttcgctttctttcatgtgaatttcgtgaaagagagaaaaagtaattctcatctttcttgctacattctctttttgccgttttcactagaatttcgcttttgtagccttcgattcgtttgatttcgtttgatttcgtttcagttgctatgttttagggatttcattatagaactgagatttgattgttgaatgtgaatgaaaattttgataatttttcttctgaaatttaggttaaaaggtaaggagca

SEQ ID NO: 1296 - DNA, 3000 bp, Unknown
  misc_feature (1)..( 3000): cDNA_ID_2133676_gDNA_ID_1620382_Annot_ID_155360 3000 nt of promoter + ATG
cttgtttatttgttgaaaatgtagaagaaactaaaaaaataaacacaatgatcatttcaaaattacggtgcaatgagtatctacagtagtctctgtatttattttacttttcgtatcagtagtctctgtatatattactaattttaatacgataaaaggatggtaccataagatgatgatcatgacaaaggtgcaatgaaaatcgaattttaattgattaaatgataatggcacacgcagatctgtgtggtgcatatgattttttttttttgttattaattcttttggaattttggaccgaccagatagcgtgacattgaaggtaaataattactcactcgtatttataccaagaaaaaaaaaattgattacaaaagttttggtgggtctactttatgaaagaagaaaaaagtgtgtgggagaaaaattgagctttagagggataacttctgaattctctaaaatctacatataattttacttaaaaaggcccaaagttattgtattatttttggaccttaaacagtctactacaatgaaagggccttatcttaattgttcaggcccaaatgattttaagcattgacactcaaaacaatatcttaaaggcaattaaaggaaatctcaaggcactaaatatttgtggaaaaaaagcttaaagtctatttaataaaacaaaatcagatgatgtatattgacattaattacaaaattaaatgaatttctaacccaaaaaaatggttagattcttggcgttatggtactatttactttacttgcgctttatataaactttggataaattcatgaataccgttgtttaataatttgttcgatgtgatattgtaacccgaactaacccaaaactttaactttatacaatttgtttatgtacgaaacactttaatagtatgattcaactcatcttctatacctttttcctaaactttaaaaacttttttttaatgtatgactaacttttttttccttgaaacacactatcaagttatcaacgtacagctaaataattgcttatttgaagcaaaaataatgatataaatactgaaaaagaaaagtagaagaatcatattcacacgccaacaaatcgtataatgctgcttcatctaaaattggtccttcgaaagtcacgtccatttagctctcacgttctacccgaatcaattttaaatccttaatttacagtcataacacatatctctgataacgttattttctggatatgtaagacgcagaatttcatttctattaggttaatttaccaaccggagtaatttataaatttgtgaaaatctcgcctaacacaaagtgaataataataaatcacttgatagatgtttagccaaacgtagatataagagtaatcttattgttatttttgatagtactataggacagatttattgatgagaaaattaaaaagtgaaaaaagtgggtgaaaagaagagagcagaaattaaaaaaaggacgagaagcgagaagagtgcatcttttgatggatattgaaaatcttaagtcaagctgtaatgggaagaaagaacacaacaagtgtcggtgcctctaagcaaattccacataattctaaagaaacaacataattattattttatttttttcgcaatatttttaacagaaattgtttttattccagccatgcgtatatataagctgtcttttcggaaaaaataaaaagctgtctttatctatcccaacggtccaaaaatttaataaaatagtattataaatgcactcgtaatacccaatgttttatttttcctgaggattaaagaggcaaatatactagcctttttgttttattaacagctagctaatgagcaaaatagctgtagatagatagcgccactaatctaatccaaggccattagcttatgttgtgtatgatgtgatacccccaagtctaaattagtgatggtgacgtataattaataatggtaattttgacgacgagtatggaacgtgttccgaatttttctctcaaataatgcgttttgattttgattatcaaaagattccaaaataaatacattgaagaattcgttctctaatcttctaaaccaacataataaacttcggaccactcgacgaccaaattttcagttatgcgtaattactatttaagtcaatcaattctgttatttaatgacattaccaaaaatcttaataatcctaggctatatgtaattatgtacgagtcacacataattaatatagatccgtgatgtatgtctctagacgttatatataaaccataacagcaaaataaattataacaacacatagggaaaagattttatgaccactaccaaatagaggcagtcatagataacaaataacaaatgaggcatcgaactttaaagcttaaagatttaataccgcatttgtatcgtcattaagtgcgataattctgtaattatgtaacgttgtcattcaggagtccggaaattaattaattaattaaactatccgttgtcgtgtcacgagaataaaaggttaaattcgccgtgtttttattaagaggagactaggtggggcccaattgagacagacagcaaatttaatgaacaggtgtccatgtgagacgcattcacacgctctctctctcaagtctctctttccattactactactataaaccgttctgggaacttgatcaacatttttaatcctaaaacttcttttgagtgtgttgaagaagaagaagattaaaattcactaaaaacccgagaaaagtggaagaagaaggaaggaagaagaagacaagagagcattctgattcatgtgactctggtttcgtttctttctgtgtctctgctgtgtcgttttctcggcatatttctgatctttcgttctcggttggtttttggtttctgggtattgattgattgattcaaaagtcttcaactttcctggaaactggatctgggtttatccgtttttactcgtctgagaagagaaaaaagg

SEQ ID NO: 1297 - DNA, 3000 bp, Unknown
  misc_feature (1)..( 3000): cDNA_ID_2133672_gDNA_ID_1620382_Annot_ID_155359 3000 nt of promoter + ATG
cacctagtctcctcttaataaaaacacggcgaatttaaccttttattctcgtgacacgacaacggatagtttaattaattaattaatttccggactcctgaatgacaacgttacataattacagaattatcgcacttaatgacgatacaaatgcggtattaaatctttaagctttaaagttcgatgcctcatttgttatttgttatctatgactgcctctatttggtagtggtcataaaatcttttccctatgtgttgttataatttattttgctgttatggtttatatataacgtctagagacatacatcacggatctatattaattatgtgtgactcgtacataattacatatagcctaggattattaagatttttggtaatgtcattaaataacagaattgattgacttaaatagtaattacgcataactgaaaatttggtcgtcgagtggtccgaagtttattatgttggtttagaagattagagaacgaattcttcaatgtatttattttggaatcttttgataatcaaaatcaaaacgcattatttgagagaaaaattcggaacacgttccatactcgtcgtcaaaattaccattattaattatacgtcaccatcactaatttagacttgggggtatcacatcatacacaacataagctaatggccttggattagattagtggcgctatctatctacagctattttgctcattagctagctgttaataaaacaaaaaggctagtatatttgcctctttaatcctcaggaaaaataaaacattgggtattacgagtgcatttataatactattttattaaatttttggaccgttgggatagataaagacagctttttattttttccgaaaagacagcttatatatacgcatggctggaataaaaacaatttctgttaaaaatattgcgaaaaaaataaaataataattatgttgtttctttagaattatgtggaatttgcttagaggcaccgacacttgttgtgttctttcttcccattacagcttgacttaagattttcaatatccatcaaaagatgcactcttctcgcttctcgtcctttttttaatttctgctctcttcttttcacccacttttttcactttttaattttctcatcaataaatctgtcctatagtactatcaaaaataacaataagattactcttatatctacgtttggctaaacatctatcaagtgatttattattattcactttgtgttaggcgagattttcacaaatttataaattactccggttggtaaattaacctaatagaaatgaaattctgcgtcttacatatccagaaaataacgttatcagagatatgtgttatgactgtaaattaaggatttaaaattgattcgggtagaacgtgagagctaaatggacgtgactttcgaaggaccaattttagatgaagcagcattatacgatttgttggcgtgtgaatatgattcttctacttttctttttcagtatttatatcattatttttgcttcaaataagcaattatttagctgtacgttgataacttgatagtgtgtttcaaggaaaaaaaagttagtcatacattaaaaaaaagtttttaaagtttaggaaaaaggtatagaagatgagttgaatcatactattaaagtgtttcgtacataaacaaattgtataaagttaaagttttgggttagttcgggttacaatatcacatcgaacaaattattaaacaacggtattcatgaatttatccaaagtttatataaagcgcaagtaaagtaaatagtaccataacgccaagaatctaaccatttttttgggttagaaattcatttaattttgtaattaatgtcaatatacatcatctgattttgttttattaaatagactttaagctttttttccacaaatatttagtgccttgagatttcctttaattgcctttaagatattgttttgagtgtcaatgcttaaaatcatttgggcctgaacaattaagataaggccctttcattgtagtagactgtttaaggtccaaaaataatacaataactttgggcctttttaagtaaaattatatgtagattttagagaattcagaagttatccctctaaagctcaatttttctcccacacacttttttcttctttcataaagtagacccaccaaaacttttgtaatcaattttttttttcttggtataaatacgagtgagtaattatttaccttcaatgtcacgctatctggtcggtccaaaattccaaaagaattaataacaaaaaaaaaaaatcatatgcaccacacagatctgcgtgtgccattatcatttaatcaattaaaattcgattttcattgcacctttgtcatgatcatcatcttatggtaccatccttttatcgtattaaaattagtaatatatacagagactactgatacgaaaagtaaaataaatacagagactactgtagatactcattgcaccgtaattttgaaatgatcattgtgtttatttttttagtttcttctacattttcaacaaataaacaagctctatttgataaattcctgactctataatattttgatcggtattactattaaaaaaggaccgaacaatgaactgaaatcgaacacgagaaggcgtcgttaacgcacagcacaaaatattttgtgtcttaaaagacgttttggtgtctctgtcattttattatttttaatttgttttgtttattaaaaaaagaagaagaacaaagcaaaaacgacatcgtatgatactcattgcttcggccttcatttttatatctgagagagagacaaagagacaaaagtaagaaacacattttttttggatttggaggtaataaatttcaaaaacttttgaatgttttcatttggaatctgaggttgtctgctcgagaattttggtgggtttgtgctgaaatctggaataggattagggttttttcgtgaatttgaaaatg

SEQ ID NO: 1298 - DNA, 3000 bp, Unknown
  misc_feature (1)..( 3000): cDNA_ID_2133647_gDNA_ID_1620382_Annot_ID_155350 3000 nt of promoter + ATG
ccaataaagataactcaatttcataaaaagaaaaagacacgaacatgattaaacagttctgaaatcacaagaatcagatctcgagaatacctgattttataaaaattatgaattttctttttgagttcttacattttattcctattaaaagagtgatgaaacatgtgagaacgaataataaagtaattttattagcctattactggatttacacaacatattccacgtagacaacaaaccatgaaaagttacacgtgtcaacatctcattttaactccaccgtaaacaatcgaataacgaaaaatcaatcaaattatcgaaattaacaccgaaactataaaatgtaaaacataatgttttcaagatgtaaacaatgagatcctaagccaacacgacggcgtaaataatcgcggcgacaagtgaaccgacgacgaaagctttgttggttaaagcggcgttaggtggaggagcggaagcatcggaaggtgtcggggctagttcgccggggctaactccgggaccttccggtgcaggtggagaagcggtaggggcatcagacgacggagaaggagctgaagacggaggagaagaggtgggggcaggggagacggcaggtggtggagtggtggtcggagcgggagttgcggcgggtggtggagtggcaacgggaggaggagtgacggtggtggttggagaaggagctggagcttgagcgaggcatgaggtagtgaagagagcaacgatgaagaaagcttcgatgatcttcgaattcattttttccactctctctaaagatttgtttacttaagaaagatagagagtgaagcagagttgtttaggtgaggaatgaccacgatggaactatataaagcgagagagagagataacaataattataaattaagtagtatctaattaaatatcttgcggaggggatcataattattcgattattattagtataaataatgattagtagctaatattcaaatgaaggaataacattttagtagtcaaatagcagaaacgtttaagtgaaaaaaaatagcaaaaatatttgatcagtaacacacacatatcagtgattaacaacttgttttatcgtaaataagagaatacattttcaaaactaaacataattaagtgatagatcattttatcactataatgtagtcgcatatatgtatatatataattttgtaggatttttaggttaactcaatttttagctcttagttgtaaatttgtcattttttaatgatttggtaagtatagtagatgagaaatcgaagttgagaaccaattctatccgttgagtataaaatcatcaatggttttagaagaccggattggtttagctaaatcgaatcatgattgtcaataataattggagagagaaaacgtataatgaagtagtattgaatattgtatcatgtttgtcttactgtctaatcgatccacccaccgataataatagtatactttttctgatatagtaaatagtaacgatctctttgcccgtatacgatgaaccttaatgacaaaaatacagatctatcaagaaagaacgatgtcgttattatcgtatatcccatgtgcgtagcagacctatcgggataatttttgattactggttatggttttattgttgtcgttaccgttggatatttgctgtttttcgttttatttattttcttttgtccattactatctcttgtgtttgttgctagtagtaacaagagttggagatagctgtcagagaattttatatagttgaataataaatacaaatattataaccccaaataaaacgggtacatatacattacaacataacataacaacggaagaagacatttgatagcctgtaaaggtcattttacagtgaatccagaaggttcgtattaatcattaaattaaaatataatcggtatttgacaaaatgaactgaattatagttggcaattttatgaggcccatatgatgcgaaaccaaccgacgattatacactatacctacaatttttattgcactgactcgattgattaatccctaactaaaagttcaaaatatttgcatccaactttattttcattagtgtgaacatcaatataaagaattgagaagatcattacaggttgtttcagatgataacgacaagttcgttatatatgcactataacttgctttgttacatatgctataaagttcatttgcaatatatacgatttgattacatcagtgtgggattcctagaggatgaattaagtgttaaaaatgaatctatacatagtagtttgctttgaatccatatgaaaaaactgttgaggtttaatgtcgaaatttctttatctttggcttcggctgcagtcaaaattgccgaaagaccacctcgactccaaaccattttcttgataattgtaaaaaaaaaaaaaaaaaaaaacatgatgtcccatatgcgtgtctaataatatatatagccaagaagcatatatttatttaggggaagagaatgctaaagcatgagttttgtgctggctttatgttgttgtaactcttagagcaacatgtattcacttctaactgaactttacataatttaaagcatgatttggattatctaaaaaaaagttagattatgatgaatatacaagttttttttgttagtggaaaactctcatttcttcgagtaagcttctccatacataattttcattgtctatatatatattgatctatttgtaattgtaactcttgaaagtttggaaaatatttgtaataagagataaacaatgatatgggccgatatttgcgaaactgatttcaaaggattcttctttatgggcctatagagttttgggcctttctaccaaaactttcgcgacaagcgatatgttagggcacaaggacaattcgaaacctgagaagagagctagagcttgtcagatgttaggatactcctatccttgtttccaaacgggattacggttaacgacggcg

SEQ ID NO: 1299 - DNA, 3000 bp, Unknown
  misc_feature (1)..( 3000): cDNA_ID_2045820_gDNA_ID_1620383_Annot_ID_155371 3000 nt of
cccgtttttatggttttttttttaaggaataattttttatctaaataataaactaataaactacatataataaactaatagacaaacaaaaacttatgtcggattcttggtgcttaaaagaaaaatataattttggtgtgtgtgtttttttctttacagattagttttgatgtttttttgtaaatcatttgtattgtctctattttagtaattttacatcttcctattcaaccatcatttttttacagcaatctgtcatgggcttgttttcaaaagatcgtgcatcggtcgacaatctcaatattatccgaccaacttttctaccatcgaccatctccaactagttttgtcctgctttgagcttattaggtgattgactttaaatcacgaccagtttgtgcaggaatggcctaatctcctcatctgtgtttgatcctcaattagtaataaagactcaaactctacccaaattgttctgtctaactccaaaataattcctccaacctgagtcatccatgcccttcactaaagcacattcacctgctccagtgaaatggcccagcggaagccacgcaactgtcatgatacatcccaacaaaagggtcgtgacaaaccgcaaccatttctatagaattttgcatcccttaaaactagtcaatgcatgtatggcatcagttacatatataacaaaattttacaaacaaaaatagcaagattcacctcaaaaattaaagggattgaagtattttgacgttgtataatcttgtagctaatctcgttattggttcgatgacataaaaatttgctattaaagttcgacgacttatattggattttggagttgtaggattagccgtggcccgtggtagcatctacagttgttgtgtattaattttgatttctgactaaaccatactttatcacaattccagcatccacttgcgtatgacagatgttttgttcacttaaagattttgaaaattccaaaggcgagtttatagtcattaagaatcaaagaaacgtccgagggcattaattggtggagggcctataaagatgagacgaggggaccaaattgtagaaatagtaacgggtggacctaataataaatggtagtgataccaaattaccaatcgttaaatagatttcttccctaggtagagcacaaatgggttggtaaagtcaatgatgcacggaatcgtccacgagatttacatacgtctattttaatagcatctctaatgtgcacttttatttttttctattttaaagatattttttttaatgtataactgtaaaatagaattttctttaaaataaataactcttagtttttactttttactttatatataaagtaatttccattttttttattttagaggaaactctatttttaaaaaatacattgcagcaacattaattatatttcttctaaaatagagttgtttctaaaatatagaaaaaagaaaagtatgcattggagatgcttttatatatattggctattttgagggtttttcacaaaacctaaagaagagaaatgtagtacaattttcaataatatatcatgtatatttatgaatataataatgaaatactttttctcttctacaaagattaatgatgtgggtttttttcttattccacagagattgattttttgaatcaatattattattatttttattcatgactaatagagaagaaagaagtagaattgatattattaaacaaacaaaatattaattaaaaaatgtaaaatttctcctttttttaatttgtatgaaaaacctacaacatcaaatattgtgaaaccaaattagtatatcatactattagatgattttaatattatatataatataattactaattatattgaagaaatccaaatttgttaatatcttaatcaaaaagttaaaaccatatctagtatatacaaagaagagagaaatagtgtcatttagtgatcataatatgaatggaaaaaaataaaaataaaaaaaatacagcatctatagactaaaatctatgtgtatgaataaaatatataaccatcgaattgttcatagtttggttaggtgaacacaaccattacacacaatttaaaatatattcaactagctaggttaggtgaaccacccagtttaatttgtacactatattcgatagagcgttgtcgtatatactttttttctttatagatgtgcggtcgtatttgcatagttaatgctggtcaaaaatgataattatgtatcgttgtgctgctatatgaggtaatgctttaacaattactaatcacaaatgtaatatttaaaacgttattcttaacttttcttacagtttttgtgtactattctgtatacccgagtgaaccaattattttattcaaaattaaatatgttattttacttagactgaatttataaagaaagtttaagaatttttaaccacgtatttggttaatggtttaagtaggttgcatccatgtgttctctagtttaatttttcggtaaaaacaatgttttacgccatgtcataaagtattaacaaagattggtctcggtctctcggatcgtagaaggagattaacaaaaatttgagaattatttatcctatcccgagttgttttctattatgagtaatgaaattgtcttctgtctcactattcatccgttttcggaaaagaaaaaaaaaaatagccactaaaagattagaactataataatactgtattgtttactaaaaacttgagtgttaaaagatttgtaattagcatactaccatccataatagttacttgtaataccatgaactattactttgttatcaatatttcatttaaaatcttttttgttcttttgatacagaaaaaattagttattgaatttgaaagttccattgacttatcctttgagatagtcctaaagtcgatggcagaacagaggctaatttcgagtctttcagttttgagagcactaaagccagatagaaatg

SEQ ID NO: 1300 - DNA, 3000 bp, Unknown
  misc_feature (1)..( 3000): cDNA_ID_2990891_gDNA_ID_1620383_Annot_ID_155379 3000 nt of promoter + ATG
atcgaagatggtaacaccgttcagattacaaatagtttttggtggttcatatttagttgtaaatctcttattaacatgaagcattgcctctctttttttttttggtaaaagatgaacttgtgtttgagattttatgtaaataaagtatccaagtatattcatataaatcaccaacttttgattcaaagcataatgtgtgtgtatacagtttttattgtttcacatgtctaaaagcatgcctttccatagtttaatcataaagttttataagccagcaataagaatacttttggatcttgtgattcgtgtatcatatgattaccaaactcaagatgccaaaaaaggttggtaaacaagtattttattgatccaataatttgttatactaatacacatacgatttagttcaataattcctaaagaaaagtttttttgtttgtttttcatttggattgttaaagtattcaattctttatgtcgtacaacaagtaaatagaaagaaaaaaatagagtgcgagtttcactttcaataaatgcttgtgtgattatctttatttgtgtacatactagatctacatccaccgacaaaccagtgtcgaggaagcatatgcaactgtcctgcagatttaaagtctcatgtaattaaatgttgttcaatttgtttgttgtgtgattaccagtttgatgtatagttaaagttaccaagtaataaaatcatcaaacatacatatagtactaattttttgtttatcacataaacattttgttgactttttggtgttgtttgcaatagcatcttcttgataaattcctagtgaactcaaaattgacctacaccagttccatacaaatagaaagatactccaaaactagttgtggaagtggttgaatataattttatattccaaacttagaaaattcatgttaaattccgcaaaagagcttataacgtagtttatgcacgatatggttaaacttcctcagttgctatagagttaaaaaaaaacaaatattttgaaattggtaactagtacgtgaaattttttaatgcagactgaaagaacaaaataaaacttaaaatatgtttacaaaaaaatattctttcatgatttacgcaaaccaaaagttacatttaaggttaggaaagaaaaaatgacctaggaaattaaaacaatgaggttcgttgataaaggtcaagaatcaaagtttggtagccaaattaccagcaaacaaaaaaagattaagaccattaatccatcgcgtatactcattgtcttatgaatcttaaacaataatattatattatatacagtaggtccataatttatgtttctttacctactctatttaccaaaaacatacatagtttttatctgacttacacaagtgtactaatggccagacaagattgttacttgttcaagtaaaattgtgttaccagatattcaactttctatatatacatatagatttgacaactattcgactttctatatttaactgaaagagttgtatcactgaaatttggagtattgttccctgtaaataattcgatttgtttccaaaacgctatggaacaggccttgattttgatactctttcgtgctgacacttgaaacggcgtcgtatcaataatagaagaaaaccttactgtggaaataatcaaattgtgaatctccaccaacctcaatgggtcccattgccacccactaatctccccacgtacaccaactccccttcacgttttaatctcttaatatacttttattataagttaattaaatgatttcaaccttagtaatactaaccattaattattcatttctaatctccaatattttttttgaaaaacctttctgttcagatattttcgtcaattaatcaagatctcattcataaattaaaaaaaaaaacaaaattcaagctaaaaatacatacccaacaaaaattccttaaaaaaattacttatggggcatctggtaatttaattttcctataaaagatggcaatattaattcagtttttttttttaatttaccaatatgatactttaattatatttcttacttgttagctctactaatgcacacatacttatttctacgaatataagaaaaaaatactgaactcaaacaatagacaaaaaagaaataatcctacactcaagtgtgttgaaaaataacatcaaattcagagaaaatgcacatacaccaataatataaataaatagggatatttaaaataataaataaaattgcgaaaatatcgagcaccaccagatctacagaaatgacacagagcccaacgatgatgtatctcgtttattttcgctataaataaactcacacagcccactcttcttcctcgctctctctttcgccttctcttagcctaccctttttccttcctcctctccgattcttcctccgtcaggttcgtctccgactttctatgtcttccttacgtctctcttatttagctccctttccttccttctccacgttattattactacttcgcttttagtgtgattcgtttcattctcgtttttttatattcctcgatctgtttgctcatttgttgagatctattcgctatgtgagttcatttgactcagatctggatatttcgtgttgttcgatttatagatctggtttctggatctgtttacgatctatcgtcatctttcctttgaaaatgattggtgtttctgtgttcgtattcgtttagatctaaagtttttgatcgatgaatgtcgcatgtgtttttatctgaaagttttcgattacagtatcaagtggtggtagtagtagtagtagactcaaaaagctgcacaaactttttatacacgtgaattgtgattgctttacggttttcttggagtttgttaattaaatcatttaatattaagaagtttatgaattaagagaacgttattttatactatgattttgattttgatttggtttgtgtgttttaatgcagtaaaagaaaatcaaa

SEQ ID NO: 1301 - DNA, 3000 bp, Unknown
  misc_feature (1)..( 3000): cDNA_ID_3061611_gDNA_ID_1620383_Annot_ID_155373 3000 nt of promoter + ATG
caaactatgaacaattcgatggttatatattttattcatacacatagattttagtctatagatgctgtattttttttatttttatttttttccattcatattatgatcactaaatgacactatttctctcttctttgtatatactagatatggttttaactttttgattaagatattaacaaatttggatttcttcaatataattagtaattatattatatataatattaaaatcatctaatagtatgatatactaatttggtttcacaatatttgatgttgtaggtttttcatacaaattaaaaaaaggagaaattttacattttttaattaatattttgtttgtttaataatatcaattctacttctttcttctctattagtcatgaataaaaataataataatattgattcaaaaaatcaatctctgtggaataagaaaaaaacccacatcattaatctttgtagaagagaaaaagtatttcattattatattcataaatatacatgatatattattgaaaattgtactacatttctcttctttaggttttgtgaaaaaccctcaaaatagccaatatatataaaagcatctccaatgcatacttttcttttttctatattttagaaacaactctattttagaagaaatataattaatgttgctgcaatgtattttttaaaaatagagtttcctctaaaataaaaaaaatggaaattactttatatataaagtaaaaagtaaaaactaagagttatttattttaaagaaaattctattttacagttatacattaaaaaaaatatctttaaaatagaaaaaaataaaagtgcacattagagatgctattaaaatagacgtatgtaaatctcgtggacgattccgtgcatcattgactttaccaacccatttgtgctctacctagggaagaaatctatttaacgattggtaatttggtatcactaccatttattattaggtccacccgttactatttctacaatttggtcccctcgtctcatctttataggccctccaccaattaatgccctcggacgtttctttgattcttaatgactataaactcgcctttggaattttcaaaatctttaagtgaacaaaacatctgtcatacgcaagtggatgctggaattgtgataaagtatggtttagtcagaaatcaaaattaatacacaacaactgtagatgctaccacgggccacggctaatcctacaactccaaaatccaatataagtcgtcgaactttaatagcaaatttttatgtcatcgaaccaataacgagattagctacaagattatacaacgtcaaaatacttcaatccctttaatttttgaggtgaatcttgctatttttgtttgtaaaattttgttatatatgtaactgatgccatacatgcattgactagttttaagggatgcaaaattctatagaaatggttgcggtttgtcacgacccttttgttgggatgtatcatgacagttgcgtggcttccgctgggccatttcactggagcaggtgaatgtgctttagtgaagggcatggatgactcaggttggaggaattattttggagttagacagaacaatttgggtagagtttgagtctttattactaattgaggatcaaacacagatgaggagattaggccattcctgcacaaactggtcgtgatttaaagtcaatcacctaataagctcaaagcaggacaaaactagttggagatggtcgatggtagaaaagttggtcggataatattgagattgtcgaccgatgcacgatcttttgaaaacaagcccatgacagattgctgtaaaaaaatgatggttgaataggaagatgtaaaattactaaaatagagacaatacaaatgatttacaaaaaaacatcaaaactaatctgtaaagaaaaaaacacacacaccaaaattatatttttcttttaagcaccaagaatccgacataagtttttgtttgtctattagtttattatatgtagtttattagtttattatttagataaaaaattattccttaaaaaaaaaaccataaaaacgggattgttaccgtataacgaaattacaaaatctagatgtggttccaagttctaaccattaggttcaacatcccaaagatcagttgatagactggtgattccactagaaaagttgacaaaaggggcaattggtagaaacaatagagactttaactcggtttttttcaaatgttcaaagtttgatttaattattcaaccacttttttttaaaaaaaaatctaataatgaaaaccttctgtttttttttttaaagtcaatccccaatattatctatgttaatatttttgaaatacatatttgttgttttaattgagtcgttttctaatttttgcacctaaacattcaatcgaatcttttcttaaagttcgataatatatgaaaacaaattaaacttcaatattaatatataagacgatataccgcagaaaaaatattaaaactaacaatcaaaaaattatataatttaaacacaaaataaaacaatacaacgtaaaatttaaaaaatttagtaacccaaactcgaatcttttagtagtattaaaagaattacacatatttttctcaccaaaattatcttttaattttttaattatattctacttattaccaactataattatttccaagtagtcgttagtaagttacttacttattagttattacatgttttgattattctaattttaattgtcaaacacattagaatatttttaaactctagaaatattattttaaacactttagttttgaattttaccattgcatttgaacaacttgtttcaatattattaaataagaaatctcaaatattaatatacgaaaaggagagaaaataaaatagtattggcatattctgggaaaccttcaatttctttttgtgtgttaagaatagatagatgagagtgatgatttggagaaagagag

SEQ ID NO: 1302 - DNA, 3000 bp, Unknown
  misc_feature (1)..( 3000): cDNA_ID_3061607_gDNA_ID_1620383_Annot_ID_155378 3000 nt of promoter + ATG
gtccgaggattccgatttcgatgaacaagctgatagcaaaaaacttcaccatgatgtggctgagatagtactaggaagtggtgaaacacaccatgagcaatcggacatgatggaaggagaaacttctgataagggaaaacttgatgaagtcagtgatagtgattcatctttatcagagaaagaagaaaagatacgtgatatcagtgaagatgaagcaatgttaatttcagaacaagtagttgatcttcatgaagaattaggggcgtcttcactgccttcttttggagaattagaaatcaatatggctagaggggtggaggatgattatcaccatgatgaagctcgtgctgaagaatctttcattactgcgcatccgtcacttgacgagtcagccatacatgttctttgtggtttgggggacggtgatcacgaggaacctgtttacgattcgagtcctccctcaggcagtagattcccatcattttcttccgtatcgtctgattacaaaccagatctacctgaaaagaatggggaagaaatagaagaaaatgaagagaaagaacgtgaagtttattctgaaagtataggtcctgaggaaattcattctacttctaatgagactgaaacaaggacaagcgaagtaggagagaatagcatgcatgttacaggagaggcaagccttgtcatgagggagcattcgacaccactggaagaatcacctgatgtggtgcatgacatagctgaaacttcagtaaacaagtcagtagttgaagagataatgtacgaggaagaggaagctcaaaaacaaaaagatgaagtcagtcctcaaacattcaatgctgacatcccaatagatagttatgccagtttgtcttctggagcagttgagtatgttgagacgcattcatttaatgacgaagatgttgcacagttggaacaagaaccagttcactcattagttcatgatgctgaggaagaaactcacaacgaccaaacaatggatattgaagtagactctgtaaatgctagtgcccaaaatgtgggatctgaagaaacaagtccatctgaatcagatagagaactgacatggtcagataaatctgtggtagaacaatcatctcttgaacctggtgacgatcaagtaagtcatgaaacttatcttctctaatagatgcacaatatcacagttactttaacatactatcttatgctgctctcatctacgtttgagatagtctatgtgatatactcaacatcacaatctacaaactattggaaggaatatacggaatcaatttctttattgatacatgtgctacaacatatcttctatatatgtcacgtttctaatctgataatggtacatcatctaaatttgtggtttcttaaatagaactggaaatagtaacaggtcgatacctatgtttggacttctttattctttatacaatttgttaagcgggagatctgtttcttatcgctatgttgcgttattgcaggtaccaactcgtgcaggtcctgtgagtgtcgtcttttcccgcaacatcacttttcacgagtatcacgatgctcctgaagatacaaccgagttatcttgtttgacgtctgatacatcctcttctccaacagaatctcccgagtacacgacacctatggttggtgaaggctcaagggcagagtttttccaagaggatatttatgaggagctagaccatgtggtggagcgattagagcagcttacagacttgcatgcaatatctcaaagtcctcctgaaattatcaccgaagaggcagacgagataaaagagattgatgaaggattgttgtctgaacttgactcgattggagacttcaatgttaaggaagttgtgacagatactgaacctgggccatcttcgatagaaaatgctatgaaccaggctgttgtagagagcatggaaaagcaaccaaagtcaccacaatcagatagtaggtctggagaaatcatgtgtgcagttgaaaccaaaccatcggagtcttcagttgacgaaagttctattgatgaaacaaacgttataacaacatccgatgttttacctgtcgtagctcgatcactggaagaatttccgcaaccttctgaaccaaaagaggggatttcaatggagataatctctgaaagcgtgatgattcccacagaagctactggtcctggtaatgtaacagtaattgatgaagttgtgaccgaggaaacgaaagctgagaccaccgagaaagaagaagaaggagaagaagaggaggaaagtaaaccaaaagagataacaaaatctgatgttttacttgtcgaaactcgagcactggaagaatttcccaaaccttctgaactaaaaaaagggatggcaatggaagtaatctctgaaggagtggtaatccccacaaaagctgctggtcctagtaatgtaacactaagtgatgaggttgtgactgagaaagcaaaagctgagaccactgcaagcaacactgatgcaaatgtccagagtcctgagtccaaagaaactccagagaattcggtggaaactattgcagagcaaaaaggaaagtaggagaagaagacgaagtccaacccttcaagctcgagttcaagctcaagctctagttcgagtgactcagattgaaaattaaagggtaatacatcatctcaaactcaagtaaatatatctttgttaaagggtaatgataggcacttctgggttttgttttttttcatctgtgtcctctgttttaaaaggggcaagaagtagccgctaatcatatttttataccaagttttctccttcctttgtattggttttcttgtgtgtttgtgtttccttttctcttctttcttcagctttcatatttatcgatttgattgatttgtatctcttgaaaccagagaggttttctcagggttttggattgtgtctttaaatacttttctcgcatcttttttggggggtttgttatttgtattggacctgagaa

SEQ ID NO: 1303 - DNA, 3000 bp, Unknown
  misc_feature (1)..( 3000): cDNA_ID_2045798_gDNA_ID_1620383_Annot_ID_155377 3000 nt of promoter + ATG
tcgagtctcttgttttaggttttatccgattctgatttgtatacctgtcaacttcatttgttaatctgtgtgctgatttagcttcctaactctgttgatcgatttggggaattagctctttttcttttcgtggtgaatactaatgatgcaaagctttgaatctgatccatgtatttttttatatgctgcagaaacagatagctaatataattgagtttggatactcgcaagtgaaaatatgtcggtcacagcgggagtgagtgaatctgcaattgctgtaagggagaaactaaaaggtggtattggacagactaaagtgcgaaggtattggccaggaaaagctccggagtgggctgaggaagctgaagaagatgatgatgttaggatgcagaaggtttctgttttggatagagcttttccaaagaatgatgatttgggtgttgctaggaaggatgatccaaggctgcgccgtttagctaagactaaagttgaaaaccgtgacgaagttagagctgatcatcggcggataagacaggctgagattatttatacggaagaagaagaatcgaggaatcaagagaatagagacgaggacgatgatgaagatgccttggaagagagaagaagaagaattagagagaaaaatcttagaagagcgcaagaggaggctgctttacttcctttagaagaagaagatgagatacaagaggaagaagaggaggaggaggagtctgagtacgagactgattcggaagatgatatgcctggtattgccatgattaagcctgtttttgtaccgaaagctgagagagatacaattgcagagcgagagaggcttgaggctgaagaagaagctcttgaagaattagcaaagagaaaattggagcaaagaaaattagagacaaagcaaatagtggttgaggaagttaggaaagatgaagagatacggaagaacattctattggaggaagcaaatattggagatgtggaaactgatgatgaactcaatgaagctgaggagtatgaagtttggaagacaagagagattggtaggatcaagagagaaagagatgcaagggaagctatgctgagagagagggaagaaatagagaagttgaggaatatgacagagcaggagaggagagattgggagaggaagaatccgaaacctttgtcagctcaaccgaaaaagaaatggaactttatgcagaaatattaccacaagggtgccttcttccaggcagatcctgatgatgaggcaggttctgctggaaccgatggtatatttcagcgcgacttctctgctccaactggagaagataggttggacaaatcgattctccccaaagttatgcaagtcaagcactttggtcgtagtggaagaactaaatggactcaccttgtcaatgaggacacaacagattggagtaacccgtaagttttctgatttcagcgtttcttttcttgcgttttgttaggcacagactcgtttaggtctctgaaatatgattaatagcttatgagtagaaacattaagatgagaactgaaataaatcagtgcatgcaaatgtgaacccgggtagtgttgggagattcttgcatctgtttttctcgtttcatgagagctgcagattttgatatttttacttaacataaaatgaatgattgtgcaggtggacttccaatgatcctctacgtgaaaaatacaacaagaaaatggcaggcatggatgctcctatcgcaaaaccaaaagggagcaagaagatgaaagattgggagtcttaaaccgcaccaacatttagtttgctttttaaaaaaaatccaaaacgatacagaagtgttatgtggtagtaaaaaacatcgtaacatcttactcagttatgtcttgagtcctctaaatcgtagtaattaaaaatattgctttgtggaagacatctagtcttttgtatcgggatcaattatgcatcaatcaaagctgtctgcttgtattacgaaagcatagttagttacatatttccatggcaggaggtggttgatgggattttttttggcagaactgatttgagtttcaatagacaattctatggctagaatcgcttattatataacattctgaatacagtgatgcttgccaatctagattagtatttgtaagaatggaatctatattttataagactgcaaaagactgttaaactaacactatcttttacacttcgatatcattattaactggaatttaaatttaaattctggagaagtttgcaccaaaaaaaaaaaaaaaaatctggtgaagctaatttggttagataacaaatttcagaaaatacaaacaaaagtaaaagtggcaataatatgcaaaattagaatgaatttaaataattctgccgaaagtaaaatggtacaacagatacgaaagctgtaaagaagccgacaacaacatacacattagcccactctgcttcttcttcttcttcgctcgccatctttttttttgattagtcaaccattttcttctctctccaatttcaacctctgtaaggtacgtctccgactttccatggcttccccacgtctcgtcgtcccctctcttaattttgcgtttcatttcgttttggttgatcttttttttgaatttgattttatatctccgtgatctgattgctcctacctggttagtgacttcacaaaacatagatttttgtttattgttttggtttcattcgatttctggatttgatccttgatctgatttcaaaattattcactttctggcctcgttgagccttagatccaattctttctattatatcggagacaacatttaatccttgatatcttaatattgtgttgcgatcttaagtttttgattttgaattgaattagactcatcttgttgtttttctcaaatcttaaatacgataaaaactaacttcatcatttgattctgatttttcgtaattcttaatacagagacgacctggaaaaatataaaaagag

SEQ ID NO: 1304 - DNA, 3000 bp, Unknown
  misc_feature (1)..( 3000): cDNA_ID_2133483_gDNA_ID_1620384_Annot_ID_155396 3000 nt of promoter + ATG
tcttatagaacattatatttagtaaagaataagatttcattactcaatgcactttattggccgtaacaattttagccaaaaatttgtgtatatggaaaaaaatcatatgataatattaatggatagtccatttatatccttgtaacatttcaagttcgttgactgtgagtcctcgacttgcttttaaatagattaactaaatgccacaataacataaaaaccattatcttagagaaaagtttaaaagaaaacgtgaaagtatggagaggataccttcacttgcatcccttgttagcttgcttatcatatttgccacaggtattataattttttgtacacctttcaattttcatgttaaatatatttttttaaaaggttattttcttctattatgtgaacaaaaactaaacaaaaaatctcaaagtctaaccttagtttttataatttagacgtccacatagaagattaatgttatgagaattaagaaatacatattacagatatatatattttttttcttaagtcttcttgtagctattttcttgaattccttgtacttaatttctatagagtgaatatattcttatatatctgttaagtttaataaagtatatatacaatgctgtagttgttaatcagacaagagcaagtatctgtaacgacagactaggcctttgcgatggttgcgatcaaagatgtaaggccaaacacgggccatcgtgcgaaagtaaatgtgacgggccggttggaatgttgctgtgcacgtgcacttacgagtgtggtccaacaaagctttgcaatggtgggcttggcaattgcggtgaaagttgtaatgaacaatgttgtgataggaattgtgcacaaagatacaatggtggacatggatattgtaacacccttgatgattttagtttgtgcttatgcaagtacccttgctaaaacaagttgacagaatttggaaaccaattagctttctttgtaactgtaactgcgataatatggtaataaatttccttttgataaaaacattacgtttatttgcatgtaaggtaagtgagataagatagagacattcatgacttgataatatttttaattttttttacaatctatattcttgatttatgcagttggtgaataattcttcggtgaaccgtgcctacggttttagaggcctacgacaatatttaagaatgtgaaattttagattatcaaacaaagagtaaaatgtacataaacttaaaatctgaaaaacaaatctttaaaaagcattaaaaatagaaaagcttctaataaatgagttaagtatcagtattggtatgaataaaacctttggaatattgatcacaagaaaaaataattgagtagttagaaagataatttctatcaaatgtggcttatgaatgaattatatttagtgtagcctaaggcatttgccttttttctataaggggaggctcggctatgcgcgggcggtgattaaggcgtcgggaatttagaactccggagggaagccccaataaaagtagctgaaatcttggactgtcattgtcatgagaattttccggaattgttagaaaattaaggaggggatgaacaaaaaatggaatagtataagagaatttaattcatgtaatatcaaatgttcggtaagtttggtatatgtatttgattttcagagtttatgtaaattttatagaaattattttcggagtaatgtcgattcattttccaatgatcttatcacttgtctcttcatacaagccaagatgagtcgacaacttggttttatccttctttcttttctagttttcttctatgtaaacgaaaacaaatttcacatgtaacgattttttctaatattaagaaataaatacgtttagaacgtctaaaatatttatacaccaaacattaaagatcaaaactattaaagaaaaactgttagaaacaacacaattccaaaagatttagatcaacatctttattctcatttttatcagcttcatcatgcctccaaatctgattagtccagaaacaggttatcaaaattaagttttctaagattagttctcaaaaaattatggttttttgtgtttacaaaaatttgtgttttatggacaatagatttcggaaattcgcaaacctagattttcacaatttatctatattattatcatagctaaaaagaagctccatgaatgtgtttacgcaaaatcaaaataatatcttataagagctatacacctcattatgaattttcaattttgtttaaccttactgtgtctgtacttattgagagtctttcttaaactataagtttaagagcatcaaagtttaaaccagaatatttctatcaacgtattgggagaaggagacattcgactaaagaatgatctaaaacaaaacaattttttttttcttccgctgcaaaatagaaaatgttttagctaaaaatacacaatttaaaatttgaatataaattttacattctttcaaaaaaaatatatccactttcaaaagttcaatcaatacagaaatcattataaaatattaaatttatacattatttgcataaaaaaacttgtaaatacttaattgttatgcaacaaaaaatttgttcaaggagtagtaacacacacctaatcaataatagaatttagagatttgtctactttatgtaacaaagataggttttattacacctaatgatatttagcatttgtccttatttggacaagttgtaattttttaactgactttcttatttattgttgtttgacttttatgtgtcggtcattctttatcagtttttccaaaaacaatatgattaaaaattacaagtagatcgagagactgttgcagattgctcttaaatgacttatctcgataaaatcattttttcagatacaacaaacaaagagaaaaagccctttcaatttctttttacagattgctttctaaatagctttgagaaattgatcttctctttatcatactcaa

SEQ ID NO: 1305 - DNA, 3000 bp, Unknown
  misc_feature (1)..( 3000): cDNA_ID_1034141_gDNA_ID_1620385_Annot_ID_155404 3000 nt of promoter + ATG
caatcccatctccgtgcatagcaccaagcatcgccgcaagacggatattactaacaccacgcaaaacaatatcaagcgccatataaacctcagcatacttccgtccaagcttctccggagtaacttcaactccacgacaagcagtaacaataacactaacagcttgattcacaatatgaatacactcaaatacattgatcgaattatcatgatccgcgacagtaacaccaaggatatagatcgagttcactaatctataaactacacgatacttgctctcaacaccaacaataacctgtccattagaagcagcgagtggatcatcacctacaaactccgccgccgtggcatcgtcaggatccgcaacggaggaagaagaagaagaagaagaagaagcttgattctgtttctgattcgattgttgctgatgctgctgcttcgaggacgctaatgcttgacgcatttgacgaaaatacgagagagcgattaaggctcttgctggtggaaaccattctctagtttggagcaaaatgtcggatccatttgctggttgcagagctagggctaaacacgacatgatcccgattcgaaattgatctcgaagcttctactaatggtgactattcaatctcaatggttagattgaaacatctgatgaagaaatcgatcagatctgagaactgagaagaatcgtcggagaagaaaaggagaaagagaaatgagatcttcgttgtttctttcgaaaacgacgtcgtttgtttcattactcgtatcctacctgcatggacctaatgcgatggtttgaaaataagcccaatagtagacgtttattcttaacttattgggcctaatgtcaaggtaagaagcccaataatatgataaaacgatgtcgtttaacgcgattaggtctttttaaattttgtagcgcttataacttttgcgatttttttttaattggtagcttttggcggtgaaatgcaaaatgggaaaattaagccggagaatctcctccgacgatcgccgacgaatcgtaaactaaccacaggctgtgaaatcctcgacggatgtcttcgcggcggaatttcctgcgattctttaaccgaaatcgttgcggagagtggctgcggaaagacacagctctgccttcagctttcgctctgtacccaacttccgatttcacacggcggactcaacggttcttctctttatctccattcagagttcccatttccgtttcgtcgtctccatcagctctcgcacacgtttcatcaatcaaaccctagtatttacgcgaattacaatgataatccttgtgatcatgtgtttgtacaaaatgtccattctgtagaccacctgttcgacataatgcctaggatagatgggtttgttgggaattcgaaaactaggtttccgttgaagttgattgtgcttgattctgtagcggcattgtttagatcggagtttgataatactccgtctgatcttaagaagagatcttctttgtttttcaagatatctgggaaattgaagcagttggctagcaagtttgatttggctattgtgattacgaatcaggttacggatttggttgaaacttctgatgggttaagtgggctgaggattgggaatttgaggtatttgtattcgtctggaagacgagttgttccttctttaggcttggcttgggctaattgtgtgaattccagattttttatttcacgaagtgatggtagtattgttaaagatagaagtgaaaaggacgagaattgttcaagttctgtgtccagaagtgctaagagacggcttgacatagtgttttcaccttatttgcctgggagttcttgcgagttcatgatcacacgagaggggatttgtgcggttcaagcgtaggtgaactcgggtgctatgtaggatagtttttgttcgaagcatcaccggattttttggagtatttgttcattagccattatttatgtacattgcagaaggatccggagatgggttgcagcaaagccaggtttattttttcggattcctcctcttggttagatgtgatatgtgcttgtttttagtttataagcattctatgttcaattattcataataaagctttttaaaagattcctgttagctcctaagtctactgcaagcttctcactttgttctctgattctcttttctttgcatcattgaatttgcacgaagtcgaaaatttcccacttggttgctatcttcaaatcgtttcatttgttgagtaaattgctgatgtgatctttatatctggccgtaatatctttatgaataggtagtgttgatcatcctggtggatatggtttttgtatttattttcacttgaactctgtagctaatttctcgattctaaccagaaaatgactgaaaccacaaaatatgatgatgcatgccttcataagtgccataagtaattaatctagttaacatacttcattgtcctattggtaagcaaatggagttaaaacagattacttgtagctaaaagatctttaacacttcgattgttttctatttttccgtggttattcagtggcagaggaatcaactgcagttcgagaggatcaattcagcctctgatgtatacaagaatgagagattccgcctaaggctgttgctaaaaacaaccattgaatcatctgaaggacacgacggagctctacaagaggaaaaattttttggccgttgttggtctttggattaacaaaagctctgtatacgaatcttcacttttattttgtatagaagaagactaaacatatttagttccaatgtataagtttcaacatctcttattagcactcttcactatgagcaaaacttctactctctatgtgaaccggcccatttacaagatacggcccatgaaccttttgttatacgtcatagtgacatcactctccagcgtaaaaactaacttccgactgaaactggattcggttcgtcgttatcggtatcgaatcaacaatg

SEQ ID NO: 1306 - DNA, 3000 bp, Unknown
  misc_feature (1)..( 3000): cDNA_ID_2133826_gDNA_ID_1620385_Annot_ID_155421 3000 nt of promoter + ATG
acatttgttttccactttgctgcttactaatatgcaatgcaagttcctagctgatcatcatttttcatatgcaagagtatcttcatctatctaattttgtcatttgcggtaaaggttctaatgcgaaaatttgatgtgtgttatatcttaggtcatagctcttcgggggtcttaccatggagatactttaggagcaatggaagcacaagcaccatcaccttatacaggctttctccagcagccgtggtagggaaccttttcatttgtttgccatttctggagaattttgtttccaacattcatcttctgatttaaccattcttggatcatttgcatctcctgcactaattcatcatttgcatagcaacaaacccttagtgttgcttagatgggttgtcatcccttagggataaatcagccctttttcacatcttcccaaattgtcttgagcaagcattctttatcatgttattcagcttgtcctttagttaggctcaaatctatttttggattgtaggtatactggaagaggcttgtttctggatcctcctactgtctttctctccaatggatcctggaatatctccctccctgaaagtttttctgaaatagccccagaatatggaagtaaatagcatcctttcccatctctctgatatcctccggtacatttcctttagttgcatgatttagtattcccaaactcttacagccttcaccagccgtgatgagatttttgacaagagtagagacgcatcaactcttgcaagaatatattcggcctatttatcgaagcatttacaagagcattctggagttaggcaatctgcccatgttggagcactgataatagaaccaggtacactcgccagtatgacttcacatagtttacgtatgtaacttaactatattcagtaagtttagcatccttggtttatctagctagattgctatatgcaaactactcttttattaagttggcggttttatctgcagtaattcatggtgctgggggaatgcatatggttgatccgcttttccaacgagttttggtgaatgagtgccggaatagaaaaattccagtcattttcgatgaagtgttcacaggattctggcgtcttggagtagaggtagtaattaatgtaatcttttgatatatttctgttactacattctatttacgttctgctaacaaattaccgtaattttaccaagactactactgaacttctcggttgcaaaccggacatagcgtgctttgccaaattgttgactggtggaatggttcctttggctgtcactcttgccacagatgctgtattcgattcattttctggagattctaaggtaaagtgaaagtagtatcaaaaccatattcaagcatttctgacaccgcttgaagccatctaattttccttacttggttgtagcttaaagccttgcttcatggtcactcatactcagctcatgctatgggttgcgcaacagccgccaaagccatccaatggttcaaagatccagagactaaccacaacatcacttcacaaggaaaaactttaagagaggtattagtacaactaaacatgctcttcatctttatagtatacgcgagtccagattcgtagaccagtatgttgcaatcaataacaaaatcagccattactcttggtatcaattaatcctttaaaatttgcagctgtgggacgaagaactggtgcaacaaatatcatctcactctgcggttcaaagggtggttgtaataggaacccttttcgctctagaactaaaagcagatgcttccaattcagggtaatcttctcaagtaacataatatttgttctcttgaattgtcaccattagacaaaatgtcttgaacacaaactttggtacaatttctctgcgtgtttcaggtatgcttcgttgtatgcaaagtctcttctaataatgcttcgggaagacggtatctttacccggcctcttggaaacgttatctatctcatgtgtggcccttgcacctcgccggaaatttgccgccggttgctcacgaagctctacaaaaggctcggagaattcaatagaacatgaaacccaaaactctctctccagcttattttgttgtcatctctgtatctgttgcatattttaatgacatatggaatctgaattttctattggtaggtagatctatggaattcttttcttttctttttttcccttcacgagatctatcggtttatggaaattagtataaagatatcggacaccaaatttaatgcaagatcagtttcatactaatagacaaaaaagaaaaatattctgtaataattcttttgatgaagtaaaaagttgccttaaagtgtaaagatgagtcctacatggatctacggctgagattcatcggacaaagactaatgaccactgtttctcttagtgggccctagcagacgttagtttttaactaaaaacgacaatcatagcagaccacgataaaataaaaacacgtaaaccttaacacaggtgattaaatcccactacaagcactggagaagctcaatgagtcgccacagttgaccgattaacccaaaactgcgacgactcaaaacaaagagatactatactatcatcaaaactccaattctctattcactactaatcattgttccaattcaacgccggtggcttttaatcggcgagacactctctgatttctcggtctccgattaactggtactttcctcttacttatgtctctctgtcgttgatttggttcttcaattggtcaccgagaagtcttctgtagtctccgacgtgggttttggttttcagattcaatttcttgatttagggtttttgttttcaagtaaagcgagtcattctcgagtttgtttttgtgggttttgattttatagacttttgtgctgtttaagattgaattgtgtagcgtttgtgttttgtagatctaggttttttttggggaggagaatgcaaaggtagatgatg

SEQ ID NO: 1307 - DNA, 3000 bp, Unknown
  misc_feature (1)..( 3000): cDNA_ID_2133845_gDNA_ID_1620385_Annot_ID_155425 3000 nt of promoter + ATG
caacgacaagatcaagaaaagacaaagatttgtaagaaaatgggaagagctccatgctgcgacaaggcaaacgtgaagaaaggaccatggtcaccggaagaagatgtgaagctcaaggattacatcgacaaatatggcactggtggcaactggatcgcactgcctcagaaaattggtaagaattctgaaatgtttaaattctaatcccaaaagtaatcgcttataattttcaatttcgattgattagatcaagttttgttctgactttgagatttgtgtaaattatagggctgaagagatgtggtaagagttgcagactgagatggcttaattacttaagaccaaacatcaaacatggtggtttttctgaggaagaagatagaatcatcttgagtctctacattagcattggaagccggtcggtgatctatctctcttgatttctattaataataagttaattaacacctcttcattaaatatataaatttttttgttatgatttagaggtaatttctgttgaaatttcgacttgagattcttgtctttttaccttttgtctatgaatcttatgctgaaacacatgcaagcccatgtttcttcaagctatggtatctcacatagaatttagggtttatattgtctctttcttcttgttttggtgtctttgtaagaacctttatacatttatatcttttaatcttgaacttggttcgtgattctaaatacatagttttctaaaaaaaactttctattagttttaaccttaatgtgatatatttatgcaggtggtccataattgcagctcagcttcctggaaggactgacaatgatatcaagaattattggaacacaaaactgaagaagaaacttctaggaagacagaaacaaatgaatcgtcaagactccataaccgattctactgagaacaacctcagcaacaataacaacaataagagtcctcagaatctgagcaattcggcactggagaggctccagcttcacatgcagcttcagaatctacagagccctttctctagtttctacaacaaccctatcttgtggcccaagcttcatccattgctccagagcactacaactaatcaaaaccctaagcttgcatctcaagaaagcttccaccctttaggagttaacgttgatcatcagcacaacaataccaagctagctcagataaacaatggagcctcttctctctattcggagaacgtagagcaatcccaaaaccctgctcatgaatttcaacctaatttcggtttttcacaggaccttcgattagataatcataacatggactttatgaacagaggggtttctaaagaactgtttcaagtgggcaacgagtttgagctaacgaacggttcgagttggtggtcagaggaagtggaactagagaggaaaacgacgtcgtcgagttcttgggggtcagcttctgtgcttgatcagacaactgagggaatggttatgcttcaagattacgctcagatgagctaccacagtgtttaataagttatatcatgcatatatataaatgcgtaactatagggatggataatggattattgatggaatatgtattttattacggtcataagcttatagcatgttgatggtgaaaggggctttttcataatttgttttaaaatgtaacgagttgtggataataatgtaaatcgttaattctacttggttttatttcattttggaaaaaataggagacgtaaataaactttgatcgatttttatggtgaatatccacactgtacatacagagtttttattgatcagaattcttttctttaacaaaagaaaacaaaacgttttgatacattttgcaatttagtagctgttactggttacggacttacggtatcattgcccatttcaatattccgaatttccaaagtgtgagttgttaagaaaatcaagatttttatgcttcggtctaaattttgtttccagaaaaaacattgattagttactaaaattgagtttgacctagaaaatggggtctgttcgttttctatttctaaaatcatgggccttcctttttccatttctataggcccatctaaagatgcaactcgtggttgatactagatagtgacttggtatgacaaggaagaaaagtaagctaaaatttgattaatctctattatctatgtcctcaactagaaagtaaaatacttgtgtacatttgaccaaagcgtatagttttagcatataataaaaagccagaggagtattaattaatggtaatcatagattttgtaaattaaagcattagatagaaagtcctttcagggaacattttttggccggctggatttttatattcagtaatctcgaatcaaatatccgataattgctaattaatttttatccctgtaaaactaataaaattgaccaattctatccgcaataaatcaattcatggacgatcaccttttccttgtgccacttgatattaagaaaccaattaagatatcattcaacgccattgatctataaattttcatttcctcttatgaatattaattttattcattacaacttcttgtatgcatgagatgacaaacactttttatttctcaaaaataaacttctcagttatgttttgcgaggaacaaaacaaaattctgtttttaaagtgaatcggatagtttttctttataatcatattgaataattaggataaaatgttcatatagctaagcactcaatcaactatatgaatgatatttaagaagttaatatacacacatagagacaaaaatcatattaaaacccctaattgacaattatcaattaacctaccgtttaaccaaagggaaacataaaagagtggtaaccataatcgaacatggaagccacattgtagttgacatatcctaaaggtccaaattcattaattaattcatgaattcatcacttataaataatcactcaccaaagtcatttcccttcaccacccacaaagcc

SEQ ID NO: 1308 - DNA, 3000 bp, Unknown
  misc_feature (1)..( 3000): cDNA_ID_3061649_gDNA_ID_1620385_Annot_ID_155429 3000 nt of promoter + ATG
ttataccaaaacaaaaagttatcactggactctaatttatcggcccaatatatcggtccttttatttgagttgggctagttacaatatatcggtccttatcacgaagtgcccatccaatacctgcaggttggtttggagatagccatgaaccatcaacgaagcaacaatacgaattagcttgcttaagaattaatttgagctattccattttctttcagactttgcactttctttgttgcttcctgtttatgctttacgtctaatccatccatattcacagcttcgaaccacaatttacagtcaaagcatggctttacttattacctccggtattgcccacttcctattattaaataaaagatcatttctcattttccatatcctcctccagcctatagaagggtttaactttaaatgataggatccctttaaatgatttaaatatttaattgtctttggaaaaaaagagagtcaaaattgcctctgcaacaactaaaaaaaaaactaaaaagggaaacaaatcctcatcgaatacagtgaatatggaaaatggggaatcaatatcaaacaataccattcttggaataattctcggattcatttttgaagaaaaaacaagtaatggcaaattttcccaagttgtgtccccctttttataagaaaagaagactcagcaattgaggtttttagagtgagcaagaaccttgtgtagcaaaaaccttaaatccgtcatctatgggaagtataaactctgtggctgaagctaaaacagaggaagatccttcgacaaatcagggagatggggacgacgaatcacctagaaccctaattgaagatcagagagatgtggaggaatcaaaaaccctaagtgaagatcaagtagatgtgaaggaatccaaaaccctaattgaagatcaaggagatgaggaagaatctaaaaccctagatgaagatttggatgaaacagaggaagagagtggagagtgccctttatgccagttcataaagggaggtgagtgtaaagaagcattcacagaattggagaattgttgcgacgaagcaaagaagaacaatgaagatcacgtaagtaaatgtaaggaggcaagactcatctttaagacttgcatgtatgataaccctgtttactatgagccccttcttgctggtgaggctagagcgatggccaagatgttgagcgagttgttgaacgcggaaaaggaagctattatggctggtgagcctgcagtcattgcgagggcgtttagcgggttgcaagaagagaatgctgagccaattctgcctgctgaagctgcagcgatcgggaaggcgtttcgcgagttggaagctggaaagaagaaggagaaggaagcagagggatccgagggtaatgagagtgatcatcagaatcagaattaggtaaagctttttttatgagcatattgagacttacattgatctgaatgaaaattcaaatttcgttactcttaattttgtttaggtgtgtcttcttatatacaccattggttatgtaatttggatgcatctataaaatactgtcgtaatcaccttcttctacaaaaaactaagaccattttaatatacattttgattttttttaagataagactttgtgcaagagtttttatccaatgatagaatcttaagtgagacttgagtagtacttatgctcaacttttgaaacaagagatagaagtaaaagaaagaagcacattcctttggcacataaaagtcatcagcagtggtcttcaggatcttccgcaatacgcttcaacatgaatagcagccatacggtccatgaagtgatcagtggtaatcactgcaagatgatcttcaacaaaatcttcaatcttcttccagtcacgatcaaacctaagaaacagagagcagtagtatcatcagcacaatcaggtcctgctaaaatcaatataatacttttaaaaaaccacacaagtataaaattattacagttgaagtgcttcaagaagcagatctatttagctaatcaaaaaagatcaattaactcaaggaagcagatcttttttagcttaagttactactgacctaacactatcataaacttccctctcgttcacttatgtatctgccttgacatatcagtttatatccctaaaagccagcaataatattgaaggatctaacactaaggaaaactaaaacatgcattgctcgccaatccaaacagaaactcaccaaatcgtaagtttcgatatcatccaaaccaaacaaattgaatgcctggggagagagagtcttactgaggaaaaatgcttcaattagcccaaatattaaagtcccaatataaggagactttttgttaaatttttagcccgattaaacataacattttttaatcagcatgcaatattttcatttaatgtgctcggttctgtcacggacactgacatgtaatttttcattttcacgggtgagataattttcagacaatattagaatttttttcttccctttgtagttattcgaaattatgttattgttgggaagtaatgaaaaaaaactcaacaaaattcgatttaatacctatccataatattattgatcctaaaaatagaaaaggataattttgctgagtcagaaacgtgatattcgcgacgttgtttccggataaagagtaaacgtacgactgctttaactcacctataaaatcacgaccgtcgatttcatttatgtcaaggggcaaaactgaaaatcacacaaaaacaaacaaaactttgcttacgtcacatcattatctgtgactaattcttaatcatcatcatcatcatcacttacttaaatctaaaaaaatctctgtttgtatatatattatctttgcgatttttatccaaatcttccaaagcttagttttttttttttttcaatttctctcttgcgttttcgattttattacaagaactttgttttgggcttcatccatcgttcaaggttcgttgaaaact

SEQ ID NO: 1309 - DNA, 3000 bp, Unknown
  misc_feature (1)..( 3000): cDNA_ID_3061657_gDNA_ID_1620385_Annot_ID_155424 3000 nt of promoter + ATG
ataatgaaacattggtttgtcttattacagtatatacaccccttttatttaattacctttaatctaacatatctctcaaatcttatctggcttcacattttgaatttgagatttagctggatccagtatttgaacgttttcttcatcaacataaatttttgctcaaatcagtattttcttttcaaatcgatatataaaagctagtaatgatttcaataactagtaagaatataggttcatgttcagtaaaaaacatatataactcacatgatgttaattccagacttccagtattaagctgttagaaattatttgttgaaaatcttggggatatatgatatataaagaattaaagattagctaggaaatgaatcaagaaattgattatttaattcaatttaaagaagcaatacacacctatctaagcttatcctcttatgacaattaaaaatatcacccacactaatcagctcgattataatgtcttaaagattgggttttgtcaaatgcatcgattctagggttttgaaaaaagacaacaagaaacatttgcgttgcttttatttaaagctctgaatttcctggtgtctttaattttttattatattatacagaatatattttattatattgtagggttattaaattatacagaatattagttgctcctttatgaattttgatggtttcctcttgttattttgttgcctagttgggttccttatctcacttgattatttaagtaactaattaatcattttaattaaaaaatatattcttttgtaaatatatgctttaatttttcaaaagatatatttgtgataattcaaggtcaattagtgtaagttgtctggttgttcagatcaattattgtattcaagcttctcctgattatgataaatatagtcttaccaccaatcaatttaatttccacaattagatgtccttggccgcattaataaatcctcgaaactgatatttgcttaagataagaaaagtaaaataaagtattcgtatatataaggttttagcgagctaaatttaatttgatataccgaatcggcaaatcccataaacaacctccgatcaaataaatccttatcaccgttacttgttattgatacaaacttacttacttgatttgacaaaaaaaaaaaaacttacttactttaaaacgtaactcttgcatggttggaaaagccatacaatctttttaagtaatgattgttgaccagattcatgtaaagcaatttgttatataaattatgaccattttaacgacagtatatatatttaacaatgtaattaataaatctacggttaattttgcaaaaagaggcaaaataatttaattagatgaatgacaatttggtagataagaaacttaatgtattatttagttgatagtatttttgagttttgaaactattccatctaatattttggtagatggctatagtaataaaataagatgcaaatcttagttaagaaaatacaaatgtaaacttacatggcgataacacaaatccaattaaaattttgaatttccacagagaaatcatataagttaccataaaaatgataaccctcaaaaacttagatgattgataaagttgctaaagacgaattcacgatcattattatagaggattacagttctaaatatttacagatttattatgtttatatataagtcatgcatctattcctattcaattctattcgaagttgaaaatgcacccatttcgcgtagactatagaatccatatgattaaactatacctagctaaatgcatatatttatggaaaaagagactataagtcaaagaacaagagtttctagaacaaaaatgggagaaaaattaaaaacggcctagacatggaaattgatgcttactttaagatgaagtcaatcttattttgcaaggagtcgtaaccgtatatgtatggtcttctcgatatcgacgttgctccttacgacgcacgcattttcatacataccttcggttattttctttcttctaactgcactttctatagttgaggactgagtatgtttgaacaaagttgttcttttatggttctcgactaattttatgatgggcatatatgtttcgattggtataaatgtacaaggaaatgtcggaattttaataactaaaaaaaactgtgtaacaagagaatccacacatacacattttgtcgtcatcgccgagatttagtatactggccggctcagtgtttatcatttatttttttgttccagtgttcatcatcttgttaacggaaagtaaaaatatttataatttgaagtttatttctttggtcattatacattatgcaagttctgaaaactcacttggtttcttacccaaaatttctatcataagaaagtcagaattttgtatccctttttcattagaaattgaccactttataaacttcagcaaattatccaaattcaagaagtaaattaaaatagctaatgatatttgattggctgtagagggaacatttcaacccaagtcacgacaaatcaagatgatggtttgtttcctgccctttaatttgacctattaattaaaatatataaaagtgataattggacaaatttttcacgcaagtgtttctttacgttaatgattattaaaactgagacaacttttaacctttttcaaaacaaatgatataatttaattagaggtttagaaaactaatccaaaatgcagaaaaagcaaaaaccctagttagaaaaatatacaattagggttgaagttgaattatgagaaagacattaaaacgcggagaggacttcatatagtattttttttaatatttacttttcagttataataatcatcaactaatatcctctttttctcgtctttatatatcatctcatccaagcattagatcatttcatcatcacaccaaacataattaacacttggaagagaacaacaacgacaagatcaagaaaagacaaagatttgtaagaaa

SEQ ID NO: 1310 - DNA, 3000 bp, Unknown
  misc_feature (1)..( 3000): cDNA_ID_2133797_gDNA_ID_1620385_Annot_ID_155414 3000 nt of promoter + ATG
tacatatgtggttgacatgtccgtcttatattttaaaaacatgtcggtccatttcactaaaataaaaaaaaacgaatatttcgacttactaaccttttgtggtctgcttcggttttattacttgtcaaataaaattctagccgattggttaaagaaccttattggtcaaacagaaccttattatattgatcaaatttaaaatttattatataaatgaaacaaatttgtaaatctaaatgatataaataactttaaactatacgcgtttgtttatatgtacgttgggcgactacgtacgtaagctggcataattcattcatacaattacaaaataaaaaaaaaacatcgttagtgttagactaccacgtaggtaatgggactccacgaacctctctaatgcaattttttcaaaaaatctccctatataaaacaccaatcctcgatcatattcaaaccatctgaaaacaattacttttaagttttaaccaacaacaaaaatggcggcttttacaaccaaacagtctctgttgttgttgtctcttctgctcttgatcagcctctccgcaggaagtttctacgacaatttcgatatcacttggggaaatggtcgtgccaatatagtagagagtggacagcttttgacttgcactctcgacaaaatctccggttcaggttttcaatcaaagaaggagtatttgttcggaaagatcgatatgaagatgaaactagtcgccggaaactcagcaggaaccgtcactgcttactacgtacgtaaaaatttatctatctccactacttcatttttttgtggcattgattgtttgaatctgatattaagaatgttttcacagctttcatctaaaggtgagacatgggatgaaatcgacttcgagttcttgggtaatgttaccggacagccttatgtacttcatacaaatgtgttcaccggaggcaaaggtaaccgtgaaatgcagttctatctctggtttgatcccactgctgatttccacacctacaccgtcctgtggaatcctctcaacatcatgtaagtatttgatcagtccaatacactattgaaaacatcattaagcgctaattcttactttattgttgttctcttattttactttgtgctttgtttttttgttggatctcaaaagctttctcgtggatggaatcccaatccgagtgttcaagaacaacgaggctaatggcgtggcctacccgaagagccagccaatgaagatttattcaagtctttgggaagctgatgattgggctacacaaggcgggaaagtcaagacagattggaccaatgctccattcagcgcttcctacaaaagtttcaacgatgtggactgctgcagccggacctcgttgttgaattgggtaacatgtaatgcgaatagcaactcgtggatgtggactacccttaactcaaatcagtatggacagatgaagtgggtgcaagatgattatatgatctataactattgtacggattttaagaggttccctcaaggtttgcctacggaatgcaatctcaactgatcatgttaccgagaaaactgaagcacttgacacaattttgtttctttctttgttttccttttcacctcaatatttgttgattcatttcccatattggttagctgattatttgttttgtaatctttataatttggttacgattgattcatagcaaaaactgttggaataaaatgtgatctgaaccactttaaataaacatgagaacagagttttttcgccataacacgaaagaaagaaaaacagagttctaggttccgaaaacagagtaaaaaacagagttggttggtttcgcagaaaaagttaaggtgttcatggccagttgctgtgtttgaattctccgccgttttcttgggagaaaagataatggaattaagcttaaataaatagcaattgaaaccgttgaccaaatctctctggaggaaggtgacagtctgacagataccgttatgatgtgtatggatgaatgcaaaataacaacgaaacgcaagaagacagaaacagtagagatagatgtgaatgcatgcatgggaatggacaagatgggaagaacaaagaagcttgtgctttcctgttgtggttgaaagtttttgttgtagatttcggtttttctttagatgttgcaaatttgaaaatggtataaatacttaacaatgatacccaaaaaaacgaaaaaccaaaaaaaaacatggaaggtaggtatctctgatatatgtttagaccctaatttgaagctgaagaaatgtatgaatggctaactctgacccaaatttattcagtaataaacttttgactgttttgactatgattgactgagatttttatccacctgaaatgaatattcatgtttttattttaattttgttatgcaaatgatgggagagattcgaagaataattcatgtagttgccttataaattatacgtgacaattcttatatgtatgtggctaacatgtccgccctcaatttcagaaacatgtcggtccattttaccaaaacctaaacaaatatttcaagtttttttgtttgcaattgtacaagttaacgaaaaatgctacttgatcgcttttataagcatttttaactcaaaattataatctgaaacaatcttataaattgagccaaattgcatgaccaaataaagaagacaaaattttgctgaaacgattaaaagtttctaaaacattacctacatgtataatttatatgtgaatttaacgactttatacataatttatatgtaagctgacataattcatttgtttataataactaaaatcgcctagtgtaacacgaccatgtcgatgatggaactccacgaacctctctaatgcactcactattaaaaaatatctctctctatataaacaccaaactccagtcatttcaaacatcagaaaacaattagacaacaacaacaacaacgacaacagcaacaacagcaaaaaatg

SEQ ID NO: 1311 - DNA, 3000 bp, Unknown
  misc_feature (1)..( 3000): cDNA_ID_2133809_gDNA_ID_1620385_Annot_ID_155417 3000 nt of promoter + ATG
ctagtaacaagttttgtggctgcaaaaagcaaaagcaaaatcagattagccacaaaattagttagaaaaacagaggaaacagagttttgcaaaagttgttgtcttctattaccttaagatctctatgataaactcctctgttatgacaataatcaacagcatcaatcaattgttggaaaagttttctagcatctgattctttcattttctgtcttccaagtctgtctgaaagctgaccacctgaaacgtattccataactatacagatctttgtcttggttccaatcacctgtgaaaaatgtaaaatttcactcagaataaaaaaaacagtaacttgatgagacagagagacatcagacatcagaggcaaaaccctttaaatgatttaattgtctttggaaaaaaaaaagagagtcaaatctgcaacaagtaaaaaaaaaactaaaaagggaaaaaaaatcctcatcaaatacagtgaagatggaaaatggggaatcaagactctcaagagtctttttggaattaatttttggaattttttttttccttcgccctagagccgccgtcgaccaccatcccggatagcacaattggaggatgatttggccacagttataaaatccgtactctttagacgctggagcttcttcttcattctcttttgcgattgggtatgagagttttagcgtttattgtaagattaggtgaatgaaaagatgattggagatacgagagctatgattgaatgatgtgggtgtagcgatatgtgatgattggagatcgatctaggaggggaagagtttaaaagcctgaaattttggaattggaggctcttgttcatgggctatcatctctctgggacgtcgtcgacggcgaggacaaagaccaaaaaaaaaaaaattaaaagaaaaacttgtcaggtgtcgaaccctggtgtcatgtgtagaagtggaaatagttaacctctggaccacatatatatcattgtataaaccgtaaaacatctaatatatattcaaatggttaaatttaacgacgttaaatggctacgttacttcccttagcgactattaacgtgagtttgattctatcaataatttatatattaagtattttattatttgagatatttttttccaacaaaaaaatattgggtattaaacgtccaaattatatttattttgagtctcttttaggatttttcccttaaagtttgtgagacatcaaaaaaaccaatgtcattgtcttgtctcaaacattactaatatgagttcttaccagtgttttcacgcctgacctagacttactggttaacccacaatccgaactttttttcggtttgggtttagtactagaaaccggtaacttcaaactgggaaaattcgtcattaatctgctaaccggttgaactggtcagatataggttgtaaaaaaaatcattgagcaacttcatcgccggagatgacgatattctaacatacaaactgcgaaattttaacaatcgtaataaggccattcctataactctataagagaatcaagactaacctttaagagcaagtcaactagacgagacgaagcgccaatgaccaattttttttgtttttgaaacctttcacctaagcggacggaagtttcgtgggctttatttaaataggcccataacgatatattgttttacgtatagtctttaatatctcctgttaatctttcctcacccaaaacttaagaaatgtgtctctcatcatattaaaattgggattttcaccgcggtcatgaaattatttcgaaatccatatccgtaaatttcaattatttaaaagatagaggattataacccccgaaattagcaaatatattataatgatacaaaaagaaattcctttacatatcaaatccaaaacaacaaaacttttcgtaaagaaaaatatctacaaaaaaacatttaagagaattgaagtaaaagaaaatgaaatcaaatgctgaattctagactttgcgtaagagttgggactgctcatcacaggatctagccatttggacaaaagaagcttcctgaccacgaccgtaaccaaccaaccaagttgaatgtattagctgtctccactacgacaattaaacatttgagtcagtcaatttcatcattttaccaactactaccatatccactctttaacgtggcatcttccttcttatccccgtttcaaattttgttttcatcaaagcttttttataataaaacaaaatcataaaatacaatgttgatccttatcctattttctttagcaccttaaccaatctaaatttgttaagtgtcagtcaatcaaaaaaaaaaaaaaactcaaatatgagaccacaaaaattactcaaagttcaatttcattttttaaaaattactacctagtgaataataacactcaagagtaataacaaaagaactacaaaattggaaaaccactgaataatgtcagaaaatcgtataaatacttttagataaaaaaaatctcaaaagttttatcatattttaattaactttttaaaaaccaacactttccccctttttttggtttataacagaataatttggttctattagactaaaactctacctctgtcaaggtcggtccaagccggtggtaaagaatccaactctcaaatccaactttttctgaggaaaaaactcccaaatccaattaaatctgaaaccaaaaaaataaaagtaataattaattactaaaaaaaggtaacattactaaacaaaaaccgcgtgatttccaaagccaataaataaaacacaggcttttactacaagatggcccaatcaccagctgttgcctcaaagacgcggcttcttctttcgccatacgaaccttcctctatacgaaccgcctcttaaaaatcttcttcactcacttactatatatacattcctccataaaccctcaaaaaccacaaaccaatctaactcaatacaagaatatctacaatctctagaaaatg

SEQ ID NO: 1312 - DNA, 546 bp, Unknown
  misc_feature (1)..( 546): cDNA_ID_3061695_gDNA_ID_1620386_Annot_ID_155439 3000 nt of promoter + ATG
gatctcttaccaataaaagtttctgaatgggatttggtattgaactgtgtccttaaatccgggttttagttcaaccacgagtttaactacataaacgatttccggtcagcctggtcctgacgggccaccaattttcaaaacattgacgaaagcaagcccaataacatcaaatataattaacaaattttagtttgaatacggttactgttttggaaattgatacattccgatcttggactaatctataatccatgggctggctattttgcagtttcccgtaaataaaattatgaaaacatgattgatttctcgttggtagaccatgacatcacaggacacgtcaacattccaagtataaaggacaaaactgtccatttagattccaccacgtgtcccgataacgtttccgtctgtatctctctcttccgtcttctactcttcttcttcttcttcttcttccactcacaatctatcgagctaaaacactgaagcagacattagcgttgagaaaaaaaaaaaagtaagaacgagagagagaaagccatg

SEQ ID NO: 1313 - DNA, 3000 bp, Unknown
  misc_feature (1)..( 3000): cDNA_ID_2133710_gDNA_ID_1620386_Annot_ID_155445 3000 nt of promoter + ATG
gcctctcatctgctaaatcattcatatcaagtcttgtcaacttgttttttgaaccaacttgctcattaaagtaattcccacctaaacttctgtattaagcagacccttaaaaacagtgatgcaagatttaacatcactttcaccatttattacatggtaacaatgagacaaaggcatttacttttggaattgatgattattggaacaaatcttgcaatgatttgcatataacttgaataataccttttgatcaaatcttaacaatgaaatttggtctccaaaaagactaaaaactagcagtcaaaagtgttttgttgagatttatgcctataattagaatattatatgctagttggtatggttgagtgttacaagaatctacttgctacaaagtgacaatccaggagctgttcatagtacatagtaccaacattatacaagggactagttatggataagtcattgcttttgagacatagtaccaacatatgtaacatgggtcacaaaggactagttatggataagtaccaaaattttctccactatctatgttcatgaacatatgtagcatctgtgtatagatgcaaaatcaagagctcaaataaactacagagtatatacacacacaaaaaaacttatcaatgtgaattcttggaaatgaaggtaatgccaaatcattggagatgacgttaacaacatgacctcacttgggataataatcctgataatcatttgattgtagccacatagaaagcagcaaactaaatgacaattatgatttaagagcaaagatagtgacagtgtaaattaagtccactcttctttgaccttaaggtaataatatatatatggatgaggtgatactaatagagtgattacacatacaagtggtcttgcttcttctatggttttaaaactgcaaataaagatttgcttcgcaggagagatagcgccatcacctcttctaagaagttaactagtggtgacggtatctctcctacgtagcaatccttatatatgcatcttaatacggagagatcaaggtatttcagttgttcaataatcaccctctaacaaagatgcatcttaatattcataaactattctctttctacttacatagtaacaccataaaaacaatgaaactgctccgtagaggaccttggtttgagcctctagatcgtcttctcttacctaaaatgataatctgttccaagataggttcttgctatttgctcaaatatgttttggtcttttgaatgttagctcagcaaggagctcacatgattagcagcacatcctcagcctgaaagtttcaagaaaagctttatcaatttaagagttgtgtacgtttgcagaattctcacaagtttggtttgattctcacccacaagaaaaaaatgtcttttcttttactttcgatatgtttctttgcctttgacaagggacatataaaaatgttaagacgaaaaggttgacaaatctttgaaaactatccacatcatgaactcaagatatctcattccattagaagcaaaaaaaatatcaagtcaatgagaccagctcacgactactctagaatcttcattaagcagaacaaggaaaatctataggtctaattaaacctttttttaatatctcgggttaacaccaaatttggttcaaactcgacaagtcattgttcaaaacacagcatccaaaaagataaaaagccaaatcttatcaccagaagtccaccactaattggtatataatgtttttttttgtatgtagaaatagtgttgaagaaagagcttcatgctatttgatatctataatatctcatttcttgtaacaaatgaactccacacggaatgaagctttttacatatagaaagaacatataaatgtgtccaatatctaatttggtccacgtatcaatttgcaagatcacatgcttacgagacctcaaatatttggtggatatataagataatttcccacatgttttacgaaccatcccgtaatgagtatgaattatccggtctagcaatccattcgatagatttactagttgaaacttgaaagtagggttttgctcacttgtatcctttattcgtagtttaactataatgcacatatggaagaattgagccacaattctcaatgaatttagcgagggtgagaaatgtcaattcaatgtacattctatgtcaattcaatgaaaacaaatgaagaaaagagacatgaaatatgtttccaaattcttacttagaagaattagaatcaaataatacaatatctacatatgccatgagagacatatggaaaaccatgttttcggatgataaacttccaaattgatttgatatatactataaaccggcaaataaacaaattgaggttaaaatataacaaaccggtccggtctgatcgaacggctgatgtcataaaacgtggggaatattcgattaaaataacaaagactccgttacggtcgtaaataagtggtgtgagaaccgaaagtcaaaaacacgtcaatattggtgggggggacgaccgtgcacgtgaccacacaggaactaaacccggacgtattgcgcgaaaattaaaccggatttgataatcggcgactcgtccggcaacccttgttttgttttcgtctcggcggatcgatttttcttcgtctgggtttggttgtctttttattttcctcttccttggccaaagaaaatcttatcgtagctgtgaaaaccctagtttctaatcatctcaattctctcattaacctatcaatttcgatagggtttgatcaagtatccgatttcatggtttgtattttccgtttaatagtctttaaaggtcttgtcttttggaatttcaagggttttcgtttcagtaactccttcttttttttctgttaatttagatcggttgctgtatggagactaattgctggagtttaggttcgtgtgttttgaactgagcttttggttcttgtttgtgtctggtgttgaagac

SEQ ID NO: 1314 - DNA, 3000 bp, Unknown
  misc_feature (1)..( 3000): cDNA_ID_2133718_gDNA_ID_1620386_Annot_ID_155447 3000 nt of promoter + ATG
gggacttctcacaatataatcaaattagatgtcttttctaaaattgtacaaaatcgactttcttagtaaaatattattttagttaggaaattaagaaacatgaaaatgagatacgatccactctttctttttagtactaattaaaaaaagataatctttgactaaaagttatgatcagcagacagaagaatatggtaatcatatcattaagaataagagattacacgtttcgaattatggtgcaacatcagaataaacaagatatatatttctaatcagaagtactaaagaaaaaaagtgagaatattaagctagttttagaaggagtatgttgcatgaaaaatgtaagaaaaacaataaagaaggtgggggccaaagaggcagcaaatatcaagggggtctttgttagttgttgggactcagtcactaactcacaacttctgaagaagagactcattctttctccttctcccatcccatcatcctttttgttttcttcttttcttattcttttttttcttctccaatgaagttacgaaaggttattactcataatcaaatgtttttaaaagtagataattaagtaagttgcgaaattgtgaaaggaatatacaaaacataatatgatactttgatcaggttatatgaattagtagcaaactaatattatatgagcaaaaatacatgttactagattttaacccgcggtacaccgcggacacagttcatttttaaaaattaatatatataaaaatttgtaaattattttatagtttaccattgttactaagtaacgtcctgccaaacccgtcctgccaaacccgtccacaaaaaaaaactatttattttattaatgttgatcttatttataatatgtttatgaatcattgtcaaaatattttagtcgttgcgggacgttgtacccacacatttttcgccaattggttaatatatgttcattcttaaaatttcgaattacaaaatatgacgaaattttttttgagatttttttaaactttatatattatataatgatgttaattatttttgatagattaaactttttataaattcaaatattaataatgttttatgaagtttaaatatacaaataataatatttaaaaaattaatattttttgccttttaggtaaatgatataataactctaaaagcaaaatttaaaagatttaaatctttaaataaatattttcatgcctaaataattaatgtcagtagcatgacattgtaaataagttcaaatacatgatttgtttatttaaacaaaaaatatttagtaagaacaatatttatttaaacaaaaaattttgttaataaaatacgtttatgctaattttaagggattgatgtgaagtttgtttggattaaatttgattgataatgtgattgacaatttaaattaaaaatttaaagtaaaattaattattttgaaaaaaagatttaatgctaatggcattgggttgtaaataagttcaactctaagatttatttgctaaaatgactgcaaaaatgtatatataaatgttttcaaattatgaagcaatcatttggaccatcaaatatattttatttatttttactaaacccatttgaagatatttatccaataagtagtaagtatttgagtagttttattttactgaaagagtcggtgtggttattgaagtataaattttatattacagaccgctgaaagttttttttagttgattaggtttttaaacacagacagtactttagttaatcaataacaaaatgctgattttcatattgtttgtctcagaaaaagagagaaaaagtgcttttgttacaaaatcgaaaggagcctactcttctgtctttagccggttggttggctcttaacaacgcaatgaaaaagcattttttctaataaatcgaaaacaaataaaaattcataacataaaaaaagaaagaacaaagaaagattccaaagagatactgtttcctttgtaagagtatgcaaagaaaaagctaatcaatttgcggtttttattcctcacaactcacacaagttaaagaaaattatggtgtgaatgagaaaaacaaagggttacgtcaatttcgtaataccataaatccaatagatgcatataaactttgatggttcattttgagtgaatagtctagtatgaataattaaacgattgattcatcgatggtttgacgtatttaaaaaacagttgattttgaagaaaacaatctagacaatggattgaattagtcttattagcacctaattaaacttttaacatttcttctttcaacaaaaaggacgaaaatcaaaaacggtaataattagcaaaaaagtgaaaacttttattttgtgtaaacgtgtgtatattgacacaaatatagtttttatatataaaatttcatgtgaataaataagtctttattgggaaacaaaaacaaaaaagagagaagaagaggaagaagaagaagaaggagaaagggagagtgtaggtgtgggttctgttctgtcttggctttgtctcccccgcttatctctccctctctttctctctctctctctctttccactaaattgttttttttttgctctttaaaaagtatatttttttccaatctgcaaattttagtctatgtctgttccttgtgctccctcttctcagtacctgcaaatggaggaagaagaatccttctctgaaacccttgttctcatttgattcctccttcctctctcttcttctctctctgtctctgattcgttattccacacttatgactcatctttcccgtcaatagctaagtttgcctcttctttgtgaaatttagctgaaaaaggagaggaattccgaattctgtcacttcaaagctcgaattttgcaaactttcctttgatgggttttacttgttttgttgtaatctgattaaaaatagaaactttttgttttcttcttgtctccttttgctcttaaaagagaagctttttcaatg

SEQ ID NO: 1315 - DNA, 3000 bp, Unknown
  misc_feature (1)..( 3000): cDNA_ID_1013674_gDNA_ID_1620386_Annot_ID_155457 3000 nt of promoter + ATG
atcctgtagcaacaacagatcgatgctaacactcaaatcacacgatgcatatcaagaattaatgaagaccaaaaattaagagatcatttattaccttgaaaacttggctgacactgaaatctcctatcttcactgtaccgctactagtaaccagcaaattgtcgggtttaatgtccccgtgaataacatcctgtttttttccccatagaaacagtttgaagacagcattaggtgatgaaccatgaagtgagagaagcacgctaaacaatgaagatcatacatgagcatgaagatacatcagtccagtaacaatatcccgcaaatactttctagcagttttctctccgagagcacccggcggtccagaaccgtcatacacccattttccatcaacgtattcaagaactaggagaagccagaaagacaggcattataagattaaaggctctttccacagagagtatatatcaaaacagtagaaaagagaaaggagattaagtacccatgtaaaaatgatcagtttcagggtcatctatcacctcaatgaggttaacgatgttaggatgctccaaaattttcataatcataacctgtaagttataggataaatgagcataaacataacttctctaaaatgaaaccaatagaaatgctgttcagcaatgcaaaaaaactaaggatacctcacgaagaacatcactcatagcagtctctgacggtgccacccttagccttaataaatgcgacttgtgaaatgcctggaaatccaagtattaaatcataatatgtcaaagtaacttgcataatttgcaccataattaaggatcagatcatcgtaatatcagctaaacaaaaaagaaaaaggtttcacgaggtaatgagggaaagaaagaagagcttaccttgatagcataatactggccgtctaaagtgcttcgatataaaacctgttgtgaatgataaacataatgttatggaatccaaaacccggaatacttatggaggatacacttaaaggattggatagtattgagtaaataagattcccacttaccactttaccatagctaccggatccaattttacacacgcgaacatactcattgattgtcttgtcaccattttcatcctaaatatcaaaaaacaacaaaattggtatagacacgccatgggatattcaaagaagcaataatctgagagacaggcaccagaagtcacttacctctccacgtataagttcattagtttctctcactggaatgtgtctgcagattaatccattatctaatctatatttcaaaatttcctcagatcgtttagagcggctcttctgctctacttcttcttcatcttcttcttcttctcctcttgcagtgctagttacatcactatcacaggaatgtgtatcatcatcgtagggcttaggcgattgttggtttctactaccagaactgccaaagcatccaaagcaaccgatggtacgggcaaacaaaaaactatcacgaaacatgatctccttctcaaaaataaaataaaaaaacaaattgctcctcaaatgtatgatgaaatataaaatcctcaagttaactgaggaacctgcacacaaaaaaaaaagtgacatcaacattaagcatccaaataattaaacacaagaacctctgtagaaatcgaaatcttaccccgcgataaaaggggtttcgagggcttcaagcccggagaacttgactattccaaaggatgccattcagcgagatgaataagacaacttgagacatcataaccactgcaatcgaaacacgacatgtctaagactgaaaccttataaataagttatattccttcttcacgagcagaaaatcgttgaatgcatagccccaattgttaatagctacacagcttcaacaaccgccaataaattcaagttgaactacaatgcttctgcgaaaaaagaaaaggtcaaattctcatcaaattcaaaagcttgtgtagataagtcaatcacattgtgggtattatgattcaggcgtaaaggtgtaaactttttcaatccaaatagtcaactctaagcaaagaaacaaagacggagagaagaacaataaaattctacagcaaacttaagaacccccaagaaggtggcttcaaaatcacataaatcacaaaccaaaattttgaaaattgaaaaaaaaaaacctaatttcgaaatcggatgcaatggaaatttcatgagaagattcggaacataaactgaaggtaagagcgagaatcatacattaaagctggttgtgaattcgatcggagcagaggaagacaacaagatcgcaaaggaaagagctctctcaacgtcgtgcgtgagagatttagacacaccaaaaaaaaaagagagagcttcgaagcctttgatcgagattctctcccccttctgtttttttttttttggggtttatattttttgttttgtcaattacttttataaaaagtagttttatattaaatcatcaccagctaatgtgacaaaacatgctataaactaaattcagtggttagaaaacaataaaattactactaataaaaaaaaacacattatgagtttttgaaaacctacctttactataagtttttttttgtgtgtatatataatattatatcatcatctttaaaattttgtaaaatagattacaatttttcctagagaatttgaattataatcacataaaagcttaataagtgtatatttttgttttgttagcataattgtttatggctttttaattgaatttgttcacaatagttattaataccgtgatatctttatatttaaaaatgttattataagaaaatatctgaatagaaatccaaatcgtgggcaaagaaagaaacacaaaacaaaatcgtcgatggctgttacaaaaaggcttttgtgagtgtcccaattccattcacaaagttttagtgtttaataatatctgacactctctttctttgaccgtcgccgccgcaatg

SEQ ID NO: 1316 - DNA, 3000 bp, Unknown
  misc_feature (1)..( 3000): cDNA_ID_2993456_gDNA_ID_1620386_Annot_ID_155462 3000 nt of promoter + ATG
ttgattctttctccctaacaatgtgggtcttcgagcttggcctctcatgtatgggtaagtcgtacataagtgcaacacacacactttattttgtatgggtaaattcatgattcatgtacctgccataagtgcaaaactgtgtatgatttaagccctacattaccaggaggtggcttaagtcaatatatgtatcatataggattatgtgtgatttgacataatagcatttcagagaaatcttaacataatatatacatgatttggttctaaacttataaattataagacatgctaaaagaagcttattatggtacatttaaacataatcctataaccacaacaaaaaaggataataatgaacctacaatgatgtagagcgagcgagattgcctaccaatatgcttttgctttgcccatttgtgtcggcaaattctggttggtttggatcactttggtatgatgctactttcacgtaatcagtaggtttggccattcagatataaaaacatccatatctgaatacttgatttagttcatttttcttttcatgcatagccggaaatatatcgttaatagattttttgtaaactaaatagaaatttgtttctacagtgataaaataaattttctttaagcttcatgaaattttcaaaaaattattcaatattttagatgttgtacgcttgctactgtagagtattattttgtgtccataactattttaacaatattataaatgagtgagaatacgaatggagagaaacgaaaatcttcaatagataaagattggctggttttgaattctagtcaaaaattagctttattgctgagtgattactcctacaatggttttaaaagcagagattcttcgtaagaagcaaaatatgtaaacgaaagtcacttttattttgggcatcgttctaaagccaaattcaaataaaatatcgacatttctccttcctttgaaatcagcatttacaaaaacgtttgtagaaacacacaaaacatgactaattttgttttcaaaggctatatatgtttgtggctattcattatcaaagatatataagcggtcaccaaaagaattttgcaggtcgaaatgtacttcatatatcataaatgattaaaagtgataactaatcatttttactagcctgaattgaagattattgcaagaaaactttttgtgcaagggaatactaaatttggtaatcttttttatatataataaattaactcgccgttaaaataaaaataaaaaataactcagtaaatttgtattagagagagctatttcagcttggagtatatattgacatggattaatgaaaacaaaagggtaaaagaattgtcaaacgacagcatatttatcattcaagtactcatcgtatagaataattatataacgtattatctgcgccacctaactaagcacaaacttcacgcatgatcgtgatgtatgaaaattccgatctctaagtactaattaacatcaaacaagcttttgttaaacctaatgcatcactagcaactttaatgttataaatatcataatttcttacataaaatactaatatgattcatgccaaaagttatctaattcatatatcatgcgcttggaataatataaatattttcacaacacactttcgtgattgttacgaacatagatcaaacagaaaattcaacatcaaacaaagaaagaatattgaccaaagaaaattgagtatttttggaaaataaatttggtaggaagataagtgggtgaacaaaaatgaagtagatataaattacaaagtgatttaacaatgacataaatgaagtaatatcactaagaatgtttttgcaatattaaaaaaaaaaactttggatattataggaattaggttaatccgcctaataaatgtttggtccaagtccaactaatccaaaactatgttaaattgtaatttaaatttgatacatcaaaacctgtttttggaaattaacctttttcgtcaaaacaagtttctttttggaaaccgttacacggttctggtgattaatagacatgggaactagaatccaaaatgcaggtgttacatcaaacttaagtgatatcaaaaaaagcaaatttcaaaaagagaagaaaaccactaaatcactatgatagtacacatgtcacacattcacaactatgtccaaaatataaattacataatttcgttcatcttatcaaattctgccgcgccgcatcatataacacgcagcatacactatagtgccttttcccaaaaacatactatagtttatttataactagattacatttgataatttgtgataaatattgtgtcaaattggtaggattatgttaatgatattgcttagtagaaaacagttgtatctttttagccttttaggcaagaagatgatgaaaatatgagagaattgagcggtaggcccatctctcttctgttcataaatgagaatcatgctttactctctctccctttttctcattcttcttcttcttccccatttacagcccaattccactatcttcctcatcatcataaattcataatactattgcactaatctcgagaagataaagagacaacaaacacctctctatctctctctttcttttttctttcttccgtttcaaagtttcttccttttgggcgggttttaaggaaattttggaatttctctctttttggagacgtttctttaatttctgggcttcttctagttgtgggttttgttttctacttgtagctactgtgtcacgcttttctctagcgaatactttgatgcttcttcatgactctttaacaagattattctgagcttttcctctggccttctaattattaaagtcttcctttttatctattgttaaggtttggcttcgttgtctcttcctcttacctctgctttttggttcagagtatttgaattttggggaatattaaaaattgcctgatactgaaatcaatctcttgctgtctagtg

SEQ ID NO: 1317 - DNA, 3000 bp, Unknown
  misc_feature (1)..( 3000): cDNA_ID_2133747_gDNA_ID_1620386_Annot_ID_155458 3000 nt of promoter + ATG
agctggctcgggaccagcacttgtttctccaacagatacaatagtcttactactgcttgaagaagctccttgctcaatctctttcgtcatctttatgaaataactgtgcctgcaaaaaaaatgaaaccggaaagagtaaaaacagaccatatagatcattgctgcaaatatcaaaagatcggggaaaatgttaatcaattaccatcgagtgtctgcagtaagctcgggatgaaaagcagttgctaacaagtttccttgcttcacagcaacaatgacttttgtttcaggaagagcatcttcctgatttatccccaaaaaatgaaaccaacaagaagggattcatacatgtgctcacaaaagagtaatcgtttcatgaaaattagtgcaaaattaagcaaacctcttgaatttgtacggtggagcttgaatacaagaccttgtttgatgggacgggataatccgccaggacttcgacatcaggacctacatcaagaacagctggagcacgtatgaacactcccctgtatgtctctggcccaccttcttgagatgttagttgaggtactaagatatcagcttcaaaactttgaatctacacatcaaaaacaaattcgagaacaatctaagattttcacaacatcttatttgatactaagagtgaatgagaatccatatgaaattactcccattgattcatgaaaagaccgagttttatatatcagtacaccacaactcatgctaatataagcagtttctttttccacatattgcaagtcaagattgatttaaatatgtgtttacacattttcttaacatgaacccggaatcttggtaagagacataacctggctaccgaagaagttcctatgtacggtgcaatcaaggccaccaactaattcctgacctccctctttctgacctaaaatttcaacatttactcaagtttctaaattttccgcaacaggaagatgaattcaagtactcaccaactgctctgtctgccaagaatataagacctgcgcatgtcccccaaacaggtttccccatcttaacaaactcacgtagagccggaaacttcaaaagagcaacaaatgaaagaaaattagaacagagaagagacattttacactattcttcgtcctcaccactaaaactgtaaaaacaaccaaatctaaacaaggagtttggtaaagataaaagtaaatgatagctctccctttcctacacttatcacagcttccattaaagacagaaaatatcatccataagatcaacgagtagtttggtccacaatgtttaaaggtttcagatacaaaacattacttcatgtacttgaaggctaactaatcccaaagttccttcattttcaatctcaaagctaattactttcaacagtactaactgaattattcaggtataagagacgttttgactgaaattctggagaattttggtgaataacgccagattcgtgtcaaaacacacataaaaaaggaacctttaactagtttcttcaagtgggtcctcgcaaacaataactttagattctagagagagaggagcggaccaagttatgatactcggcgagtttggccatggtggtgctctcgccgccaggaatgataagagaagaaacggtgagaagctggtcagccttcctaatctcgacgccttggacaccgagccgccgcagagccgcgatgtgctcattgaaagaaccttgcaaagctaaaactccgacggtcattgcggcggcgacggtcaaagaaagagagtgtcagatattattaaacactaaaactttgtgaatggaattgggacactcacaaaagcctttttgtaacagccatcgacgattttgttttgtgtttctttctttgcccacgatttggatttctattcagatattttcttataataacatttttaaatataaagatatcacggtattaataactattgtgaacaaattcaattaaaaagccataaacaattatgctaacaaaacaaaaatatacacttattaagcttttatgtgattataattcaaattctctaggaaaaattgtaatctattttacaaaattttaaagatgatgatataatattatatatacacacaaaaaaaaacttatagtaaaggtaggttttcaaaaactcataatgtgtttttttttattagtagtaattttattgttttctaaccactgaatttagtttatagcatgttttgtcacattagctggtgatgatttaatataaaactactttttataaaagtaattgacaaaacaaaaaatataaaccccaaaaaaaaaaaaacagaagggggagagaatctcgatcaaaggcttcgaagctctctcttttttttttggtgtgtctaaatctctcacgcacgacgttgagagagctctttcctttgcgatcttgttgtcttcctctgctccgatcgaattcacaaccagctttaatgtatgattctcgctcttaccttcagtttatgttccgaatcttctcatgaaatttccattgcatccgatttcgaaattaggtttttttttttcaattttcaaaattttggtttgtgatttatgtgattttgaagccaccttcttgggggttcttaagtttgctgtagaattttattgttcttctctccgtctttgtttctttgcttagagttgactatttggattgaaaaagtttacacctttacgcctgaatcataatacccacaatgtgattgacttatctacacaagcttttgaatttgatgagaatttgaccttttcttttttcgcagaagcattgtagttcaacttgaatttattggcggttgttgaagctgtgtagctattaacaattggggctatgcattcaacgattttctgctcgtgaagaaggaatataacttatttataaggtttcagtcttagacatgtcgtgtttcgattgcagtggttatgatgtctcaagttgtcttattcatctcgctga

SEQ ID NO: 1318 - DNA, 3000 bp, Unknown
  misc_feature (1)..( 3000): cDNA_ID_2990960_gDNA_ID_1620386_Annot_ID_155456 3000 nt of promoter + ATG
tctgacactctctttctttgaccgtcgccgccgcaatgaccgtcggagttttagctttgcaaggttctttcaatgagcacatcgcggctctgcggcggctcggtgtccaaggcgtcgagattaggaaggctgaccagcttctcaccgtttcttctcttatcattcctggcggcgagagcaccaccatggccaaactcgccgagtatcataacttggtccgctcctctctctctagaatctaaagttattgtttgcgaggacccacttgaagaaactagttaaaggttccttttttatgtgtgttttgacacgaatctggcgttattcaccaaaattctccagaatttcagtcaaaacgtctcttatacctgaataattcagttagtactgttgaaagtaattagctttgagattgaaaatgaaggaactttgggattagttagccttcaagtacatgaagtaatgttttgtatctgaaacctttaaacattgtggaccaaactactcgttgatcttatggatgatattttctgtctttaatggaagctgtgataagtgtaggaaagggagagctatcatttacttttatctttaccaaactccttgtttagatttggttgtttttacagttttagtggtgaggacgaagaatagtgtaaaatgtctcttctctgttctaattttctttcatttgttgctcttttgaagtttccggctctacgtgagtttgttaagatggggaaacctgtttgggggacatgcgcaggtcttatattcttggcagacagagcagttggtgagtacttgaattcatcttcctgttgcggaaaatttagaaacttgagtaaatgttgaaattttaggtcagaaagagggaggtcaggaattagttggtggccttgattgcaccgtacataggaacttcttcggtagccaggttatgtctcttaccaagattccgggttcatgttaagaaaatgtgtaaacacatatttaaatcaatcttgacttgcaatatgtggaaaaagaaactgcttatattagcatgagttgtggtgtactgatatataaaactcggtcttttcatgaatcaatgggagtaatttcatatggattctcattcactcttagtatcaaataagatgttgtgaaaatcttagattgttctcgaatttgtttttgatgtgtagattcaaagttttgaagctgatatcttagtacctcaactaacatctcaagaaggtgggccagagacatacaggggagtgttcatacgtgctccagctgttcttgatgtaggtcctgatgtcgaagtcctggcggattatcccgtcccatcaaacaaggtcttgtattcaagctccaccgtacaaattcaagaggtttgcttaattttgcactaattttcatgaaacgattactcttttgtgagcacatgtatgaatcccttcttgttggtttcattttttggggataaatcaggaagatgctcttcctgaaacaaaagtcattgttgctgtgaagcaaggaaacttgttagcaactgcttttcatcccgagcttactgcagacactcgatggtaattgattaacattttccccgatcttttgatatttgcagcaatgatctatatggtctgtttttactctttccggtttcattttttttgcaggcacagttatttcataaagatgacgaaagagattgagcaaggagcttcttcaagcagtagtaagactattgtatctgttggagaaacaagtgctggtcccgagccagctaagcctgatcttcctatatttcaataactgaacagagagaagatacacacttcttaaaataaaaaccagagaaagtgtcagattctttatctttctaaagatgttttggaaaaattgcaagctagtttgcaatttgcactcaagaaagtttcacaagactctttaatggattcatgtacttgtttcttgatacaactttatatatacagttgaatctcaaacttttttgctgattcaatttggtctatgtcttgtgaaatgtgaaaggtcgtttggccaagaattaagctttagataactgtcagcgtttataggcagaacagaacatgctctgaaagtataactcggtagggttttggttcaatggtttagaagctaacccggtttatagtaaaccagtcagctgactttgacgcgtttgacttttcattgctttctcgaaagggtgcaatcttgtagtagtgggcggctttgggccaatgaaagtcaagaaaagttacttaaaatgcacacatttacagatatgttaagacatgagggctttcttcttcatttaaggcatcctcacgttctagatactcgtttccttgcacataaagccatcaagaattaattttgtttttcttcagaaaatagagaaaattttcaaatttgtatatatagtgtatagaaagatatacagaccggatttttcaaatttattgtatcgataaccaaaattttcacccttttttattattttttgtcaactaaatgaatactaacttcaccctgttttctcatagtaaattgctaatataattcaactgggaacaaatgaagcaagtatgaatatgatttgatcatgaggcattaagaactaggtaaaaatttgtgaactgatattatatgtatggttgtgtttaaattaaacaactcttttctagctaaaagacttgatgttgaagcttcatcaagctagatttttgttaagaaatcaatggagacgacttgagatgaactcaaagagtcggcttctttcttaagatgaagcaagggatattatcatatggggttttaataagtcaactcaattctttgcccattctatataatcccttcttctgcaacaacatctcatcacaccaaaaaacacagaaacattttgagaaaccaaagaagaagaagaagaagaagaacaagcagaagctaaagaagaagacttgaacttgagagatg

SEQ ID NO: 1319 - DNA, 3000 bp, Unknown
  misc_feature (1)..( 3000): cDNA_ID_2133700_gDNA_ID_1620386_Annot_ID_155440 3000 nt of promoter + ATG
aaggacaaaactgtccatttagattccaccacgtgtcccgataacgtttccgtctgtatctctctcttccgtcttctactcttcttcttcttcttcttcttccactcacaatctatcgagctaaaacactgaagcagacattagcgttgagaaaaaaaaaaaagtaagaacgagagagagaaagccatgtctgcgaaaacaatcctatcatcagtagttttggtggttctcgtcgccgcatcagcagcggctaatatcggattcgatgagtcaaacccgatccgaatggtctccgatggtctccgggaggtagaagaatctgtttcccagatcttaggtcaatctcgtcacgttctctctttcgctcgcttcactcaccggtaagtctcgtcctttcaccacccgtgctttctccgttgacttttgatcttagcttttgatcatcgtttgttggtgatgaagatatggtaaaaagtatcagaacgtggaggagatgaagcttcgattctcgattttcaaggagaatcttgatttgatcagatccaccaacaagaaaggcttatcttacaaactcggtgttaatcgtaagtttttttttttatctttcttctcctgagtttgtacttaaggaagtaaacgtatgtataaaagacactgtgggaaaacgtggaaactaacttttgttctgtcttggaatcttccaagttaatatttttaaattttgatttttttctttcgttcacgtgattcaagattgttattgggactctagactttacagagtttatgagtctatgaactctgtgtgagagactagtttgtgtcaaaaacagtgttctgcttctttaagatttagctgtcctgagttgaagattggttctcgttcctacttccttgtagagttgtagggatctaatctttatttgtcctagaactgacactgcaatggtttgatgaataatgatttacctaaatattgctaattgtgtcttgaatctatacagaatttgctgatttgacatggcaagagtttcaaaggaccaagcttggtgctgctcagaactgctctgccactttaaagggcagccacaaggtcacagaagcagctcttcctgaaacagtaagtccaggactcaatcttgctgcactgaactatgtcaaccaccatcccgttctgtttttcagctctaagagaacgtgtttagctgcagacctttttaaaaatttggttctgagttctcaaattgtgtaactgcagaaagactggagagaagatggtatcgttagtccggtcaaagatcagggaggttgtggatcttgctggacattcaggtaaaagtaaaaccaatgattaagatactctctttaatttttggtgggatcttttgatgtcaaattgaaggtcgagattgtatgtcatatgattgttttttgtactgcagcacaactggagctcttgaggcagcttaccatcaggcatttggaaaaggaatttctctctctgagcaacagcttgtggattgtgctggagctttcaataactatggttgcaatggtggccttccttctcaagcctttgaatacatcaaatccaacggtggcctcgacacagagaaagcttatccttataccggtaaagatgaaacctgcaaattttcagctgaaaacgttggtgtacaagtcctcaactcagtcaacattactctggtaagcatcttttatggattttgaatttcacttgcatgagaatatacattctgtaatgatgattgaaacaacaacaacaacagggtgctgaagatgaactgaagcatgcggttggattggtacggccagtaagcatagcatttgaggttatacactcgttccggctttacaagagtggagtttacactgatagtcactgtggaagtactccaatggtgagactttcttctttaaactgttaaaaagactttcattggttcacataaaatcttcttaggaacttagcttagtgttcggtttccttaatgtggcaatataggatgtgaaccacgcggttttggccgttggttatggagttgaagacggtgtaccatattggcttattaagaactcatggggagcggattggggcgacaaaggttacttcaagatggagatggggaagaacatgtgtggtaagttctttaataattatgaaaccatcacaccattctcaaattctcacagttggtctttctctatctattgttgattcgttcttgaattgcaggtattgctacatgtgcatcataccccgttgtggcttgagatgatcagcgaatgtggttggtcaattatcaaattacgaaatgttcacgtatttattggattaagacattacgtaaaagttgggacttgggaatgcatatggtttatgcttgttgtaacataaaaaggtctgttaatatgtacaaaataaagccaaaactatagacgacaaatttataatattttcatgttaaatttatgaacataaattgatttagatcaaagtagtttcgttcttgatcctaagtcaatttgtctaacatatagcttttactttgaatcttgatccttgagtcattttgtataacatacagcttacaagttatgactttattttgttttggtaattggtattctaaacgaaaatgaaatctaataacgtgattaatagtggtcacatggatatctcataaatctctatccaattgtgtgattaagaacatgcaaaactgcaaataaagtataaaaaatcatttacacaaaacttcatctagtttttggacatcaaattcacaaaaagcagcatataacactacaataattgatttcacttttattttatttgtttgtttacctttctaagttcaaatataaattctatgattagtttattataattacaatttttattttttttactctgatttgaattttttacatggacacgaaagaagaagaagaccacatgttggttccgaataaaac

SEQ ID NO: 1320 - DNA, 3000 bp, Unknown
  misc_feature (1)..( 3000): cDNA_ID_3061685_gDNA_ID_1620386_Annot_ID_155443 3000 nt of promoter + ATG
ataaacaaccaggacttgatcattccttgctcaaaaaccacacaatccaggtatatatatatatggtttcagaaattcgtctgctacatacattttagatttttaaaaatgtgagttttgaatctggctattgtttttgttaagatgaaaccatcattatcaagacatgagctaaagaatcaaactagcaacaacaaaacatataagaaggacatagaatgtccatatggaactattcctgtattgagaaacacaaaagaattcaacaccaaagcccaactcttggctgccaagtatttcaatccgttatcagctgatagccctggaacacatgtacgcattcacttttctgttaataccttagatctaattatatattacaagtgttcatgtatattggtagatcgctggggtaaagcaacacggtggtccatatcatggtatagaagctaagtttaatgcatataacctaaacattggagaagatcaagcctcatatagtcaaatgtatttaggcagtggacattatggcgaagtcaatttcatttcaacggggatgatggtacgttttacattttattgttcttttttttccttaaaatctattttacgttatgggtagtcttacagtagtgcaagtctttttaacagataaatccaggcatttttggtgacggacgtctttggacatatggattttggatggtaagcatgtgaacatattatatatgctgaaatcattaaccaaataatatgtaaatattacatatgattttgatagggtaaaggtggaaaaggatgttataacatggcatgtccagggtttgttcaagtatcgaatgtggttcccttagtcaaacccatgtaccttaagccaggggagcctgcatcgttgcaatgggccatccatcaagtaagtttttaattttctacacttcgtttgttttttaataatatgttttgcagattttttgtttgtttcaattattttttaaagtttctaggcaatattttcatgtcattctcacttagtagtgaaggatttatgattcttaaaactaatcattaatacaatcaaatcagtgatatcagactatatatagcctttttggtccaaacactttgattagcacatgattttactatgattttttttttaataaatgaattttgttttgtctcttaaaaaggatgaacaaacacgaaactggtggattatacaaatgtcgccttatacatatatcggttattggccaaaagagctattttaccttatggataatggtgctactatggttggagttggaggtgtagttcaggcttcaccttctggtttaagccctccaatgggtaatggtaaatttccggcaaaaggtcctttgagatcagccatgttttccaatgttgatgtcttatattccaagtatgagaaaggtaaaataaatgcgtttcctatagtggagttgctagatagtagtagatgttatgggctacgaattggtaagagagttcgattttggactagtccactcggatactttttcaattatggtggtcctggaggaatctcttgtggagtttgatatttgcgagtataatctttgaacttgtgtagattgtacccaaaaccgaaaacatatcctatataaatttcattatgagagtaaaattgtttgttttatgtatcatttctcaactgtgattgagttgactattgaaaacatatcttagataagtttcgttatgagagttaatgatgattgatgacatacacactcctttatgatggtgattcaacgttttggagaaaatttatttataatctctcataaattctccgttattagttgaataaaatcttaaatgtctcctttaaccatagcaaaccaacttaaaaatttagattttaaagttaagatggatattgtgattcaacgattaattatcgtaatgcatattgattatgtaaaataaaatctaactaccggaatttattcaataactccattgtgtgactgcatttaaatatatgttttatgtcccattaattaggctgtaatttcgatttatcaatttatatactagtattaatttaattccatagatttatcaaagccaactcatgacggctagggttttccgtcaccttttcgatcatcaagagagtttttttataaaaaaatttatacaattatacaatttcttaaccaaacaacacataattataagctatttaacatttcaaattgaaaaaaaaaatgtatgagaattttgtggatccatttttgtaattctttgttgggtaaattcacaaccaaaaaaatagaaaggcccaaaacgcgtaagggcaaattagtaaaagtagaaccacaaagagaaagcgaaaaccctagacacctcgtagctataagtaccctcgagtcgaccaggattagggtgcgctctcatatttctcacattttcgtagccgcaagactcctttcagattcttacttgcaggttagatattttctctctttagtgtctccgatcttcatcttcttatgattattgtagctgtttagggtttagattcttagttttagctctatattgactgtgattatcgcttattctttgctgttgttatactgcttttgattctctagctttagatccgtttactcgtcgatcaatattgttcctattgagtctgatgtataatcctctgattaattgatagcgtttagttttgatatcgtcttcgcatgttttttatcatgtcgatctgtatctgctctggttatagttgattctgatgtatttggttggtgatgttccttagatttgatatacctgttgtctcgtggtttgatatgatagctcaactggtgatatgtggttttgtttcagtggatctgtgtttgattatattgttgacgttttggttgttgtatagttgatggttgatgtatttttgttgattctgatgtttcgatttttgtttttgttttgacagct

SEQ ID NO: 1321 - DNA, 3000 bp, Unknown
  misc_feature (1)..( 3000): cDNA_ID_2133509_gDNA_ID_1620387_Annot_ID_155480 3000 nt of promoter + ATG
aatatttatatatttttatactgaaatgtaaatatctttatatatttatcctttttgttttaatataaatatttctatttatagtaacttatttctacatgcaacatttcaaaatatctttttaaattaaatatttatatgttgatttctatatatgtgatgccattctgacaaataaaaatattaatagaatccaattttaccgtaattgacatatttgtgagataattttgtttggatacgttttgcctaattctcaaatatatatggctgagaagcttaaaagatatatttacaaaattcttctacctctttgctatctctccggagagcttccacgaaattaccccggtggcagaagtgacggtggcaatagatgtggaagccaccgctggtcaccgtaacggtggtaacagtggcgatggaaagaaaaagtgtgtgtgttcaccgtcgaagcatccaagatcgttcaagtgtaggtatcatcaacatgaatatcaatggcttccttcatcttctttttcatcccttcacaaataacatatcatcaattcatcatgtaaacaacaaatatagttatatattattattattcatggttattttgattcgttaagtatttcaatcaaagtagaaattgtgttgtggttcttcgtattgctcatcaactacattagctcatatctatgttttatcaaattcccctgttgggaaatctttatttgcagggaatgaaagcttggttggtgtttgtggactcgctgtcgcatcttgtttggacatgctgttttctaaaacacttgaagttcccttgcgagacatttctgtcccttatcgttctagcacccatacattggtagcagaagatattgtagtgaagactgccttatcattaaagaacgccctcttgttggcgtggaatgaagactctttggttttgcaattgttcttagactcccagttcattgtaatgactgcattttggtagtagaagaaggaaagtaaagtctgctgcaaatgtacaacaatacgtgtatatgggtaatgagtatggtgtgtgaaaagggacgtagaagcaaagagcatggtgtgtgattgaacaaaaaacaatgtttcgttattgcaaccaaatttttattaaatgaaaactggaaaactaaaaaaaatcatctatcaatgaatttccaaatttgtggcatctttccacatgtcttcagccatagattttctccacatatttgtgttttctctgtcttgtttttgtgcttcgagaggttcctcattatcaatttcattggtgttcattgcattaccttcattgttaactacgtcaccttcatttcccacttcatcagggaagtcggcttcatctgatcgacattctttacgaagaaagttatgcaacgctgcacatgttaagactaatccagcttgtttcttgtaagaaaaaggaggagcagatttaaaaatagcaaaccgagatttaaagattccaaatatcctttctattacgtttctcaaagaaacatgacgaagattgaataactcatgtggagtttcaggatcgcgcctttgaccagcaaattcctgaagatgatatctaactccgcgaaatggagctaagaaattgagacgatttgcaaatccacaatcaaccagatagaattttcctgaaaatttagataatatatgttactataagacatatgatctataaataaatttgtaattgttctaccttatagtactcggaaattgtttgttcttttacttaatgcatcacttaacactcttgaatcgtgagccgaaccctcccatccactcagaacatagataaactccagatcaaagttacatataactaaaacattttgagatattgttccttcaagctttgagagatttggttagctctaagtccactatccatgttgcatatccccaagcaaagctactcatttccatattagctttacgagatgtatctctttccatattagtccaataacgcatgagtttaaaagaatttataaagtatctaaacgaataacaccagaattcaatattctattaaattccatcacattcattcgttcaataccccccttaattttggactcaatttcagtatttgccacattatatcttaattgggcaaaaactaaaaatctaaaatttttacgatattgtttctacaatcaggtccaacgtaacattgtatatttatatgtatgaaaggcctggacaaaaaaatatggcgaccgaataaccgaaaaaaaaaccaaaccaaaaatattgaaccgcatttaaatggaagttcataaaataagcaaatggttagtgaaatcccctatccaaactaacagaaacgaaaagaaccaaacatttaaccaaaatacccaaaaataatacacaaaaccataattataaactcaaaatattaattacgtttagaaatcaaacaatcaatactttatataagcagcatatccaaatgttttaagttatatttgtcaaaatcaaagaatcttttaaaaaattgaaccaaattatacttttctttctaattttttccctttttgtattttttccgattaatttcacttctattcggttcatttcggttattctggctaaaaatccaaactaaaccaaatttaataaaataaccgaatcgacccgaattgtaatcctaaaatatctgaatggttattatattgccatatccgatcagaacttaccgaaccgaaacggaacggttattgtaatctttgcagccaaaaaaaagaacagaactactttcgattacgtcattcatcgtatgtgcatacgtatcatcagagatagagagagagagatctttcttttcttcttcaacaagtccaatggataataataaatttgttcttacatactaatctttacggttctgtctaaattgaagaatttttttatcacaaattctcagatttcttgatcttcagattaaccgaatcaatg

SEQ ID NO: 1322 - DNA, 3000 bp, Unknown
  misc_feature (1)..( 3000): cDNA_ID_3061740_gDNA_ID_1620387_Annot_ID_155485 3000 nt of promoter + ATG
tcctaaaaatagaaaagaaagctcatgttatgatcaacaagaaattggacttcataacattcttagttgctaaacaaatcataaacagatacctaacataaggagaatgtatcactgtcaagactggtataaagtcgtaactcatgagaaacgtctattatatgagatatatgttattgaggagaaagagtagcaggggcaagttaccttcaaatcagaagaaaaattcgtaacctgcttttcataaccagctttcttcagatggaaattcatccattttagcaaaactttttcaggagccaatcccatgagctcctctgcatcctgcatcgtcaagaacattttgtaatgtttcaatatcatgaaaacaaatcttcatggaaagcgctgaacaactcaaatatatttacctgagtgtcgtccaccagttgaaaaagcgaaggagttttcttaaaattgagatcagccaacatttggatctgatattttgcaccaagaacaccaaatttgtcaggagttagtaagttttttaacaagtcaacattaaacaaaatgaaaccatcatataaattcctataaactatcaatgaaaaagcttaaaggtggtacctttataatctgagatatcaacccaagtacgagatatggctgcaagaaaataagaagaaggaggaggaccaattaaaattgataaatcaagcaaacagaggaacaatagatatatgttttcattgtaattactcactcttccttcagctatgtcctgtgttccaatgttgaccactgtgcagccaatagctttggcagaattgagacctaaagtaaggttctcattcctctcccatgggttaagcgttttctttgtgttgatagctcgttcgtcgatggtcccaggaacagcaacatttataagcttactgcaaaaaagtgacaaagatgactactaagaaacttcaaaacaaacagtaaacaccaaggacgaaagtaaccaaagacataccacaaaagaacaccatctttaacaagatcaaagaaagcatttgttgcgggatcaataggaagatagctcttcaagaaaggatcatctctcaagtaattattaacatgcgaaacataagaagccttctcggattcattgatcgcatggtgcaccgttgtagtactggttttgaggaatgaagaagcaccttttgaccctcctgatttctcaactcctcgtgcttgcacacttaaaaaggcctatcaaacatgtcaccataaaccatgtaaaaaaaatgaccttcctagtttctattctaaaccttcagactcatcatcataagtacaaaaactcacccgaagaaagaactcaaaatcgacttcatcatcagcattgggataagacttgtccaatacagatttgatctcatcctcatcaatggtaccgttaaaagctttcaacttttcgaaaacaggtggtaaatctccgacagtgaaacgtcctaattgagttttgttcgaaacaaactaaaatgtacaaaaaaaaatgaaaactttcaacacagaggtaatgtaatgatacacctgaatcaaaaagaatgcgatctagatataccttagatttaagggtacgcaattccacttgtgtaaattggctctgtaaccaaggatcagagacaagaacaccaacgtaactagacattttttctaatcgatttctccgcagaatcaagacaaaacaaatccctgcaacataaaaatgtctttaatcaaacaggaaccagaaaatttgtaagaaaaaagaccaaactttttgacccacaagatcaaaaatggcaattcgataaacaaacacgcaaagaaacgattttgagataattatggcgttgatgcatcgatccgatgtaatgggaagaagaaaaaagagatgatcagaatcgaaatattgaaaagatgataatagaccttagagcagattgagagattgaatgtggttcgtgttcatattctctttatcaggataaagttttgatctttgaagcttaaaaagagatctgtttcgaaataatgaatttcgtgttgagtttttcgagcgcacgacctgcgatgaaatggaatgatttgacagagagagaagaaggtgagggtttctatttggcatttatttaattttgttatttaattttaatcatttttatctttcttattaacattgaacaaatcgttgaaattacaagaaagataaaaatgaaatctttcaacgattgataacattgataatcgttgaaagatttcatcgttaaaagaatataagaaagataaaaaataattattaacattgaacaaattgttgaaataattagatttaatcgttgtaaaaacacattggtgtttaagaaaaattcgaataaattctcgtaaaactaaacttatacattatattcttttatataactatataaaggatgatattaatctaactattttaatataaaataaacataaatataaataatatagttaaagataattataaataacttaaactttaatattaataatattagaccatcatttttgctatgctgcaattttatttttttataatatatttttatatatataaatttgaaatatttaatcatccactcatttaatgagtactacttttagtgttacagctttttttaataatattctcaataatgtatcattcacaatttttaaataatcatttgttagttttgaattataaacgcgtcataaactaattttgtagatgttaatgttagaattataggcagcctcctcctctttgccaagtgttgctctgatctcggcaaactacgtctcgcgtacacaaaaccaaaaatcgcaccaagataaacaacgctttactcaaaaacagacttagaatggtaaaaatcaacaaacctatcagctcaaatctgacaactgaatgacaaagggctaccaaagaaagtgtcaattgtgtggcgtgtttggtcacatcgccaaacg

SEQ ID NO: 1323 - DNA, 3000 bp, Unknown
  misc_feature (1)..( 3000): cDNA_ID_1456622_gDNA_ID_1620387_Annot_ID_155492 3000 nt of promoter + ATG
tttttatatttagaatttaacaagatgtatgattatatttattggttataaagatgtatgattatactattattttaagttaatcttagaaaaaaaagtggtgtactatttattttaatcacagaattgggaagttcaatttagaaaaaaactgaaaatgtgaagaagataatatacaataaatttagaaactttaattgaatttagattaacaagtacactcatatctcagttggcatgttttttatggattcttttctaagagttttttgatccggtcaaaaacttcttgcatttcatatagccctataaaatcctatgtttaatccgaccactaacccaattcacgatcaataaatgatcgtcggttcagtctggcccttgatcccgttcccgtagatatttttttctttttggaaaattagttattagtttttcaaaaattaacacatgatatccagattttatcgaactatagccaactaatccggagataagtatcttggttaacacatgatatctaaattaaacctacgtaccacatgaacacaattcatttcccttccgatatttcatattttccatataatataaaaagggtaatactaaaaaatcaacaaactaaaactaattagtttttttttttggttaaatgaattagttccacaattaatgtttagatttgttatttgtatagattagcaaattagttatggttaaatgaattagttacacaattaatgtttagacttgtagataagcaaattagttatggttactcaaatcagttccacaaaaaaatgtttagttttgtatcttaccacatcttgttgtcggtttggttagagagggacctttacatctaacctgtattttttgggcttcttctctttctcaacccattaaacacagaattcttctctttctcaacccattaaacacagaacaagatatgtctcgagagagttatcttaattaattcaactagatgagtatccatgctacgcgtgggcttttgttttaaaagttgttatagcaattctctgttgatagtttttgttgttggttatgttcatttttttatgagcatttgttttaaaaattgttgaaatatctatattggtagttttgttgttaattatgtttatatgttttttagtaaagttagatctacttatatagttataaaactagattttaacctgcggtataccgcggaaacaatttattttttaaagttagtatatataaaagtttacaaattgtatctatctataaaataattttattttatagtttacaaatgttattaaataacgtcctgctaaacccgtcctgtaaaaaaaaaaccatttattttattaatgttgatcttatttatgatatgcttatgaatcattgtctaaatattttgtaattttgtagtaattaaatgctatcagattatatctctgcgctttgatgattataatcgaattgttatagttatggagaaaatcaatatcaaaaatgataattttatagtaattaaatgatattaaatattttggaagtattattttagtaaataatcgtgtagttaatgtggagagattttgggaagattgttaaatgtcaaatatttaattcgaagattttatttttaattatcaaaaacaaacattaaaatccagtggcagccattgtaaataagtcccaactacaggatttatttcacaaaatggctgcaaaaatgtatatatagattagattcatcttggctccagatgacaattaaacatttcttgcaagtgaaactataaactaaaattaaattgtcatcgtggaagagattttggtagagagatcacattgtaaccaaaatatttttcattacttgtctcatgtgtactaccttgaaaatgaaccagaaatatcatgtaatcgtcccaatgttaaaacttttaacacacatttcaattcttaaaatagagcaaaggtttgtagaagagactgtaagatcctcatgactattatagccgcttttgcccacataaaaaaaagaatttttggtgagcgatagatttaatcaatcacataactctcacaacatctagtttgtgctataatcgttgcatggttatgcttaaacttgtgtcatcccaatcatttggtcccggtataccagcttctcatacttgtcatcatcaacataatgattcacactgtaaatgataggtgagatatagatttagatgatatattttcaagatgttaggaacttattgaccacaagattgggcccactaacagaattcaggatatgcataacttattgtatatatgatatataacttcattgacaaagctctattaggttcaaatatttactctttgttttgaagatcaaagagcaagtcaagcatgtaccgttactaaaataaaaatttaatcatataataaaattatagtaaaaatattaatattttttttgtttgagaaactatttgggtttctctttgatggagatgctctttgactatatattttcggttaaattttgccaatttttttttaattttttaatatgctatttataattattttttccaaatacacgtattttttctttaagtaatgaggtgtcagaaggatgaagagagttcaccttctttcatatgattagtctccaaaagctttaatttactgaaagccttaacacaccaatactaagcctacaggctttagtaaagcccaaatcaatacaataaaaatcctaaattaataaacaaagagtcttcttcttcttctaaatcccaacggaaaaagaagaagaatagagttttcgcttaatctctactcaatacgttgaatttgtgaaagcggagatctacaaagcgtaaaagagttcttctgggtttcttctttctccgatcgatctgctagacgatgacgatgagtttccttctataaaaccagtaactacgagatttgatttataacaatcatgaaactctggtc

SEQ ID NO: 1324 - DNA, 3000 bp, Unknown
  misc_feature (1)..( 3000): cDNA_ID_2133561_gDNA_ID_1620387_Annot_ID_155494 3000 nt of promoter + ATG
gcagtattaatcttcctaagtggatcttccatagcaaccgctctatttaataacctccataaaaaaaaaaaaaatttggaacaatttgtagattccgtaactattgcgaattagtaaatgatatttttttctaacaacattctcaacaatgcatcatacacataattcataaacaatgtttgtgttaaaccaatttaatattaaaataaatatagtaatagtacaattaaatatgttaaattaaataataaatatatcattaacctataaattagaagttgaagagcttacattaattattctatagacacatgacaaataataaaataatgatgtgtcaattatatggagagagttgatcaactttcgtatatataatttgtttgcatgtggctttttattattgtaaattaatttgttgacaacatcggcctatggcttcatacggaaaataatttagtaaatataaatacagatgaaattaaacaattactgcctaaaaacatgtcttttgactggagcaaactaatttctttacctcacaggtgatctgtttttcaggttgacttggactaagttttcttgagttcatttatgggtcaccaaaccctatcgagagaacaaagtcttgcactgagaggtaatatgtttgaatgcatatagacggcagcattgacacgtacggtactgcacgcgtttcttagtcgaatcaccaccttttgtcttttggtttattttgtcaaaacctttgttttagttttttaattggtgtgaagcgatcgttattttcggtgaagaagaacttttcttccctacgtttgaatctttacattacaaataagggtttggtgaagcgttgactctcaaggtcttttaacttattctatacaagatttttactattctttttgatttgtaatgtgaatttttaagtattatgtaatgcggatgagaagtatagtgatttggctatattttttttttttaatataatgttaagttatattcaacaaaaaaatatagtttttataattagtgaggtttggtaattggcttaaattacgtaaatatattgggatatggagatttaagtatattatttacatttaactttatcttagattagaaaatctcatctctatataaaaaaatataatttataattttatttttatgaaagtctattataattcttcctaaacacttatgtattctttattctcatcaaatttatcaaaatatgtttaaaaatgaataatgatttgaggaaatttattttaaaagaaagcctttattaaaaaaagtgagtcatatacatatataagagaaggtacaaaaaaaaagattatttagcttaacgtgaagttaaaccttctagaatgctttttttgggtgggtctcaaactctcaatggtgggatcatattaatcttcatggccacggtgtttttgcgtatatttgacggcgtcgtttcgtacacttcgtgtttggtccatacgaaagtgctttccatcttccttgggacattttctcctattatcatgtgtgtaaatgtctccttttcgatttagtcacttgtcccaaaagttttgaagaaaataacatcatttgtgtttcttttttagtgttctctttaaaatgattgaactgtctaatagattaattttcgatttaataaaattaactgatcgccaaaagcaaagaactatcaatttacgtgattggaaattacgttaaaggagactgactcatttcaactattttcattttggaatatattacagagaactaaagaccacatgtgaacgcatagagtattgcgagagatttgactatctttttctccaaatctttagtttttgtcaaagaaacataaaatcatatactaatgtaatctttatttaatttaccctccagaaaatcagtagacagacatgtgaatgtgattatgtcgtgattactaactaatctacctaatccaccgtaattatatactaattaaaactgtattactgtttaacatttctcttttgtgtttcttttctttgagaatataattgaccgcgtcaacatttcatttgttcttttcataaccttgaagatttgtcatattaacgattaaaaaatctaatatagaattgtgtagtacgtataagacttcttattgcatatagaacttcccaccattagtacataacaaatattaaataggtagagctattaaaacgtttctaaaactaacattaatcagaatcaaacatttacaatattttagaaactcatgcaatacaaagtgagccgccccatgtggttttaaatattaaccttaatgtccttataccgattacaaccttaaaaatgtcacaagttgtaacatataaaaagaaaaaaatgttaaaaaaaatcccaaactttaaaatttgagacaatttagtcttgaatttcacaaaagacaaataaatcgtaaaatttttgttgagtttcgaaataaatgacaaatttattgttgttatttgagttatgtgattaaatatgttaacaaaaactttttacggcgttaatgtctcgtttatttactctgttaaaccaaaacgacgtcgtttacttcaaaattaaatcatcttaaatttaaaaattcgtgatttttttgacatttttttctatatagaactgatttcttctcttttatttattctataacgtagtgacttttgttttactaaaaaagaagttttttaaaaaactttatcatattataattatgttattaaataaattaaataaaaaaaaactttaaatttgacaaatttgagtgttacgcttacgtcatattgtgaaaaagagaaaggtacaaaatgggcaaaaatagtcaacaaagaacagcttctccgactttcgtagcctttaaaaaagcatccgcgtttgcttttctataaatatcttcgaaaccccattactctcaaatccaaccaacctttcaaaacagaacacgaagacatg

SEQ ID NO: 1325 - DNA, 3000 bp, Unknown
  misc_feature (1)..( 3000): cDNA_ID_3061722_gDNA_ID_1620387_Annot_ID_155501 3000 nt of promoter + ATG
gtataatgcgcgtgtgggaggtagagagaggagagtatctgtacagtattagggagagagtaggagaagttgacgccattgttgccgatgatagacatgtggcggttgcgtcagcttcatcaacggctcagagtattatacatctatgggatttcggtgcactgtagcgtaccagattaataattttttttttttaacttgaagaaaaagaaactatttttctctgaaaaagcgaaaccctaaacctaggtgtatatgtagggtttctgattataaattaaattgggaaagtgacggagggaagatggtgacaggagggtgagatttacaagggagattgattctttctacagagtttgaccaaaaaagtaagttactgtttttgtctaaaaccaaacaaagtggactttttcttgttgttcttgtttttttccttgtgtttagggctctctcaattctgactttgtacgagatgtcttttttttttcttctacttgtaattcttcactttactggagtttattattttgtataatgggttttaaatacattttgtgtaaaaaatatattttacaggaggtgtagacagaaacaagatcaaaatcgaaagaatggtatagaaatatgaatcatgagatctagatgtgatttgagcatatcccaattttaggatatattggagtgaattgataagtaaaatgttcaacaagttattcataaacaataacataagaaaagagcataattggacacacccaatatacaaacaaaacggctaatctcattgaacaaacaagatgataaagagtgaaaatcaaaattttccaagtttgaaatagcgttagaagcaagttcgagaagaccaaacacacgccaattcaagaaaaagttgcactctacataaaatttgagatggtaaccatatattgtgactttaaatcatagttcaaaacttggattctcacaagaatgagtcacgttgtacctaccggtccctaaaaaaccatcacataagaacacaaacagttaggatctaaaacatgttatttagaaacgaattcgtaaggacagttctcaaagagagggaaatatcaatttgatatttatgtatatgaaattacaagatgtttgatataatgccacgtttattttgtcttttaaacagattcatgtgtttgaattttcacatctattatcttaattaagtccacaaggctttgtattggaatttgcagggacaaatcaacttatgcaaataatatgactcttgagagaccattgatgcatgtttcattattagcgaatgtgccagtcttttaagtttcaggtatgcggatttgattgtatgatttctagtgtttttcatgttttttttttgttatatataatgtctaatgggctatttctagatagagcatatacaaaatcgcaaaaacccaatccacaaacttcaatacaataaacaaagcagctcaaaactaaagccatctcaaatttacaaaccgaatttaactaaccaagattgaaaaccctaatctcaatcaaaaaacatgatcgagccgccgtccaaaactgcagattctcgctgaaataggacagccaaacgagatggtgatccaaaatttgttgccatgccgccactgtagagttgttttgagaaggaggaagagagccgatctcgtttttgttgaagagatccttgctcagtcatgaaagagagaaaatagtagggaatagaaaacagagaccttcgacgttggcttcgctttgccggatcaaatatacctcccccatcgacaaagatctcgtggaaccgccacaattttcggtctcagatctatctacttgtctctctcgttcttcgccgtagatctcccttttctactctgcatcgctacaccgcatgtggagctcttaccgttggtatcaggcggaagcttctcccctccacatctccttgattttagtcggattgctttgcctgaaaaatgcagcatgttacagatgacgaactatgagcttttgggtcctcatcttattttttttttttctcaaacaataattttcattcacttaagcctaaaaaaagggaagttcatacaaattagaactaagatagtacaagaaaatgaagatagaggcttcatgagttttgcaaagaggtgttcacttttaaaaaagtttacaaggtttgaaaaatctgttgaggctttggcggattcgaccatgaagacgggcttcgcgaaatcctcgaccaacgtgtggtcataaacggctattgcaaacaatgcatatgagcctttgaaaaggtgctccacgggagaaaataaagggtagatcataacgccgctctttgccaagctttcacagatttgcaacttatccgtatacttgaagataccttgaaggagcttggtaattggcgggtaaggaggtagagagttgaagaagcttcggtaaccaccgctccgtggagatgggatcataatggcgttcttcttcactcttttggacattgccaaaggtttgggatgatagtctcaaatagggttcgaaacaaaattaacaaatgacctcgacaaaagtatctatcaaaacagcctaaaagaactgttactctgttagcgtggagtccacgaccagccaaaacaaagttaaagggtgctataggggttgtaattgacagaaacataacaatacggatcatgggcatcaagactctaaaacacttcaaaagtggagttagcccaaagctttttgagatcagatttgtaacataaaaccaacgagctaacctatttgccaaactttgtgggagagaaaaccaaaaccaaacaatgaccatcacaactaatctcggaaggtagctactctccaaagacgagaaagaaatcaaaacgtttgggtttgctagagtgaaataaagacctaacctgggccaaacaagatgtgggcttaacctaaaaaaactgttcatgggcttcgaggacttgaaaaatg

SEQ ID NO: 1326 - DNA, 3000 bp, Unknown
  misc_feature (1)..( 3000): cDNA_ID_2133573_gDNA_ID_1620387_Annot_ID_155498 3000 nt of promoter + ATG
tcaaaaataccaaaaaagatcgattaaatgaaaataaattgttatttaggcagagccgtacttcatgtaggaaaaagacatttgtcttaggtcatacaaaaataaacaaataaaatgccacatttatttctgaattactcagtatttatttttatttagcgttttaagacttttgttttggaaagaaaactcatcaataacatttatggaaaattttgtttgtttttcctttacattaactactaaatcttgtttgtactgaaattgtttcttaaatgagcaatatatatatatatatatatatatatatatatatatatatatatattatttttcttaacattcaaaaaaaatctcaaaaatagaatgtgtgagactacaattttagaatatgtcttaagcctctattgactttggcacgatactgtataagggtttagatattggagtcaaacaaaaaaaaatcaaatcaaatatttcatccaactctaactaaataggcatgactaatgcaaacacaatttaataaaagttatagggtcatctttgtctttgcttcgttggtcatcttgagaacacggtaagatcacctcaaaatatacaattttggtcaatttcatgtattatgtctggtttcaatttgggtgtagacacaatactacaatagcgattccattacaaacactttaacgaaaaaatcaactttattttcttcaatttatttaatttaagcacatatatatatatatatatatatataaatcctggttttctatcctactatattatttgggaagtacattttaaatataaccttattttttgtaagtaattacatatgtatgccattagaaataaaattttaaagagtaaattaattcatttctttaaaaattaaaaagtcaatttaattaattaaatttaactcaaaaacgaaatacattattaatttccaaaaaagtaaccaattaaaatcaacaaattagatttgatatctaaattatcatattaattttttattaattattatagttcacctctcatctttatatgattttatttttgcaaaaaaataatatcatcgttataaaaaaataattagagtttttttcgcatatgccacaatttaaatttaaaaaaaacaaatataaactgttcaatacatgaaaaaatactataacgggtcaaaagtagatttaaaaaaaaattttactgagtactgtgttataatttgaatatttatattcaatttcatacatattattttaaaatttataattttatatactaaaataattaataacatattagattttttaatgtgtatgatgtgattcaatttttaatacaagttggaaaatcctagaattgacgggtttaaatcaatattaatacaagatggtatagtacaggtgaaactctaaaattaacaatcaaaatacaagtatataattttaaacattaaacaatataaataatatcaacaaaacatatacaactagcagtttactatacatttaaaatcaaataaaataatatcatatatttgtaatcaactttacaataaaagtttttagtttaactaaaatataagcctacctgctgtataatgcaagttaaaattataaataagcagattaccatcacgatggatgtaccttctcacatacacacctatcaaaaacttaaaacctttcaaaacctcttggtatattcaaattaggattcttcattcatagaatcattattccaagggttttgggatgtcttatgaaatgattttggcagaagaggatgtaaatttttttgaataaaaggtattcaacaaaacatatgttttattgggattttttagataattaaatcagagaatagggctgggcatatgagtaacccattcgagttcgggtagaacccgttcgggtttgggattaatgggtatatgatttactacctaatagaataattctaaatattcggttcgggtcgggtccagttgggtttgggtcagtttggataaaaagtttcaggccctaaaaatactcaaaaaaatagaaacgagtattttgtatgtagatagtgcgtctctaaacaaaaaaaacttttaaatttattaagttttaataaatttaattatatttgaatatattttactaaattttgacaaatataacaaataattttgataaacataacaaacataacaaagtatacaatgtaatttatacaaaatattaatgcccgtgctatacagcacgggttatgatctagtcctaatatattttcaaagtcaaatacaattttaaacagaacttcttacataaaaataatcagaatcataaatgtaactgggagacaaagatacataaactgataaaaagaaataagatgtacatatagaatcaaatcaatacccacttctcgtaaaacccactcatcgttatattttatacaagataagataagacttaagagtagatgttaaactatgctaatgaagcaatttaaaaacaccaaaaagaccaaacaaaaaacaaataacaatgagtaggttttaggagaagcatgtattgattcttggtatagttgagtttatttatattttcattagccaatcactttttctaatttaactaaaaatgttataataccttccccacctagatgatgagataatcatggacccaaaaacctcagtttttaaaaatgtttattcaccaaaagacaaaaacaataataataatcaaaagtagagtaaaagaagagagaagtgacattctttttctttagctcataatttctctaacaaatgcttcttttatccaaactctgatcattgagtccagttgggtaatgagagacaccagctgggtttcttttgtttaagctcacaaacatctaaaacagagaaagctttgtcatttttctttaccctgaaaccatgaaagaagataaagctttgtcctttttctcttttccgtttctttactctcaacaatg

SEQ ID NO: 1327 - DNA, 3000 bp, Unknown
  misc_feature (1)..( 3000): cDNA_ID_3061732_gDNA_ID_1620387_Annot_ID_155493 3000 nt of promoter + ATG
tgtgaagatatgtctaaggtttgtgttatcattgctgcaggtgctcctgtacattgcttttgctttggtactgatatttcctttcgatattttctacttgtcaagtcgatattttctgctgagaacattatggaggatagcttttccactgcaggtaaagtgatagacagctgttgattaaaattaaacttgcaattggcgaatttctaggttttgcttaatagctggtttataagtgttatgcttgatcagtgacgtttgtgtttgttcaaactcttacattactttggtatctttgtataaattcattcatttaggcataaatatctgatcctgtttcttttgtttcacagccaattacatttccagacttctttttggcagatattctgacctccatggtaaaggtattaaatttcaaccagttctctgagagatcttcctaacttctaataattatgtggttaggaatatattgatagcaggaggcttagtataacttgtgccttttttattggccaactactgctctttagcattttattttgtgctgataactataatgccgctgatacttgattctcattcaagatttgacatcggtaactatatgcaggtcttttccgacttagagcggtccgtttgccggatggtgcatagacaggtaattgattcatttttttgtgacatccaatgtagattagaaatatcttatgctggaggaactagttccatttatttcctttgatctctggaatatatggatagctctgtagctaccaaaatttatcctccaagactgaaaaacagcgggatatgatttatttagccaaattttcgctatcctagttttgctgatgaaccaatggaaatcctggttgtctgtctaacatgcacgggtctcataccgtgttgtctgttgtgaaatgatggaatatatgagattaaaatggactttcaggtcgctacaattgcttggtttgaagctgacgctgtctgtggcagtcatcaaattgcaatcccattggttcttgttttcccctacatttgccgtcttttgcaatgtcttcgacaatacaaagatacaaaggaaaaatcatctctattaaatggtaaaagcctaaccttctagcattaatgttaaattttcccacactatgaagaaagatgttcttttcctaccatcaatcttatagttgatctgtgattttttcagctctgaagtattctacagcagtacccgtgatcttcctttctgcgcttaaatatcacgtgatgcccgagagctggacatcattttaccgaccgctctggcttttctcaagtgtcatcaactcactgtactctttctactgggatgtaactcgggattgggacttgaggtaataggttgaaactgcatcttcctatccactaagcagtatttgcatatcataatcacataacttctctctgttgtgcagcggtttcactaagatattcaagtttagccgtccaagtaccatatcaaacttattatatggccgacaatgggtgagattcagtttccaatgaaaccgccatagtgttttcttcgtattgtgatgtctgaacctgtcaagtattgttgcaggtatatttctgggtgatagggagcaatctggtgctaagatgcgcgtggacatacaaattatcagcacatttgaggcacaactacataacggtgttcacaatgacagcgatggagatgttgagacgatttcaatgggtatttttcagagtagagaatgagtggaacaagatcactaaatcacatccaatgggtgagatttcacttgaagaagataaactacttggttctactacacctcatgatgtttagcatccaactatttttgtttatttcctctaatcctatgcaaaattctggttttcctattcggactctagacacttttagattatacacaatttttcatgaattgaaccaaatttaatgaatgacatattaataggaaaaaatattttcatactgtttaactgagacatcagattatatacggagatctgctataattaacctacaaatttttgtaaaattacctaacaaaaaaataatatagaccttctaagaacattttccccccatatatggtgttaaatttaataattctaagaagaagaaaaatctgagaattagggattgaagtttaatttagggatttatttgtcgttttggtcacaaacatagagccgataacggaggataacgtcggctaatgggtctgttaaacgatttaacgacattggacctgctcaacggaaagatcatgttttaaatattggtcaacgataagttgatgttttaaatgggttactatgaagttgacttattgaatgaccactttttgaaagttaagggattaaacaacatttttctctcattttagaatgtgtgtacaacatttatatcaaatttaaaaataataatattgaattttaacagtaaatgaatgttctcatttttcacatttcattctctatttttattatttttacactcatcctcactttcctctccctgtctcataatcccaataattatgttacgatatttttactctataatttgagttttgcattattgttcggttgttaaataaagtggatgggtttaagtgcttaatcacactttttaatataataggctgttacacctaatcgtgagagtaaataattgaaggcgaacaatggaatttatccctaccaccatttgttattaaacaaaaatattataaaattatatgtaaagaaaataaaatatagctagatattgataaagagagtagcactaataatgaaaagcaaattccaagttgcccacttgcaaatcaatctttcacacaaataaaaacaaagcccataacgtttcctctcttcaaagtgcctatatcatcaacacaagaaacaaccaaaagagactaaactaaactcctaaaactcaagatcaaagacaaagag

SEQ ID NO: 1328 - DNA, 3000 bp, Unknown
  misc_feature (1)..( 3000): cDNA_ID_2133537_gDNA_ID_1620387_Annot_ID_155487 3000 nt of promoter + ATG
gattatagaatccgttgtaattaccattctctagaattaatatttctttgtaaacactatatattcctctatacattttaagggtgattggattagacttttaaaacttacgaagtttttgaatgttttcaatgcttttttcaatcaatttattttgtctttcatatattttaaagcttttgaagtttcttttttattttttactcctgttttcatatatttttataagtggggtatatgtgaccttagaaataaataaataaaaagcttatactagttttcttcttttcttcttcccaatatttatataaactctcataacattcacaaataaattaatttttgaaaaattttaattgatttgtaaccgatttttttttgttcttttaagatccattttcccatatatttgatagttatttaaaatcgtaatttttatagtcacaatctttaccaagagtataaaatttatgcagttaaagtctttatagcaaaagtttctacagcgaaagttcttaccgtcaaaatctttacaacaacaattaacagtcgttatcaatcctcccctctattggtaatatacaattaattatcattctctagagagaatagccaaaaaaaactcaaagatagaagagaagagacatgatagaacatagagaaaagatggtggtcaagaagaaaaggaaagaaaagagacaaggagaggaaacatcggagaaaactaagagaaggaagctcgacgatcaaaaacttcaaaaaatagctaaaaaaaatagttaaaattttctattttaaaaactctttgcttttttcaggtttctcgaaatttgtatctgagagagtcccttacctacgcttttgagagagtctagttatttttttccattttaaacatttaggtgctatattcttacaccccacattcaagcattcgatttcaaaatccaatctacgttaagtaatattatatgtcagttcaaatccattaaaaactcaaatccaataacgtcctcttagcaacatttgtatgtgggttattcacataaagcgtctttattaacagatagaatatccttaaatattagtttgaaatactatggatattcttcatgtatctagaagaatcccataacatattgtatctagaagactttcaatatctttcacggtattagagcgcagctctttctaaatcgcttcttttctgattaaatctttttcttttctctttctcgtcctctattctcttcctgttttctccaaattctttcaatggccgacgcagtcaatccctctaacaagatctatggagtctctaacatcaagtctcacatctctgtgatttttgatattgaaaaaaaacaactaagatacgtggagagaactttttctcacccactgtctcagctttgacgttctcggacacatcgacgacactctcctcccagccgatgacaatgatctcgtgtggcagaaacgtgatgggattgtaaagctttggcttcatggtaccctcaccccaaagcagtttcaaggctcattcatttccggatcgacgtcacgtgatatctggttatagatttttgttaaataagccaaattattcagactgttaaatggtttgattaaaccgataatttttccgttagataacttaacaattcagcgatgtaacttatttagtaaaatcaacaaaaaaaattaggttgaattacattgattttgtttcttttatttaagaaggagtgaacccaagaattgttcttttaatatattattagtaattgaactgaaaatgttgaatttctaaacaataataagaaggagataatatacaataaaattagaaatttaattcaattgagatcaaaaagttcgtttacatctgagtttcctgctttttgatggatattttttcttatggttttgatccgatcaaaaaccttattatatttcatatgaatttgtaagttcattcggaccatcaatcctgttcacgaacaaatcaagtttgaccatcgatgacgactttcattccggcattagtccatggaattgttttcttttctttttaacaaaatcagtaattatattagttattattttaaaaatttagcacattatattgagatatcgaaacgctataaatcttttttggtcaacatttggaccacaactggccgacccattagccaattcactacaaattgtagggagcgggacttgatctctagtgtgatggtgcctgtcttcagtggacttatctctattaatcccgaaataaataaacctcataataaatttttttatgaaagcctaccatagttaatttatggcactctacgcgtgcttgattattttttgttttctttaggatatttcatatttcccatataatataaaaatattaaaaaaatcatcaaactaaattagttatggtttttttaactaattaccaaattagttatggctacacgaatgagttccacaaaaaatgtttggatttgtagcttaccagattatgttgtcggtttggttagagatagagcattgcatctaacctgtgttttttttgtggcttttcccattaaaaagaaaacgatatgtctcgagagagttgcctttaattaattcaattcctctgctttcatatacagtactacaaaagcctaaccacatgcatttcctatatattgcctcttcgagaacaaaatgttattcactccaaatacaaaggaaaacagaaacgtagccaaaaaaaaaaaaaaaagaagacaatgataaagtctatcttactatgtttcttcttccttttccctctccttttaaccctctttaagaagcttttaccttcgaaatggaagcttcctcccggacctacaggtcttccgatcatcggaaacttgcaccaagcttggaagattgcttcatagttcttttcacaagctctctttagaacatggaccagtgatgcttctccgtttcggggtcgtcccg

SEQ ID NO: 1329 - DNA, 3000 bp, Unknown
  misc_feature (1)..( 3000): cDNA_ID_2133515_gDNA_ID_1620387_Annot_ID_155482 3000 nt of promoter + ATG
gaagaaagatgtttccgcctctggattaacagtcttggcacagccacttatgtcaataatgtttttgaggatcttaggaatgggtgagctatggagttttgtttgaggacgttttatttttgtatctgctttaatctaaacctcattttattcaggtgggttcttcttgaagttctcgacaaagtttcacctggctcggtcaactggaaacacgcaaataaacctcccataaaaatgccattcaaaaaggttgagaactgcaatgaagttataaagattgggaaggaactgcgcttttcccttgtcaatgtagctgggaatgacattgtgcaaggaaataagaaacttcttctcggtgagttctcctaaaagtcacactgataagattatgcaatttcatataacagactcacataactgttagtattgttttgttctgtcttttctcttcttgaaagatgcatctgctatagtaagttcattctaattggtagcagtatataatttcttgtaccatcattgattctgcagcatttttgtggcaactaatgagatatacaatgctccaacttctgaggaacttgagatcacactcgcaaggtaaagaaattacagatgcagatattcttaactgggcgaataggaaagtgaagagaggtggccgaactagtcaggctgatagcttcagggtaagtgttaaccaagtacggatgtgattcatggagactcatcttcagaaacctaatagtttgatggttgcttttttctgatattaggacaagaatctgtctagtggaatgttctttctggaacttcttagtgcggtagagccaagagttgtcaactggagcctcgttaccaatggagaaacaggtaaaaactatgatgttacaacttcattgctgggtccttattctccggtgttaagtcatatttttgattgtctgtaccgtttttgtttgtttgtaattggcacttaaacagaggaggataagaagttgaatgccacatacatcatcagtgttgcacgaaagcttggatgttccatattcttgttgcctgaagatatcatagaggtagagacatatatatggtattgaaacagacttgagtgcttcttcggtttttctgagtcagtaaacttgtgtggtggatacaggtgaaccagaagatgatgcttatcttggcagccagcatcatgtactggagcctccaacaacaatcagacacagagtctactgtctcagaagacgccactgatgatggcgacgcaaactctgtagcgggtgaaatctccaatttgtccattgatggagcttccgagtccagtcccactgtccaagatcaagaattgctgacgaaggcagacaatgatgaggatgaggttgatggtgagaataataaagatgcatgacgcgtttgaatgtttattttgatcgttgttttttggtttattgcgtgaagttttgattggcacaaaggaaacacaaagaaagaagaacaaggtttgatatgtatacaaacaaagagggttttggtacacaagttttacattgtgtacgtaaacctcatttttgaattgttaaagttctactttattttattttgtttattggaccttttttttttcatttccaatttcatttttgtttatcaccggtctaaactcgaaattgtataattgtttaggcagaaaacaataacatttagtttacaatgtgtacacacaatatagaatttttatataaaaaaattgcaattgttcaaattgtcataatctcgaatttttttcattagttcattcttttatcttcataaacataatgtttagctatatttctctaaggcttattattattttggtcgaattctctttcggactaatttaatttacccaccaaatatttttatttttttttgagaactacaaattttgtgacattagctatatagtttaggccaccaaatttacctttatttactcatattatattttatacgaatttaccacattactgaaaggcttaaagcttctattatttgaaataagaaaaatagtaaatatagaaaatacaatgctgcttcatacttctccaaatctgttcataacacataataacaaaaacaataatgataaatattaatacttaaaaagagtcataatattgtatatgatacatacatataagcatcacaaaaagcagctctatgagccatattaaaattttaaatgaagattaagcttgcgataaacttactttgatattcgacagaaacacaactgattttgcagaaatatcattttggtggatttggttttgattctagacatttattgccacatttttcaggacatttttttttgtttagaaagattggattaagaaggcacagtgcaaagcatgtagtatagcaaataggaaaagttggttttacagtgattggagtagttgctatttcccttgattcaaccattagggttccaatcatcaacatcaccaccacaaatacacccattcttttgttctccattttatatgagtacaaatagttcttccttttttttttttcttgagaggatgaaatattatagaaggttatggaaaatgtttgtttattgtgaatgttattggagtacaatatgacttacttatatagagattgtggtatttaatttatattaggttagaatattcttaatcaacaacaaatttgtttagttttttggttaaatgagttgtcattgatttaatagggtttataaaagctactaattaataaccaaagagaatcaaagctgaacctttttgtataaaaacatgtgtttttctcttctgaatgtgaatgttagtgatattactaaggcatgcatgctttagatagagttacctttttttgtatgatttagatagagttacttcatatagagattgtgtaattttgtgtattagttatgaatttaatattctcatatttcaccaacaaatcagctgcaacatg

SEQ ID NO: 1330 - DNA, 3000 bp, Unknown
  misc_feature (1)..( 3000): cDNA_ID_2133523_gDNA_ID_1620387_Annot_ID_155484 3000 nt of promoter + ATG
tggatttgaactgacatataatattacttaacgtagattggattttgaaatcgaatgcttgaatgtggggtgtaagaatatagcacctaaatgtttaaaatggaaaaaaataactagactctctcaaaagcgtaggtaagggactctctcagatacaaatttcgagaaacctgaaaaaagcaaagagtttttaaaatagaaaattttaactattttttttagctattttttgaagtttttgatcgtcgagcttccttctcttagttttctccgatgtttcctctccttgtctcttttctttccttttcttcttgaccaccatcttttctctatgttctatcatgtctcttctcttctatctttgagttttttttggctattctctctagagaatgataattaattgtatattaccaatagaggggaggattgataacgactgttaattgttgttgtaaagattttgacggtaagaactttcgctgtagaaacttttgctataaagactttaactgcataaattttatactcttggtaaagattgtgactataaaaattacgattttaaataactatcaaatatatgggaaaatggatcttaaaagaacaaaaaaaaatcggttacaaatcaattaaaatttttcaaaaattaatttatttgtgaatgttatgagagtttatataaatattgggaagaagaaaagaagaaaactagtataagctttttatttatttatttctaaggtcacatataccccacttataaaaatatatgaaaacaggagtaaaaaataaaaaagaaacttcaaaagctttaaaatatatgaaagacaaaataaattgattgaaaaaagcattgaaaacattcaaaaacttcgtaagttttaaaagtctaatccaatcacccttaaaatgtatagaggaatatatagtgtttacaaagaaatattaattctagagaatggtaattacaacggattctataatcgaatcaataaaacattctaatcataatggaggatctttgaatattcttgacaccccccctcaagatggaggtgcaagggcaacgccaatattgtctcgaaagttaaggaatcttgctcttggtaacggtttagttaatgcgtcaacaagatgatcgttggtgttgtcatgaacaacgcgcaaaactccattctgaatctgccctcgaataaaatggtagtctacatccgagaatccatgtagagttagctcattctttgctgcaaagaagataccatgagtagtactcccgaccaagtaacagagaacccgtttggcagattgaagatgatcagttgtaggtttgtgcataaattatgagagatgagagttttggcaatatttggaacacattaagcattgtttaaagtcaggtttcgagtagtagagggtagggaaagtgaccagtatgcgtaattggaatacccgaaccatctccgatgagaacagattcatcagcaaagtaaggatgatgcaaggctaggttgtgaagatcactgtttaagcgatgtgttgcgccattgtctagaagccacatattggtggatgcggggatattgcagcgagatttgctcgtgagtgccacagacagaaaggtgacgggagtagacattgttgtgggttggtttgttgctgatgaagttgaggacatcgtttggcgatgtgaccaaacacgccacacaattgacactttctttggtagccctttgtcattcagttgtcagatttgagctgataggtttgttgatttttaccattctaagtctgtttttgagtaaagcgttgtttatcttggtgcgatttttggttttgtgtacgcgagacgtagtttgccgagatcagagcaacacttggcaaagaggaggaggctgcctataattctaacattaacatctacaaaattagtttatgacgcgtttataattcaaaactaacaaatgattatttaaaaattgtgaatgatacattattgagaatattattaaaaaaagctgtaacactaaaagtagtactcattaaatgagtggatgattaaatatttcaaatttatatatataaaaatatattataaaaaaataaaattgcagcatagcaaaaatgatggtctaatattattaatattaaagtttaagttatttataattatctttaactatattatttatatttatgtttattttatattaaaatagttagattaatatcatcctttatatagttatataaaagaatataatgtataagtttagttttacgagaatttattcgaatttttcttaaacaccaatgtgtttttacaacgattaaatctaattatttcaacaatttgttcaatgttaataattattttttatctttcttatattcttttaacgatgaaatctttcaacgattatcaatgttatcaatcgttgaaagatttcatttttatctttcttgtaatttcaacgatttgttcaatgttaataagaaagataaaaatgattaaaattaaataacaaaattaaataaatgccaaatagaaaccctcaccttcttctctctctgtcaaatcattccatttcatcgcaggtcgtgcgctcgaaaaactcaacacgaaattcattatttcgaaacagatctctttttaagcttcaaagatcaaaactttatcctgataaagagaatatgaacacgaaccacattcaatctctcaatctgctctaaggtctattatcatcttttcaatatttcgattctgatcatctcttttttcttcttcccattacatcggatcgatgcatcaacgccataattatctcaaaatcgtttctttgcgtgtttgtttatcgaattgccatttttgatcttgtgggtcaaaaagtttggtcttttttcttacaaattttctggttcctgtttgattaaagacatttttatgttgcagggatttgttttgtcttgattctgcggagaaatcgattagaaaaaatg

SEQ ID NO: 1331 - DNA, 3000 bp, Unknown
  misc_feature (1)..( 3000): cDNA_ID_2134315_gDNA_ID_1620388_Annot_ID_155512 3000 nt of promoter + ATG
catttcattcgccaaaaatataaaatccaaaagtgtcacaacaaatgtcaaatacaataaacggtggtatttaagaagaaaaataaatctaaaaatgagtcacatttgaaataacattttgtttatataaatggcctcactcccatcaatcggtttctttctctctttatttcatcctctttgtttacttttgaagaatgttcaattctttcatcattctcttgtagaaacttttataattattttacttttcttttctactttattttgtttacgtctcgtgtacttccagatttaacaatttcctctaaattcatgtattttacatatacaagcaaaattgagtattattgctctgttacaaattttgaataccgaggaattctacattttattttgcttttttttttttttaacaacaggaattctactttaagtataactcagttcatacaaaacccacagaaaaatgaaaaattgaaggatgttcattcaataatagatattctaaagtcagaaacctacaatttgaagtataatatttttaaatctcttaagtcagaatttttgtttatgacatcaacaaaaaaatattctaaatctctaatacactcatacatatattgcaaaatataatttcttgatcacatttcatgtaatagaaattcagttgggggtaaaaccgtcatttgagaaaaggctaaacataccatactgttgttgcgaaaaagacacgcgtggccaaaaaacactaacaaaagagaaatgtaacgacgcatgcctctatacattttcttttcattattgcactctacttgttgttttttaaaacatcccaaaatttttaggatcgttgatcgtttataggacgagtttgtaaaacgtataatcgttctaattgagatattatcggttcttccactacatcacgtagaaaaagaagttgattttggacttctaattaaccacacttacaaagtgattatattcgaaccaatgcagttgcaaactatgatgcaacgggtaaagaattaacgatatataatagaaatgaatgtgtgtgatttcaaaatatagtatagcattaagctcactcacgtacgtacggagtctttaagatatgtatgcataagcgataatttaggtgattagttgggaaataatgaattcctttttggaactttatggatcatcgaataaatgtgagatatttaattcacccaaccttaatgatgaaaagtgaatctataatggcaagcaaccatcatgatacaaaccttatatgcccttaagtcaatttctacagctataactttatatatatagcattgacaaaagataatttatttttttcattgtgttactgtgtttttagtaaagaaaagaaaaaatatcataagaaatagacatcgtgaccccaaaaaaaatacgtataagcaaaaggcatagcttggatttcctagtagtatcaaataaataaatgagacaaaatatttctagtagaacgggattacgggaccatgtgtttgagatattttatgaaaatcaatagaaatagtaaatagaaaaatatgagaatataacttgtgttcataatatgatgatgtatatacaagattaacatgtaaattaaagaatgaagagacctagctcgacacattatttttagtagagcagaaccaggtgattgagataattcatgttcataattatgaattcacgagtaaataaactcgtaaatatcaagaatgtaagaaaaacgattttttttttcttcttcttatagtagtctaatagttgaaagatttatcatgtaagcgtagaatttaatgttgaaattatctcactacgatttgaatcatgctgagaattaagctaatgcttaggatggaatgttgtagtctatcgtataaaataactttattttagactacgataaaattaaaatcataaaactctcaactccaatcctaatctaatcaagtttttctaaggttggtagacaatagtagattttcagtgatcgtaagtattacttggcatatatataaacgaactgaaaaataagtcccaatgtaatatcatttcactaaaagtaataaagagatgcacgcgtatatatctatacgtatgaatggtctgatgaaaggataaaaaaagaatggtgtaataaatttgttataaaatcttgaatcttttaggcgcgagattgttgttcgaaaaaaaaaaaccgtaattcatatatatgtaaaaacttatatacgcacacatatatgtagtgggcatgagagttagtggagagacagaggattttagctttattggatcctgtgagtgactgggataaatacagtccactttcgcttattgtgtatctatgtacttgtacatctgcatgcgtatacattccattgaacattcaatttgtatgcaaaaggttttttaaaaagaataccatagtggaaaaaaaagaattttaatgaggagaagaaattaaaggacaaagaaaagatactagcaaatctaattaatcggtttttaatatgagtggcattgtgtgatttggtttctgattttacccaatacttgtatgatggcaaaacaaaaacaaaatctacaattatagtatatacgttttattttggttcataattaataaaggtaacaaacagaaaaaagtactagtatacgaagtacagtaatttgaaaaaagtaagaaaagtaaaagaagagtggaaaatggattgagttttttttttctctttgcttttgttttcttccccacacaaaaaccataatgccttaaccaacaaaagccagaccattagacgcactccacaatcatcaccttcatcatgacttcttcttctcttctcttcttccatcttcttcttcttcaaacccttaaatccaccattgtcaacactaacacctttctcaacaatatcaccacacttcctcaaacaacttcactttaatttctttctaaaagctacgatg

SEQ ID NO: 1332 - DNA, 3000 bp, Unknown
  misc_feature (1)..( 3000): cDNA_ID_2134337_gDNA_ID_1620388_Annot_ID_155519 3000 nt of promoter + ATG
ctaacttttgggtactgatttatgtatttctatgctcaaatgccaaatcatctaaattcgtatttaaacctgcttagggacttgacaattctcatagcacaaactgttttttttatgaatgtgggttggtttcaggtagctgatgcggaattggtgaaatctgacaagtttccggtagtggtgagtacttggcctttccttgaagctgttagagctgcttggagagcagttgataatgggagctctgcagtggaagctgttgttgaaggttgttctgcttgtgaagaacttcgttgtgacggtacaggtcggctttttggtccgataatttgaatttacttctttaatgttactacttctgaaagtgagagttttctttgttggtattgatagttgggcctggaggaagtccggatgagaatggtgagaccatgattgatgctttagtcatggatggggtaacaaatcatcagtaccctccgttttataaagccccatttgcattaagatcttgaagaatgactcttcatttgggttattctaaggacattcttaggtgactatggaggttggagctgttgctgcaatgcggtatgttaaagacggtataagagctgcacatctagtgatgaaatactctcaacacacgttgcttgccggagaaggagcatcagcatttgcaatctccatgggtctccccggacccatgaacctaagctcccctgaatctgtaaagaagtggtcggactggaaagagaatcagtgtcaacccaatttcaggaagaatgtagtccccgcaaatgactgtggaccttacaagccaaacaatagtgctatgaatgtttttgtagacaaaagcactgaatcttgcgagatgggggcgattgagtataaacctcctcttgttggtcctcacaatcacgatacgatatcgatggctgtcattgacagagtaagatgggtttagttatattctctatacatttttgttgcaaggacgagagaaactgagtgtgctctttcaatagatggggcatatagctgttgggacatcgaccaatggagccacatataaaattcctggaaggtaatgccattaaaaccgagcattatctctgacctaaaccgaacctatctatctcacatgcctcctgaatcctgattgttcaaaatgtgcaaggaatatgctcaaaatggatttccatgtgttatcaatatagattacttaatccatatttcatgtaaagatttaaaaaactttcaaaccttgattgttaaaaacagggttggtgatgggcctatcgtcggttcatcagcctacgctgatgatgaagtaggtggatgtggtgcaactggagatggtgacaccatgatgcgcttcctcccttggtaattacccaatctccttgaacaattttgtgttttgtttctatctcaatgcattctaccgacctagacaggtctttctcagtggtcaccaatgaatcttgccttatttttgcggcgctaaaattgaatattgagcatgtaaaagtgaaagggttattatgttttatcatgtgttaaagcaaacttcttcttcttggttggggttttagttaccaagttgtggagagcatgagacaaggaatgaaaccagaagaagctgctaaagatgcaatctcgagaatcgcaaggaagtttccagatttcgtgggagcagttgtggctgttgacaagaacggatctcacgcaggagcttgctatggctggacgtttcagtactcagtccaaaaccctgacatgaacgatgttcaagtctttacagttcttccatgaaacaggtaaattatatctactattagtcctatagaattagtaatttattttgttggcatcaaatatagactacttatgtacttatcttatcaagttaaatctcttgaaatttggttataggatcataggattgaaggtgtctaaaagtgattgtagtaacaacaatgaaacggcaagaagttcatgtctggaaatacggaatggcaagctcgtttggagtattctaaaatattgttttgcttttataaaaaaaaaggattttcggatttgtctgaattgatcagacaaagagactagatgatttttttttttttctgtaaacatgaacatagttgactttctgtaattttagtgattgagaatataacagtttttttgtgaaaacacgagcacataaaattaggagaattccttggtatatcctcgacgactctatatctagctatttaattattaaagaatgataggaaaaatataatatacaaagttatataacttttgtttctattattataaagtttagtaagaaaattgtataaaagagaagacgtgacaaaaacgaggagcaagtcatgcagccaactaaatcctaagtttagacataatttcaagcttcatcctaaatatgtaatcatatgctaacagtgaatcaaagcgaaaacaattctcaagcctttattgaatatttatttgtttgacttcgttttttaaagcgaaaactgcaacctgagggatatacctacgtagatcctaaagaaataaaacagagaaagtctgtattattgtttcaatgtatgaagaaaaagtattaaaattttatcaaagaaaagaaaaaaataaaatgatttagtgagctgactatgtatataatgaggttgtggcggcaacaacgtgcttgcttgtgtcctaatccttctctctccgtcaataatttcatctcaagaaaatgtcctaagatcaccaaaccaaaccaaacttagggttcttctttgttctctgcttcaacagaactacagggtaagctctgttatgtctgaagctccattagtctgttatatttacatctaaattcttctcaattagccctcaaaaactccatctcagactcttatttctgcaaattttacatttccatcttcttgcaggagtttgaaactctgtttttaagtttcagattaaaca

SEQ ID NO: 1333 - DNA, 3000 bp, Unknown
  misc_feature (1)..( 3000): cDNA_ID_2134354_gDNA_ID_1620388_Annot_ID_155523 3000 nt of promoter + ATG
ataccagtaggtcataaacttatacaattggttgagaacttggcaggggaataaaaacacacaagttttcaataatagcgaacaaaaacaactcataagtccacattgatacaactaattaaaacatgtttcagatctctctatatcatttacttcatctccatcacataccatctacacatctctctgtatctctactgtaaacaaataaagtttcaattattcatacactttttcttattccattttgtattctcacacctaaagattccaactttaaatctcttgcttaatactcaaaatccaatttccttgtctacaaaagaaaaaccaaaaaatccaacactattccatgagatgagaaaatcccatttggtaaaactgatacttgcagtatctctaccaacaacattcttgatcatgatcgccatcatcataatcttcatcttctgtagaagaacaacaacagagaccaatgaagttcaatacgacgtcgaatctccttacgagaaacaagaattttccgataacggatccgaaacagaggaggagcttatcatcttcaacggtggagaagatctaacgatctgcgatatactcgatgctccaggagaagtcatcggaaaatcaagctacggtacattatacaaagcgacgttacaaagaagtgggaaagttagagttcttaggttccttcgacctttatgtgctgtgaattcagattctaaggagtttaatggcgtcattgagtcacttgggtttgttcgacatgataatctcgttcctctgttagggttttacgttggcaacagaggagagaagcttatgattcatcccttcttcggtagttccgggaatctttctgcgttcatcaaatgtaagtctctgttttctactctgttttttttctctcgagaaaatgcgaggaagctgaaaaagattaaaaggaacaaacttttttaattttcggaccaaaagagatgtcttgagttctctttttagctgtcttgattcgtggaatctcctagattcttgttttctgggaaacaaacagagtcttgagttctcgttttcccgggtaaatggtaaaaagtttttaacgcacttatcgttacctatataagatgtctctgtttttgaaatatctatatcgaagatttcttcgtcagatggaatcatattggtaactgtagtcgatccataagaaatcgtcttatcttttacattttcataaatcgtaacatggaattgtttttttttatctctgacaaacaaaaaagtaagtttgtttattttgttctaggatcaccattattgatctaacttttgtcggtaactacttttttttgtcacttcccacttagtttgctcattatataagacaaaatctttatagatctcgttcctttaaaatctgtagagcatcaacatcagcattaatttttctaatcaatattcaataggttgtcttaaaaacagagcatagttttggcaggtggagatgttgacgcacacaaatggagcaacattttgagtatcaccattggaatagcaaaagctcttgatcatctccatacaggaatgcagaaaccgattgttcacggaaatctgaagtcgaaaaatgttctactagacaagagttttaggcctagagtctctgatttcggcttgcatttgcttttgaaccttgcagctgggcaagaggttctagaagcttcagctgcagagggttacaaagcgcctgagttgatcaagatgaaggaagtaagcaaggagagtgatgtatatagtttcggtgtgatcatgcttgagttagtctctggtaaagagccgacaaacaagaatccaacgggatctgtacttgatcgtaataggttgtcggatttgtaccgtcctgagattattaggagatgtctgaaggatggaaatggtgtgaccgaagagtgtgtcctcgagtactttcagcttgcaatgtcttgttgctctccatcgcctactcttaggccgagcttcaagcaagtattgaggaagcttgaagagatcaggaaatgatgcattagcaaacttgactaatttgtggaagagacataggaagagaaagattcaaacaatcagaaacctttttgcaagattgattcaatgcgtagggcggataagagagtcttcataggatgatacaatacatataacaagttctagcttgtggaagttcacagagaagtagttagtctgattatctacagaagtaactgaagatggatcaaggttttgcttaggaaggacttttagaacagagttattggagaataactgagaaaagagccaacaagagactcgaagaactttgtaaggcctctagtaatcatagaacatcatctttttgaatgtaaattgtctttgcagttgtatctttatagccttgctcggtctgtgcagatatgattcttgagttgtatacctgaaatctccaagaggctctctctctctttctttctctatatatatatggttcttgttcttgaaggagaactttgcagttttaagcaaagtatcatgaactaatcttgtggtgtttgttataaccacagattctacactttttacgctgcacttttctccatcaatacattcagtgttttgtatatattatccttctggggatggtattgatccccagagcaaaacttgtggattttcccgggaaaatattcaacaacaactaccgaactaaaacacactgaaaaaagtaccagatttaaacggcacggagtgttataattcttattacgaacgtcatggtgttatactccttctttttcaaatcggtttattcttttttccgttaagtttgatttgaaccggaattgatcggtttaatccggattgaacaagcctagtcttcttcgttttggtgatctctctctctcctatgaattgaattccacagagagattctaaaaatctttcaatcccacagattcggatttgtactccatactc

SEQ ID NO: 1334 - DNA, 3000 bp, Unknown
  misc_feature (1)..( 3000): cDNA_ID_2134378_gDNA_ID_1620388_Annot_ID_155529 3000 nt of promoter + ATG
taatttgttgtgtttgagaaagaatatacaataatagtaacttaagatttggtttttccttggggttaagttggtttacctgccaaactagcccttaagttttcatcacattcgtatttctcttaagctttacaagaatttctattagtctgaatataaatatagatgtcaggatatcttaacatttcgcaccaaaaaaaaagatatcttaacaaagtactgaagaaaatatatagtataataattgaagtgaaatcatacaattgagttagaaactagctagcaaaaattactttaaattattgcaattagtaattgttttattttagatgtttcatgaaacatattttttctttttccacgaaatttcttttagttgacgttcgtgaatcatcactttatttggaacaagataatagtattttttgcttgaagtcttaacatgcagtttattaaattcgccaaaaaacacctaccattataaaactttatcgtatattaatagaattgtccatagttagcatttaattaactttatgttcgacgaatgggacgaaaccgatgaactctcaatcataagttagcatttaattaacgaaaatgcgactgagagaaagccacgtaagagagttgcgaggctgaacttaaaattcgtgctattcacgttagagagataatgaacaacacgttgtcaacattctatttaagcagatttttgttatcacaagatctctctcgcttctgtctttttcacttgcttgacttccccttccattatcttttcttctgtactttgtatgaacggtgcttattttacttaccttattcatattagttgagaccacattaatttaaaacccaaaaagaaaaacatacaattccaaaatttggagtataatctcctcgtccaatagttggctgatagcttaaaaggttatccaccctaacgcaatgttcaaaattttgcctatttccgttttgatttgtttggatgaagaatgttttctatcatttttaatttgattttccaaattagagttcactttggtttggatcaatttaaccctttaagttagagcctagtacactaactaaaactgatgctgagtaaaagacactaaaaaatcattttacgttttactcaaactagttttgatgaatcttacaagaacaaattcaatcgagaacatccaaacaatactatatacctaaaggattgaacacttaaaaagttttatgaacaagaacaagttacataagtagcctcggcttctttatttttcaacgataattgctataatctatcatagataagtggaagcatcctctgctttcggttagaagcaaggcttttacccgtagcagcggattgggtcgttgcagcctttttccgttgattgcttaagaccaaacctccctcctttagacaagtattgctggtgatgttcctcagctctataaaatttcttagccggtaagatctctgtcacaaccttcctgtcaacttgttgctggtgccgctccagtgactcgcgtgctagtttctcttgctccgggttgtagaaatatatccctgaacggtattgggttcccacatcatttccctgatcagataaggatgtactcattaaaacagagaaacaaattcgaacataatgcacgacaagcagataaactaccaaataaatagtgattctgcataagagctggttaagtgctctctaagaaactaccaaaatacacataaggatggttcagtgaccaaagatgacaagaacgatagccaaattcacatccttatcaaagagaagatgtatgagtctctctgttcagtttcaaacataaaacctaaattttgtaccaacagaacatgaaatgaatccaaagtattacatcatccaaaccctagatttcaatctatttagagctcaatatttcaagcaagccctagaaaccctagaaatcttcctcaatcaccaaaatcaaaacttaaaactcacaaaatcagacattctaaagagcaaaactttcgttacctgccgattcaaagtggtgggatcatgcttagaccagaacaaatcaagcagcgactggtaactacactcttttggatcatattgaacacgaacaatctcggcatgattcgtggtacctgaacaaacatctttgtaagaaggatcgtgagtgatcccttgagaataaccaacctctgtttgagtcactcctggaactctctggtacgctaattccacgctccagaaacaaccggcgccgaattgagtaaactggtttcccggcgccggagcttcgtcgtcgattacttgtgcgattggagaaggatccatgttggtttgtctacttgatcctatacctagcttgttaagtatgttcatggagaaattttgtagagagagcgaaacagagaaacagaggaaagtggtgaagaggaaacgtcggctgattctgcggaacattttgtaccaaattctgacaggtataaaattcgcgtttgcgtttacgttttgaataacgataaaaataattttagaaaccagttttggttgacatttcattcaagcagttcaaattgacaatctttaaaatcttttttttttttttttttttaatctttaaaatcttaaaactaagattagttagtttcaagcatgatcaaatcatatgtttataaaatgtcacagaaatagaagaagaaaacaaagaatctaaagaaatggttgtttttgtcactctcaaatggaaaaatgagtgattagattgaacgatttgacaaagtccttatttcgatccaaatgtaccaaaaccataggctctaaattcgcaattcaatccggattcttttttcttctaagaaataaaaaactgtgactaaaatgtaacaaagaaactgattaagctcaaaaaccatcaacatcctaaaaacgtaatttctatagagtttttggaacacacctatcaaaaccaaaaatacttatcaaaatg

SEQ ID NO: 1335 - DNA, 1080 bp, Unknown
  misc_feature (1)..( 1080): cDNA_ID_2134401_gDNA_ID_1620388_Annot_ID_155535 3000 nt of promoter + ATG
ataattgtcttcccccgctgcttctgttgaaccctgaaagtcatatcatctctcgctcgagtaaaagaagtggttgagagataagagaatcatgcaatgcaactgcactcagagatagatggagagagataccaaaacgttattggctaaagtaggcaagaggtcggaggaattaaccacaaaagaagtgctgaagatatttgcggataaagcttttccaaggggcagtttatcaccagtgaaaagtatcgttacgggacaagaacctgtttctctgcataacttgtcagggagatctttgtaggaaaagaaatcggtcttaacggaacggagttcatgttgtggaatctgcaacatcggaggcaacgatggagggtttgggatgggacagataccaccaggcaaagtaacgttgcctccacaattagacatatcagagacacccttcatcaaggcatcaagcacttgttgaatcgccagcagaattaaacagaggaagagtggaaccaggatgagtcgaacattcgtccatatgtgtttcctctgccatttcagggttcaggcaattagatcgttataaaaaaaaatattctaagtaacttgccggaaacggcaatatgaaaacatacctggtaggttaagttcttcctaagtaacgcattggcttgcgtccaaaaacttgctgggctaggattcaccattgatgaagaaagaaagaagcttaggtagtcgcactttgtcgtctcttttttttttcccttgccaatttaagtaatcgtttcttcctttaaacttgcgcttgttttaagtgccaaatatatatatgtggtctccaattaaatgcgaaaaatatgcgaggtctcaattttacacatttttcaagatggggatgaaatgtagtcaatcgaaaaaattggacaaaagctggatagtttttattttctttctaattaatattggtcaatcctttttttgtggggtgtgtgggaactttatagattaaaattttgctttttttttttctaagacaaacaatttacttcgaaaaagaaagatttttttttaaaaaacttgataatg

SEQ ID NO: 1336 - DNA, 3000 bp, Unknown
  misc_feature (1)..( 3000): cDNA_ID_3061759_gDNA_ID_1620388_Annot_ID_155533 3000 nt of promoter + ATG
aaacacaacaaattaatcatatcctcccaatgtttaaaactcaagcttaagagttttttttctcctgcaagctacaatcatttttgatagaaaatttataccttttgatggattcagaaatcagaagtctccttagtccttaaaaaaagaaagtttagtacgctaaaacaaattcaccctaaaactctataaattgcctatatttccattgggttttcccgcttttttcttctcttgtaaatttctataattttccatgttttagaagctaagttagttaatatcaccagaagtcggtttaattaataataaattctcaggccaatggcttaaccatgcgatgatcataatcactagattgttaattcaaaactaatcttgagtattcaaatgaaactacaaaatcaaacataaaatgcgtgatttgtgaactaccacatgataataattttagttgaagagttttaacgtttactagggaatatatttccatccaactatattttttcaaggatatacataaaataagacttttattgtttcgtaaaaaatgcatttagttttaaacaaaaatctaaaatgatacttgtaatgaatggagtagtagaaaataaaaattcaatgcatatagtaatagaatattcacaatcttatttaaaattccttctatataacaccaaaatgacaggcaaaagacaggtacaaaaagcaaaccaaaacatgtaatgtaataaactcatcaaaaacagagctctgtttatcttttcttccgtcattcgaatggctgatcagattgagatccagagaatgaaccaagatcttcaagaaccattggctgagatcatgccaagtgttttaacggcaatgtcgtatctcttgcaaagagtatcggagaccaacgacaacctgagccagaaacagaagccctcaagcttcactggagtaaccaaaccttccatttccatcagaagctatctcgaacggatctttgaatacgcgaattgtagctactcgtgttacatcgtcgcatatatatatttggatcggttcgtgaagaagcagccatttttgcctatcaattcttttaatgtccataggcttataatcacaagtgtcttggtctctgctaaattcatggatgacttgtaagtaaataattctgaggctaattaactttttgaaatttactaatgagttaacattttgtttaattgttaatatctttgtgtaacaattttaggagttacaacaatgaatattatgcaaaagttggaggaataagcagagaagaaatgaacatgcttgagcttgacttcttgttcggaattgggtttgagttaaacgtcaccgtttctactttcaataactattgttgttttctacaaagagagatggcgatgttgatgaagatgaagtctctgtttcttgaaccttcttcattcaaaatctcttctaagacgaaacttgtgatgtatccacacgaggaagactctttatctactcaccacaacaagaagcaactcgctgctgcttgattatatttatgcattgggtcgttatcacgttgtgtgatgtaaaacctttttatatatccgagggttcttgattagtgatgttagcttggaatttgttttgtacatctagagattggtttctttactcgatacaagttgaactaaatgcaaatctgataatatttgttttcatcaaatgatcaaacacataccaaaaacactaaatatacttaatattgataccaaaaaaaagaaagaaaagagatcacacttaagagacatgcagacattataagatacgtcgagcgcataatctatataaaaagcatacaaggcaaaggaagataagttacatttaacagaggaccaaagtccaaacctaataatcttttaatattgcaaacgcttatactcctcccaaaatattatagttgggagaaattaccaaatcaaacgtccttacggatgaatcttactaccatggctcaaagcggcaacttcaccgttgaaaccaccaccaccaccaccgccaccagaccgaccatttccgcttccgtaaccatatccaccaccacgtgctccaccacctccagaaccatatccatacccggtacctgatcccgatccagatccataaccgtatccggatcctcttccccatcctgttggtgatctacctgagcctgccccgtaaccccatccagatcctggagcagagccccaaccccaattgtactcccaattcggcccacggcccgacccactttcgcctggcatgttacctctcgaccatgcaaacggacgtgaaacagaagtctttgcagtgattaaaaagaaaaaaaccaacaagagccctttgatcattttcgatatattcttagggtttattttcttttatgttttacttcaaaatcttgttttgttatgaagttattgtaagaaagcttctgccaccatttataggcaacaacggtccgtaacaagttggtttgatagtgtgagatgggccagacacacccttttgttaagtcgtatctcgaaactaaagaaattttgttaggaaaaaagattaaacaccatttttttataattgtttacttagacataattatcaactgaaaataagcacctaacacctaacaatataattacaagttcaatcatgaagtcactagctacgaacccttttatcatatagatactaattaccatgacttagtgcccaaattttttttactatgattataagattattgttaattataacgatattgccaaaaacgaaatgaaatgtagcctctattatagttggtattaatgtattatacaaaaagtcaaatgaaatgatgactatttgatattattactgatctacttgagtttttttgaagtagaaaacattatccttcaagaaccaatttaagatgcatctcaacgtcaatcccactcacaaattttctagttacgggcctgtgatctgcaaatg

SEQ ID NO: 1337 - DNA, 3000 bp, Unknown
  misc_feature (1)..( 3000): cDNA_ID_2134376_gDNA_ID_1620388_Annot_ID_155528 3000 nt of promoter + ATG
gcaaaataaataaataaaataaaatgaagttgaattgtctgaccgctatgactaaagaagcgaccactcatcaacgccatcggccatagctgttaattatttgttggatccacgaaggagcttacacatcaacttgccaaaatttacacttataattgcaatcaatacaaaggtttcgtcaatataattaaccacactatgctacatatcgtcgaaaattgaaactaatttatccggtaacattttgaagttgtagtttcatatagcctgcagatactgtggtttttgtttaattgcagtcttttgattcactctttgttcgtcgcaaacttgcaatacttatcagattttattttgcctgctaattatctctagttcatatctttcatttcacatattgtgtcgattttttcaaattgatatataatagttgagttccttttttcaaatttgtgtgtgtttacgaaagaagaaaagtaaacgaacgaggccaaaaaaatgtgaaattttttaatacatacaaaaaagatgtgaacaaaaaaagcgaagtaacttggcgtgaggtagagcaacttcactaacaaaggtgtcagttgcatgcatggacaggacaaatactctcttcagtcatgtgtcgtacacgtcgatctcaccactggacccactctttaatacacaatcagattacgttgtaacaaaatttctattactgccaaatgcatttctttggcacgaaagacaaagctcctatttatgccggtatagccgtcgtatccttcatgatcctcaccggtttaacctttgccggtacggccgtggctctaaccgttatgataccggttttggtggttcttagtccgattctcgtaccggcggtaatcacatcgagtttcttggcaacggggttcctagcttctggtagcctcggagcattggggatcgccctcctcatatggctctacaagtaattacttaagttaaagtaactaattaactcttctaatgctttgattgtaccaattgaaatttgttcatacatgcattgaccacatttttattttgtgtgttagttaacattatgtatgtgtgaatgacacttaggaaagaagagtattccagagctactttgcatgcacgaggaggtaggcctgatgggcctaacaagctggcagaaagtggcaagcaatcaggaggagataatccgttgaaggaagacaagccgccagaaagagataagctgccgagaaaagacaagccatccaaggaagacaatctgctgaaaggagataagccggtcgaggaggataaattgccggctgaggaagaaaaaccgccacaaaaagataaaccggcggagggacacaaaccgccacaaaaagataaaccggcggaaggagataaaccggtggaggaagacaaaccgccacaaaaagataaaccggcggaaggagataagcatgtggaagaagatatgcctttaggaggagttgagcatttgtcaatccctgagataccaaaggtactatattagtgatgttcaaattttttcgttaatgattttttcacatttagcaattgccgggaaaagaatttggattagcaagattaaacactgttctgctttaatattcccttcataaattaatggtaggttatggtggtggagcaaaacccaattgtccccaagtgttgcggcccaagtacttgtactaaaaggtgtcacccatttcgattcgccatggatgctaatgctactaaagcacgatctatttttatgaaagaataccaaaaagtcccccgtgtaggagcttttgcatataaatattttacatctcgtgacaaaaaatacgtaaaccattttcatatatgacatttgggacttgggtggttattattttaaagggtacgcttttaccttataaagagttcaaacgaaatttatcattttgaaggtattaaatactataagctaatgtgtttttgtttataaatatgctgctattaatgtactttagaaagcgtaaatttcagttatgaaaaaacacattaaacaggtggaatctctcaatttgtcagattaccatgtttttttattttattttaatatataaaaattgcaatcggaatcttagtcgagattaaataaaaatctaaaactcagaacctactagattttaatttttgatcaaactaatcatattttttaccaccgtagattttgtatgtgtcacacactgactgcaataaacaaataaacaaaaaaggtttccctaaataaggaaacgaggactttgttcctatattgatctaaatttccaagtatccaattagatctcaacgcgtttagattggatcgaattatatcacaaagttatttaaaaaaattatactctgaatttatcgcaaatatatataggagtatatatatgtaaaaactttggaagaaatagaaatatgggtaacttaggaaatatgagatattaactaatatggatgaagataaaagtaagtaaattccagttatattaagattaggattgatattgataaaaatatgggtaacttaggaaagaaaataaaaaaataaaatcgaatatacgatttaatatctctcctaaatatccgggatcaatatccagtacatgtttacctggaaaacaatctaacggctgattttccacgaatcctatcttaagaaaatgttaaccgtcgattatgatcctacgctgattctgctggatttttccttataatgacttgggtaaaaacttccaaataaaacaagataattaaggaaacgctttatctcttaaggaaaataaaaaaatgtaaaaacaccaaggacattcacaaataacagctcacgcatatccgcatatatatatatatatatatatatatatatatcattacacaagagagtttaaggtataaatacaattagcgagatcttgtgattctaattcttgtgataccgaaaacattggtggcgagagagag

SEQ ID NO: 1338 - DNA, 3000 bp, Unknown
  misc_feature (1)..( 3000): cDNA_ID_2134344_gDNA_ID_1620388_Annot_ID_155521 3000 nt of promoter + ATG
cctaccaaacccagcaaaaaatttgccattctgagagttttcagttacttcaagttaatttcgcaattagagttcaaatggttttattttatctctgttttaacagcttgagatcttaagcaaaattcgacatcctcacttagtcctcctactaggggcgtgtcccgaacgcggctgccttgtctacgagtacatggacaacggaagcttagatgaccggttgatgctagtcaacgacacaccaccgatcccttggtttgagcgtttcaggatcgctttagaagtcgcttcagcgcttgtattcctccacaaatccaagcctagaccaatcattcaccgtgacctcaaaccaggaaacatcttgcttgaccacaacttcgtcagcaaactcggcgatgttggtctctcaacaatggttaaccaagacgatgtttcatctagaactatcttcaagcaaaccagtcccgtgggcacgctctgttacattgaccctgagtatcagcgaaccgggattatctcacctaaatcggatgtgtactccctcggagttgtgattctgcagctaataaccgcgaaacccgccatagcgattactcatatggtggaagaagctatcggagacgatgctgaatttatggcaatcttggataagaaagctgggtcttggcccatcagtgatactcgtgagttagccgctttgggactgtgttgtacagaaatgagacgcagagacagaccggatcttaaagatcaaatcatcccggctttggaacggctcaggaaagtcgccgacaaagctcaaaacttgctttcgagaactccgtctggtcctccatctcatttcatttgcccacttttgaaggttcaaaataagccctaaaaccatgattacttgttacacaagaaaccttgtttcctcattgattttaacctaattatatttggtgttggcaacagggagtaatgaacgagccgtgcgtggctgcggatgggtacacgtacgatcgggaagctatagaggaatggctgagacagaaagatacatcaccggtgacgaatcttccattgcctaacaagaaccttattgctaattacactctttactcagcaatcatggagtggaaatctaataaacggtagagagaaacagattccagaaaaattacaatcggttctatcaatgtgtttactctaatatgttttttttttgtgtgtttttctctgttccgaggattcctcatttgtctgatgacatgcacaattacaacaatatatatagagagaaatgtctttcgatataagtttattttgtttctattggtaaaaatgtaactttagtttgaacttccccaaagaaaaattcttggcttatcatccaatccagtaattgatttgtcattctatatagtccaaatataattattaatctctagaatgaatgtagattttggaccatccattagataaaatccttacctattgtcaatttgtcatgtctcaaacacgtccacaagttaaggccaataagttccacatacaaatcaatgataaagttaatactgtacttatcaaaggcataatttgtgtgttttcttctcaataacatccgcatctcagagataactatcacctgttattttgtccaaacattaaatgacctctactctcaacccatttaatgcacataataaatgctaaaaagtacacctgtgtgatccaataaattaataatatttctctgtttcataatactagtatttcataactttaaagaaatttacataagttaatacaagtatgaacaatgaagtatgtcaatgttaaaacagtgaacatatccatccgtacttgttgagttacaaaagcttgatgcttaaagtaccacaaggtcaaggtttaatttgtcttgtctagttgtctatagagcttcgagtattgttgttgcggagagatccaagctgaaagtgaccgggaggtgccgatgtagagaggtctaaaatagaagctttcatatcgatagtttcttccacttatcgaaaagagaaatcctctcctgtaaatcgaaaagaatctttagagttgactaaacttttgtttactttacctattcacataacttgaaatttattagtcaaaagtttagaagaaaaaacaaaaaaattcgcaaaagaaaaacacgataatatagctgaacaagaaaatcaaaaacaaaattgtattttggcagaaaatgaaacctatattcattcataagggaagggaaacagcccaaaaattgaaaagtcaacaaaattgaataaagaacaagttggtagtccgacaaaagcccagttgttctgactttcaacgtcatcaaaactaaggaaactaccggaaaagacatcacatattcacacgaactcttctagacttttttgacattttcatttctctcatcgttttcttttttatcattacttctttgaatctttggttataaccattaaagaattcaactggtatgcgcataaatttccgcataactccattaatataatcaggagaccaattcactggactcaaatttgattcgtcttcttcttctctctctctctccatttgtcaagaagctgttgaatcatcgtcccccacgagttttggaaaaagcttgcaagtcaaatatcaataggtactctatcttcaactctgatgattgatcatagccgttcaattggctaacaagatcttttatcttttgagtattttgttatctaaattataatattatccattaaggtttcaacttgttttgttttgttttgcccagaaaatgtctctgtaacttacatttaattaaacttaaaaaccagaccaattcatgactctctctctcttcttctctctgttttgtctctttaagcacgactagagattaaggaaacaaaagcttgaacctttgtagtcaaaatcatcaggtatatatatcttcaaaaatctctctatagtttcaacaaaaccctg

SEQ ID NO: 1339 - DNA, 3000 bp, Unknown
  misc_feature (1)..( 3000): cDNA_ID_2134333_gDNA_ID_1620388_Annot_ID_155518 3000 nt of promoter + ATG
atttgcaaagggaagaagactttcctattcaaaattcaaagccgactttttttttacctaaacagcaataatatctttttttctctgctccagggggaaattaaaaaagtggaaccttttcatctcctggagcgatcaatttctttttcatcatatcgctgactctcgtcttcgtcgtctttgatcgtatcgaggaattgggtttagttcgattcgatcatcagctatctcaatttttctggggattgttctaaaggtttgatgatcggattgcttttgttctatttgttctttttgattctcgtatatgattgattagagaatataggattagggtttgtgttccttaaaagttatctccttttggcagttaaagacttggtttttattctttgtcaagaaattcattccatggttgacgatgaagtcaaggttttggttttcttttgtgtttcttctgtatcaattgtatatgattagattgaagatgatttcatgtgatgaagttgattacaacggataataccgcttgtgaggttgtatcataatttgctaagaataagtatatatcttcccatttgtttcttgatgcaaacaggtttctagtgacttgtttaaagtggttggtattggataatgccttctctcatctcacagcaatggcaggagaggactagtggattcttttcttcatcaggtttgataatttctatgctaacctcatttcgtttctctctgtgagtgtttatggtggaaagcttactatggagttactgaattaggaacgaagcttagggaagcagggcagactgctggtagttttgtcggggaagttgctaaggatgcgaaagtgaatgttgcagatgttgcagaaagagttgggtcgttgtttaaaagccggtgggcaattcttcagcagcctgcaactagacatgccgtgcaagaacacctcataacagctgctgccacaaccgggacttttgtcaggaagggtataactgagacaaaggaaaaggtttctgttggaaagatcaaagtggaagaggtattctagacacatagcttctcgaagttactcgacaagaatgtatgtatctcgtttcattcttctaacttctgacagctaaattctttgtatccatgttttctctttaggcggccaaaaagactgcacaaaagagcaagaccattttgacggatatcgaaaggtggcaaaaggtatttgactattagagtctgaaatctgattgtatgccgttgatttgagtttggtctctaatatctattctttgtaattctgcagggagttgccagctcagatggtaagttgatcgcaatatatggagagattacagtttaaacgtttgttaatcgaaaattcaatggattctttgatgtggggatacttaattatattaccgttcttgagataactattagtgattgcgtgtctgaaatgctgtgactttctctgtatgacaaatgtttttggcactcagtgtttggtgttgcgattgagatcactgtccagcggcaggagtcaagcaggcctattcctctgatactagttaaatgcgcagattatctcatattaacaggtaataatgtttggaccaatggagcaataacacttttattgctcacaccttctcatatcgagttatcaatgtgatattttcctcttacccaggacttaattcaccgaacttgttcaaggccgaaggagatagaaagttgattcaacaattggtttctgcttacaatcaaggtagcaagatttcttttcgactcttatggctcatggagaaattgtcatttaattgaatcacttgtttggcagatcctagggcgtcaatacctgagggtgtgaatccagttgatgtcgctgcactcttgaaatactatcttgctagccttccgacaccactaactacttttgagctttataatgaaatcaaagatgcacggtcgagcatacacagaatgagacagtcactccagaagctttccaatgtgaattataatacattggagttcataacagcgctattgcttcgtgtgagccagaaatcacttcttaacaaagtgggaataagttgttataacactaatctctgattctagatacttaagatgatccttttttcaggaatcatataagttatctgaatattgggaatcatttgtttgcattttgcagatggattcgcatagcctagctatggaaatggctccagtgatcatgtggcgagaagacaacaggcctgaatcttatcgggaatactggagacgcccgtcaaggagtcctaagaaaagtaacgactttgaaactgctactccatgggacttgctctcaggtaaacacaaaaacacttggctcctatactctttgaagcacagtttcattacgatcattcttctctttcatggttaatggttataaacagatgaaggagaaggtccagatgcatcctcatcaatccctctagatgatatcgcacgagttgattttggagcggtcgaggttgtccagtgcctaattgaacaccacaatgcgattttcactgatgcagccgagactgtatggaggtgaaaccaccacagttaaccaatattgatctggttacaagaacatatgcattttgatctggatgatgattgactagtggtttcagtaaataagatgttgtttcatatttggttcttctgtaacaatttttagactttagaactctgatgattaaaagataagtttttcttataagaaaatcaagaattcggattgtttcccaatcatataaagcaacaaccggatgtgaccgcaattcgttaaaactcttatccaatcgggttatcgaaatcgaaatgaaaccaaaccgatttaaccgaaccgtattgactcatgagcagaccaattgaccttagagtcaaacagagcaaagcagagcagagcacagacatacaaatttccatttttgtagcttcttcgagctcacagcc

SEQ ID NO: 1340 - DNA, 3000 bp, Unknown
  misc_feature (1)..( 3000): cDNA_ID_2104863_gDNA_ID_1620388_Annot_ID_155514 3000 nt of promoter + ATG
tacgtggccgggtttggttggtcttggggtccattaggatggcttgtaccgagtgagatttttccgttggagataagatcggtggcgcagagtgtaactgtggcagtgagttttgtgtttacttttgcggtggctcaaagtgcaccaccgatgttgtgtaagtttcgagctgggattttcttcttttatggagggtggttggtggtaatgacggtagcggtgcagctgtttttgccggagactaagaatgttccaatcgagaaggtggttggactttgggagaagcattggttttggaggagaatgacgagcaagcgtgatatccaagaaaccaccattcttagccattgaaaacaataaaaaaaccagcacctcatgatttgagatgagacgcatcttttgttgccaaaaaaattattgcatataagttttaaaattttcaaagttcaaactaaattaaggatatttttttactattcacgtaacaataatcaaatcacatgatccaagattcgattattgttcaaattattttgtaaatttagccatagtttcattttttcacttatatgtttgtgaaataacgatttgtgtttggaattaaaattaggggtgttttataaatatagtaaaactaggatagtgataatgtaatatattgaacgttaaaggacaaagatgggaaatagaaaataaagttaggaggcagagaagaaatgggggccataagaaaatggcagcattgactcttcatcatcatcatcatcatcgtcatcactcgtgtcttcaagcgtctggacatctgtcacgtcgtctatatcaccgaatattctcgagctttccacgaaatcccgtcaaagatctcaactttcgtctaagtcttgccgatttctcgagtttttctttatctacacgtggcactgtgtttgctgtaagagctctgagtacagtcgcggtagaagagtcgtccgagaagaagatggtgaaagggattagggtttatgagcatggcggtcctgaggtgagtaaaagattcgattttgaagttccgggtcggatttggatcattgaaatcaaattagattgcgattgtgtctgtttctatgtgctcgtgtgattatagttcaaatgatttgagattccctataagcttcagcttttttcaatggctagttttccaggtgaaaggttttggatttgagcttgagtcgaaattgatggttatatacagaatcactgatgtgtatttcaaacgtagctttggttactttgatatctttgatttagagacttgtgatagtttctcgcattctgtttgatcagtgtttttcagtatttatagcggttttgtttatttaattggaaggttctgaaatgggaagatgtggaagtaggggaaccaaaggagggtgagatacgtgtgaagaacaaggctatcgggcttaactttattgatgtttacttcaggaaaggtgtttacaagccagcttctatgcccttcacaccaggtatggacattactagaacctaatgagagaacggaaaagatttttttttcttttctgaactaatggtccatttctgatcataggtatggaggctgttggagaggtggtagctgttgggtcgggattgactggcagaatgatcggtgatctcgttgcttatgctggaaatccgatgggtgcgtatgctgaggaacaaatccttccagcggataaagtggttcctgttccttcatctattgatcctatcgttgcagcatcaatcatgctcaagggtatgactgcacagtttctccttcgccgttgcttcaaggttagttttcattcctatttctaggaagttattaataagaagaccaagagcaggatttgtgtcttcttgcctgttgaacagagtagagttttgttatattggtcgcgtttttcaaagatctattcactatatgactcaagtcctatttgtatttggaaaggtcgaacctgggcacacaatccttgttcatgctgcagctggtggagttgggtctctgttgtgtcaatgggcaaatgcgcttggagccactgtgattggaactgtctcgaccaatgagaaagcggctcaagccaaagaagatggatgccaccatgttattatgtacaagaacgaggattttgtttcccgagtcaatgacattacatcgggtaaaggagtaaatgttgtttatgactctgtgggaaaagacacctttaaggtattgtcacaaagagccagactgtttatgttctttagctggtttttcggatttcttataatgaattttttataaatttccagggatcgttagcatgtttgaagagccgaggatacatggtgagctttggacaatcctcaggatctccagatccgattccattatctgatcttgctccaaagtcgctcttcttgacaagaccttccatgatgcattacaatgaaactcgagatgagctcttggaatgtgcaggagaggttttcgctaatgttacctccggcatcttaaaggctcgtgtgaatcacaagtacccgttgtctcgagtcgctgacgcccacgcagatcttgagaataggatcacctctggctccgttgtgctcttgccatgaaaacatatacaatgatgttagtatctttcaataagggcaatgagattcctttgtgatggaaagaatattaaatgtaccttttggacctgaatgacaatttgagaatacaaggaaacgggacccgttaatgaaacatctaaaatagatggggtaaaaacgtaaatatacagaagtatgagtactattggagatttttcttaaaatattacaaagagccaaatcatcttcctaaaatttgacggaatctataagataattttctccctagggattagggctcacaatctcaaatctctgattcttcgatacgataaattcttcctcgatatagaaaccactgattagatcctaattcgtcgcctagctcaaaagatg

SEQ ID NO: 1341 - DNA, 3000 bp, Unknown
  misc_feature (1)..( 3000): cDNA_ID_2992152_gDNA_ID_1620388_Annot_ID_155517 3000 nt of promoter + ATG
atcttatctccaacggaaaaatctcactcggtacaagccatcctaatggaccccaagaccaaccaaacccggccacgtagacacacaccaaaaccacaaccgcgtaaccatacccttccttgatcacaccgtcgtgaacatcagccaccataacgatcacaccaatggtaacttgcgacacgagcatctgtaaccctccaatcaaaaacagagtctttctaccgattctgtcaacgacaagcatcgacaacaacgtcgacgaggttcccacgattccagtcacgagggtcgacatcaacgaaccactctctccaaacccaacggttctatacaaaaccggtgcgtagaaagcaacaacattgattccagtaacttgctgaaagaaaggtatcaccaaagccatcactaactcaggcctatattttctttgaagcagtttcaaaaacgcgtttgaatctgtatcagaaccagaactcgcttcaacgagatcagtaagctcatcttgaacgtcgttagttccacggacacggcgaagcataagctcggtcttgtgaacatctccggtggtctggatgatactattcggcgtttccgggagaaacagtgatcctaaagtgaggattgaagcaggtattgcagctgtggctaaagagattctccaaccatgtttgatattttgggtttcgtagtttattacatttgcagatagaaatccaattccgatacagagctggaaaccattgctgattgctcctctgtattttgccggcgccatctcggagagatacagaggaaccgactaaaatataaaacaacaaaccagtcaacatacagagaaaattgaaacatcattaatcaacttgtcttttgttacctggttagcgaatccaactcctacgccgagcaagagacgcgcaataatgagcatagcaacgttttgagcagagccaccaagagcagcgccggcgagaaaggacacaccgccaagaaatatagagggcttgcgaccccatgaacgagtcacggacgaagctaacagagtagcgatgagaccggaaacgtatagagaagatgtgaaggatgtaagaagttggctattgaaaaggcagtagtggttattgctattgcctcttcttcttctatcttcttcttggagcttatacacttttgggaaaaatctttttagaaatggccccattgacatcactccacctacatatttatatagttacatgtttgcatttatgtttaggtttagagaaccacaacatttcatttaaatattatgaaaaactaaaatgttttctacttcaaaaatatgatttattctttttgcaaacgcaaacacaaacacaaacaaaaaaaagaaagaacatatatatcctaattagcaagaatatatatgtgaacctgaaaccccgatgtcgtagccgaagatgacaccgcccatggcggccatgacacatgaagccaccacaaaataagtaatcttcccgccagatactgatttagccatggcttcttttcttgcttcttctgctaccatgtttacctagagagacactcaaacacaacacacctactattcaagttcggtaggtgtttttagatcctgtatttttgtatatcaatcatccaaaggttgagtttcaaggtagacgacgaaacttgttggaccattggagtgctttaattgacttgagtgtgggacttatagtttttgtttgtttcggttctggctgatgagatatcgaaagtggacaataaaagacatgtgaagaaagacttttcactgcctaccttcattatcttcctcttttttttttttttttttttttttttttttttttttttttttttttgaaaatcgatagaagaaaaagatggctatacttttttcaacgactgaatgataaagctctttcgatgatattggacataccaagttgcaaactttgattgtttaattccataatactgatattttgttttggaatttgactatgtagaaaaaccatcattttctatatataaatactgatatacatgtggaattaagttggcagaataattactatcaatcatgtaaatttatggaatcatttttacattcactttttataattataattttatagtaaattttattttttgcttttaattttatagtaaaataattttactctatggtcaaaaaacttaaaacattaaggggatgataagctgtgaaattagaagcttaggtcacaaatgagatactaaaagaagatgaaggaccatttttgtgaagagaaaaacttattacacgtggcaccaacagaatatttattaccgtcacagtccgtgacggagagaatatctgtgatttgcaaagggaagaagactttcctattcaaaattcaaagccgactttttttttacctaaacagcaataatatctttttttctctgctccagggggaaattaaaaaagtggaaccttttcatctcctggagcgatcaatttctttttcatcatatcgctgactctcgtcttcgtcgtctttgatcgtatcgaggaattgggtttagttcgattcgatcatcagctatctcaatttttctggggattgttctaaaggtttgatgatcggattgcttttgttctatttgttctttttgattctcgtatatgattgattagagaatataggattagggtttgtgttccttaaaagttatctccttttggcagttaaagacttggtttttattctttgtcaagaaattcattccatggttgacgatgaagtcaaggttttggttttcttttgtgtttcttctgtatcaattgtatatgattagattgaagatgatttcatgtgatgaagttgattacaacggataataccgcttgtgaggttgtatcataatttgctaagaataagtatatatcttcccatttgtttcttgatgcaaacaggtttctagtgacttgtttaaagtggttggtattggata

SEQ ID NO: 1342 - DNA, 3000 bp, Unknown
  misc_feature (1)..( 3000): cDNA_ID_2134327_gDNA_ID_1620388_Annot_ID_155516 3000 nt of promoter + ATG
ttcccaatattcagataacttatatgattcctgaaaaaaggatcatcttaagtatctagaatcagagattagtgttataacaacttattcccactttgttaagaagtgatttctggctcacacgaagcaatagcgctgttatgaactccaatgtattataattcacattggaaagcttctggagtgactgtctcattctgtgtatgctcgaccgtgcatctttgatttcattataaagctcaaaagtagttagtggtgtcggaaggctagcaagatagtatttcaagagtgcagcgacatcaactggattcacaccctcaggtattgacgccctaggatctgccaaacaagtgattcaattaaatgacaatttctccatgagccataagagtcgaaaagaaatcttgctaccttgattgtaagcagaaaccaattgttgaatcaactttctatctccttcggccttgaacaagttcggtgaattaagtcctgggtaagaggaaaatatcacattgataactcgatatgagaaggtgtgagcaataaaagtgttattgctccattggtccaaacattattacctgttaatatgagataatctgcgcatttaactagtatcagaggaataggcctgcttgactcctgccgctggacagtgatctcaatcgcaacaccaaacactgagtgccaaaaacatttgtcatacagagaaagtcacagcatttcagacacgcaatcactaatagttatctcaagaacggtaatataattaagtatccccacatcaaagaatccattgaattttcgattaacaaacgtttaaactgtaatctctccatatattgcgatcaacttaccatctgagctggcaactccctgcagaattacaaagaatagatattagagaccaaactcaaatcaacggcatacaatcagatttcagactctaatagtcaaataccttttgccacctttcgatatccgtcaaaatggtcttgctcttttgtgcagtctttttggccgcctaaagagaaaacatggatacaaagaatttagctgtcagaagttagaagaatgaaacgagatacatacattcttgtcgagtaacttcgagaagctatgtgtctagaatacctcttccactttgatctttccaacagaaaccttttcctttgtctcagttatacccttcctgacaaaagtcccggttgtggcagcagctgttatgaggtgttcttgcacggcatgtctagttgcaggctgctgaagaattgcccaccggcttttaaacaacgacccaactctttctgcaacatctgcaacattcactttcgcatccttagcaacttccccgacaaaactaccagcagtctgccctgcttccctaagcttcgttcctaattcagtaactccatagtaagctttccaccataaacactcacagagagaaacgaaatgaggttagcatagaaattatcaaacctgatgaagaaaagaatccactagtcctctcctgccattgctgtgagatgagagaaggcattatccaataccaaccactttaaacaagtcactagaaacctgtttgcatcaagaaacaaatgggaagatatatacttattcttagcaaattatgatacaacctcacaagcggtattatccgttgtaatcaacttcatcacatgaaatcatcttcaatctaatcatatacaattgatacagaagaaacacaaaagaaaaccaaaaccttgacttcatcgtcaaccatggaatgaatttcttgacaaagaataaaaaccaagtctttaactgccaaaaggagataacttttaaggaacacaaaccctaatcctatattctctaatcaatcatatacgagaatcaaaaagaacaaatagaacaaaagcaatccgatcatcaaacctttagaacaatccccagaaaaattgagatagctgatgatcgaatcgaactaaacccaattcctcgatacgatcaaagacgacgaagacgagagtcagcgatatgatgaaaaagaaattgatcgctccaggagatgaaaaggttccacttttttaatttccccctggagcagagaaaaaaagatattattgctgtttaggtaaaaaaaaagtcggctttgaattttgaataggaaagtcttcttccctttgcaaatcacagatattctctccgtcacggactgtgacggtaataaatattctgttggtgccacgtgtaataagtttttctcttcacaaaaatggtccttcatcttcttttagtatctcatttgtgacctaagcttctaatttcacagcttatcatccccttaatgttttaagttttttgaccatagagtaaaattattttactataaaattaaaagcaaaaaataaaatttactataaaattataattataaaaagtgaatgtaaaaatgattccataaatttacatgattgatagtaattattctgccaacttaattccacatgtatatcagtatttatatatagaaaatgatggtttttctacatagtcaaattccaaaacaaaatatcagtattatggaattaaacaatcaaagtttgcaacttggtatgtccaatatcatcgaaagagctttatcattcagtcgttgaaaaaagtatagccatctttttcttctatcgattttcaaaaaaaaaaaaaaaaaaaaaaaaaaaaaaaaaaaaaaaaaaaaaagaggaagataatgaaggtaggcagtgaaaagtctttcttcacatgtcttttattgtccactttcgatatctcatcagccagaaccgaaacaaacaaaaactataagtcccacactcaagtcaattaaagcactccaatggtccaacaagtttcgtcgtctaccttgaaactcaacctttggatgattgatatacaaaaatacaggatctaaaaacacctaccgaacttgaatagtaggtgtgttgtgtttgagtgtctctctaggtaaacatg

SEQ ID NO: 1343 - DNA, 3000 bp, Unknown
  misc_feature (1)..( 3000): cDNA_ID_3061793_gDNA_ID_1620389_Annot_ID_155547 3000 nt of promoter + ATG
atctttcgaatacctgaagtcgattcgctgccgtgtttatcagctaagcgaaaaagcgtaagaaatggtagtttaggttgcagcagtaaatcatccggtgtatatattggctccaaaagactcctaaagatctgcaaaatttcctctctttttttattaataacttgagaatcatataccttagaattggaaccaaagacaaaaaccacattaagtagacacagacctcccagagtcttttcacatcataattcacatcaataaaaacagttgcagctattgactctaaagtgtcagcaagaatctttggtgctttcactaatccaccatacggaactggatcatcttctttcctcaccgcctctgcgaaatttttaacctaatattaaatcactcaaatcattcaatgactcgagacagtgacactctgtttctaatgattctagaaaataaaatagcagagacctttttaaatagagaaggattctggagtaaaaggaagtggtggagattgtgattgacggcgatacgagcgaacttctcgttactaacatttgcagttcgcaagtcacgcaactccttgactttgaggttagggtaagtgtggcagatgtaattagtgaaggcgacctcaagaatagagtcgccgaagaactcaagccggtcgaataaaggagatttttgtgtgatagcttccttgagaagagtcttgttcacgaaactgtagttcaagatcttctctactgcttctactgaattcatctccgacgaaaagctgagttagtaggtcatgtcacaagcaggacctgtcctaaatatgcggtgaactattttttaaggttataaacccgtgaccgttgttaacaacatgaatttaaacccttaactttagttttgaaaaattaaacccctaccagtaccacaaacccaataaagactaaagtagcaaaataaaacaaagacattgcttgcggggagagttacactcaccaaggcagtgctttcgtcgattccggttcacaccatgagcaccattgctttgccgaaatcaacgttggatgggttagacaaagtgtctagatcgttcttatggggcagctctgtaactcaaaggaagcagcatcttatttcctggaaaagagtttgtaaacctaggagtgaaggtgggctaggaattaggaaagctcaggatatgaataaagctcttctctctaagctaggatggcgtctaattcaggatcatcatagcttatgggcgagaatcatgagatgtaagtacagagtacaagatgttcgggatggtgcttggactaaagttagaagcgtctgctcatcgacttggagaagtgtagcgttgggtatgagagaggtggtaatcccgggcttaagttgggtgattggagatggtcgggagattctgttttggatggataagtggctaacaaatattcctctagctgagttgttggttcaggagcttccggcgggttggaaaggaatgcgagctagggatctttggagaaatgggatcggttgggatatggcggcgatagctccatatatatcttcttataacagattacaattacaatcggttgttttagatgatataacgggagctagagacagaatatcgtggggggagagtcaagatgggagattcaaagtgagcaccgcctattcttttcttactagagatgaggcgccgagacaagatatgaagagattctttgaccaagtatggaacgtgactgcgcctgagagagtgagactcttcctctggttagtagcacaacaagccattatgacgaatcaagaaaggcatcgtcgacatttgagtaccacgagcatctgtcaagtttgtaagggagcggaagagtctattatccatgttctcagagattgccctgcaatggaaggaatatggctacggcttgtcccggtgagcaaacggcgccttttctttgagaagtctattcttgagtggttgtatgtaaatctgggagaccacggtgaggtgagaggcagtgtttggtccacagtttttgcattggcagcttggtggggttggaaatggcgttgtggaaatgtttttggagaggttggccgctgtcgggatagactacggttcattaaggatttggcaaatgaggtttcagctgctcacttaaagctccccgggaatacgaaggagattgtgcgggtagagcgacaagtctcatggaggaaaccaaatgagggctgggtcaagctgaatacggatggggcgtcgcatgggaatcccggagaggcgactgcaggtggtgcgttgcgggatgaggaaggcaattggattggaggctttgtgcttaatattgggatttgtacagctcctttggcagaactgtggggggtctactatggactttacatagcttgggagaggcgggtcgcgaggttggagctagaggtggactcggagattgtggtggggtttttaacttcagggatcagtgactctcaccccctgtcgttcctagtacgtttgtgctatggcttttttatcaagggactggttagtccgtgtgtcacatgtgtatagggaggctaaccgtctagcggatgggttagcgaactatgctttttctttacctttaggtttctattcttttaatcttccaccggatattgttaatccgattttgttggaagatgccaatggggtctcaaggttacgttttgttcggttatagttcttttttcttttgttatgaataataaagcgggagacttctcccgttttccggccaaaaaaaaaaaaaagaaaacaaagacatttgccttaaactataccgagcctcttcttaaattctaatttgaatacaccctccttagaggccaattgtggttattggcaaatattaatcaactttgaagtttgggtaacaattcaaaacgtaaaaagaaaagaaggactactaaagtgaattaaataccaataagtaataaacgcaaaggatg

SEQ ID NO: 1344 - DNA, 3000 bp, Unknown
  misc_feature (1)..( 3000): cDNA_ID_3061785_gDNA_ID_1620389_Annot_ID_155549 3000 nt of promoter + ATG
cattgtttcagctattcgtataaagcaaaaataaagatttttgtgttctgtgtagtaccttcaagaactcaggaacgagctggaatttatctgcagtagacttgataggagctgaaagcttttccttgtcaatgaaatgatcatcattggtcaagctgtttcaatagaaagagtaacattagacatatatctaaatagttcaattaaaatccaaaatcaatgaagaattaacaaaaaaaaaccatactctaaatcttcttgatcaagtcccatcgctcttaactttgcaattaagctgtcagttatctgaaatccatggagaaatataattaacatcaacacatcataatcacaagagaattaaaccacaaaaacccaaatactgaatcctagttttccacaatttcatcaaaattcaaataaaacccagaatttcccagaaaccagtcgttttgagaattgaagacgaagcattgtgatttacagagaagaaacagtaagagaagtaaacctaacgactctacgagtaccggaaatttgtggaagagattgtgaggggattttcgtgtgatttcaaaaaggagattgaagatgaaaatcgaagaagagaacctgcgattcgaaggagattgaagctggagttgatacagtcgcttcgctggctgaagattttacacagtcgaagtcggttaagggaagaggtttaagagacggcgaaagggttttaaacagtatctttgcgtttattacttttttttttgtcatcctttgcgtttattacttattggtatttaattcactttagtagtccttcttttctttttacgttttgaattgttacccaaacttcaaagttgattaatatttgccaataaccacaattggcctctaaggagggtgtattcaaattagaatttaagaagaggctcggtatagtttaaggcaaatgtctttgttttcttttttttttttttggccggaaaacgggagaagtctcccgctttattattcataacaaaagaaaaaagaactataaccgaacaaaacgtaaccttgagaccccattggcatcttccaacaaaatcggattaacaatatccggtggaagattaaaagaatagaaacctaaaggtaaagaaaaagcatagttcgctaacccatccgctagacggttagcctccctatacacatgtgacacacggactaaccagtcccttgataaaaaagccatagcacaaacgtactaggaacgacagggggtgagagtcactgatccctgaagttaaaaaccccaccacaatctccgagtccacctctagctccaacctcgcgacccgcctctcccaagctatgtaaagtccatagtagaccccccacagttctgccaaaggagctgtacaaatcccaatattaagcacaaagcctccaatccaattgccttcctcatcccgcaacgcaccacctgcagtcgcctctccgggattcccatgcgacgccccatccgtattcagcttgacccagccctcatttggtttcctccatgagacttgtcgctctacccgcacaatctccttcgtattcccggggagctttaagtgagcagctgaaacctcatttgccaaatccttaatgaaccgtagtctatcccgacagcggccaacctctccaaaaacatttccacaacgccatttccaaccccaccaagctgccaatgcaaaaactgtggaccaaacactgcctctcacctcaccgtggtctcccagatttacatacaaccactcaagaatagacttctcaaagaaaaggcgccgtttgctcaccgggacaagccgtagccatattccttccattgcagggcaatctctgagaacatggataatagactcttccgctcccttacaaacttgacagatgctcgtggtactcaaatgtcgacgatgcctttcttgattcgtcataatggcttgttgtgctactaaccagaggaagagtctcactctctcaggcgcagtcacgttccatacttggtcaaagaatctcttcatatcttgtctcggcgcctcatctctagtaagaaaagaataggcggtgctcactttgaatctcccatcttgactctccccccacgatattctgtctctagctcccgttatatcatctaaaacaaccgattgtaattgtaatctgttataagaagatatatatggagctatcgccgccatatcccaaccgatcccatttctccaaagatccctagctcgcattcctttccaacccgccggaagctcctgaaccaacaactcagctagaggaatatttgttagccacttatccatccaaaacagaatctcccgaccatctccaatcacccaacttaagcccgggattaccacctctctcatacccaacgctacacttctccaagtcgatgagcagacgcttctaactttagtccaagcaccatcccgaacatcttgtactctgtacttacatctcatgattctcgcccataagctatgatgatcctgaattagacgccatcctagcttagagagaagagctttattcatatcctgagctttcctaattcctagcccaccttcactcctaggtttacaaactcttttccaggaaataagatgctgcttcctttgagttacagagctgccccataagaacgatctagacactttgtctaacccatccaacgttgatttcggcaaagcaatggtgctcatggtgtgaaccggaatcgacgaaagcactgccttggtgagtgtaactctccccgcaagcaatgtctttgttttattttgctactttagtctttattgggtttgtggtactggtaggggtttaatttttcaaaactaaagttaagggtttaaattcatgttgttaacaacggtcacgggtttataaccttaaaaaatagttcaccgcatatttaggacaggtcctgcttgtgacatgacctactaactcagcttttcgtcggag

SEQ ID NO: 1345 - DNA, 3000 bp, Unknown
  misc_feature (1)..( 3000): cDNA_ID_3061781_gDNA_ID_1620389_Annot_ID_155552 3000 nt of promoter + ATG
gcaaatatttttcttaagttaattagttaatgttttacgaccttttcaacctaaaaaatgaaacacgaactacgaactgactagccctaattctcccaatttgattgaaagactctccctgaaacagagcactttaggctaggtttcctactttgtttctagcaatcgattgcttcgtgggtaggttttcaaaatcaaaacctaatattcactttctttgggaatctcgcgagttaatttacaagatcacatgtctcaatgtatcgtagggtttctgtgttttttttttttttttttctttttcctgttgggaagggtttcttgttttttttgctaagcttattatttttctttctaatttaatttaggatcctttaatttataaagataaaaaaaaattaaattgtttgttatggagtgtttatctaaattagtttataatggtatagataaatatgaaaaaataaagatacttataaatttaaagaagaaaaaaaagaaaaactttaatataatattagatatccacatattattcagattttactaggttttttcgagtttacccactaaacccgaaacctatcggattttttgtgggcatattaaattcgggttcgagtcggattagttatattttgtcaaaaatgtataattgtttgcaaaatgtaaccaaatttaattaattgaaaccatttttattaaaattgaacaacttgtaggttttttccgaccattccaaatcttacacctacccgaaccgaataatcataaaaccccaatggataatagtctcttcttctaccagaaatatccaaatccaaaaaaaatcaaatctgatcaaagtttctaaagcataagcctagacacaacttcaatgaatttcataaattttaagaaattatatttacattgatataatctaattcttttttttaaagcataagcctagacacaacttcaatgaatttcataaattttaagaaattatatttacattgatataatctaattcttttttttaaactactaaaatatacatatttattagtttgaaaaatgaaaaattgaaaaatgagtgtggggcacgtgcctcacctctcctctacctacatctgccccatgttataactctaatctcaatattctctctaaatatttttaaataacgtaattttttttgttgtttactaaataactactacagtatactatgtgatttaaactataaatattgctaacttgtcataaatgttttacacaaacatatatatacttaattctcattcatcttcgatactattgaatattttattataatctttatctatacatctcaccattttatatgtttagttgacatccaaattttggagttattttaacaaaacaaaagaaaaaaacaaaacttttgacaaaatacacaaaaaaaacatatttgaagaaatttttatattttttcaaaagctttagtagataattaaaatttaatttgtgatatatgtatatattgtgatttacgtatatcgcggtcattttgagttaacaactttaaaaaatttactttaaataataaaaattataaagtcgcatttttataacctaggcctatataaaatataataagcttttaatatttattttatctcttgatttctaattcctaataactgtttcctattttctttttctttttctttttttttccgtcgattttctttttgttcttatcacatttcaaaaaacaaatgttaaagatatcaataaagacgattagtgattagcttatgaatttatttatattcttttaatgtgaaaaaagggaaagaagtgaatctggtctcagcttttaatatcacaactctttagaatacttcctatcccctttttcttcttcttccctctttcgttttctcgcgactctctagggttagggtttgttgattttcacgcgttattcttcatcttcttctgcaattcgcaactagagaagctaattccattgaagttaaggtaaagtatccatctttttgtttccctccctcgttcaattactgtcttaaattctcgttgatttcctttatcctctcgatttgggtattcttttttgtccaccgtcaagtgaatctctcaacgaatttttccatcttccggttaatttctatagaaaccctttggatctgtttttttcctgctcaattactaattttctaggtatcgtttcgtgttttgagaaaattttgggattttgatcgaatgtatctaattggtgatgaatttttagcctaatcaagttgttaccacaagttcgattccatgatttgcaattcgtaaaggttcatcctttgcatgattcatgttcatagcttgtagaagatttatcccctttgactctcgttttagactatgtggttatgtttccttgaagccatgtcactagtctcttccccgttgtgcccttccgtgtagctaatttcttattcaaagccaaagttcgaatgcgggtataaaaaacatagctatctactttttctgatgatctcttatcctatctagtgtcgagtatcagacttattaccattgtaaagagatgccccattttggtccgctgcttttgctaggttgcacagattgttataaagtgaagcaaattttggttctttgctgtcattttgctactctgctttacgacactaatcatgaatcagtatctccccctttgtgcccttctgtgtactgttagaaacctcagttgattcctgttcttagagttttctaaatgcttataagattatctgttattcaaagatacggttttaatgcaattacaaagatcatagcttcgtttgttggggaatcgatctggtttttcttatgttctctttaattgtcctttctagtgttgagtttcaggcttattattatttgtaaagtgatgcacattttggttctctgcttttgttaggtggggataatttttggttttagaagatactaatg

SEQ ID NO: 1346 - DNA, 3000 bp, Unknown
  misc_feature (1)..( 3000): cDNA_ID_2134423_gDNA_ID_1620389_Annot_ID_155550 3000 nt of promoter + ATG
tttgatatcatctaatcacttattgtatttttgtttgcaaatccatattgttgggatatgttacatatcatatgtatatgaaccatcgtttttttttttttttttttctttttttgcggcgtataaatatttttattaaacttatttcaacttttgaaaacattttgcatgcataatggattcaagtttacttagatttgtttattatattgtaaaacgtttctttttaataatatgcatttgtgtgtgtgcatgcagtggcatgcatttgagtacgtggtagtatgtgcaggaaaatatggcgatgtaccaagaacccccacgtttccggtgaagaaaggaccggagatattcaaagggaaagtgttgcattccatggattactccaagttgcagaaagaaaaagcttctcaactcctccatggcaagaaagtggccgtgattggtttcaagaaatcagccattgatttggcgttagagtctgcattagctaatcaaggtataatatatatatatatattttttttttacaggtaagtctttgattagtcaatcatgtaatatgattaaaatctcaaaaatattttgaactaaataatatatttaaaattttcaggaaaagaagggaaaacatgcacaatggtggtgagaacaccacattgggtgatcccacattattgggtttggggtctaccattcttcttgttctactcaactagagcttctcaattcattcatgagaggcctaaccaaagctagtttagaactctctttactataatcttctctcttctggttcgtcctcttcaaacactcaatttcgtctcctatatataatttgcatgcaatcatgcaaactttctaattgttttcaaacaatgtatttgacaaacatagcgtgccacagtttccaaattcatcgaatcatatgttttgtggaagcttccgttagagaaatatggtcttaaaccggaccatgcattcgaggaggactatgcttcttgtcaaatggcgctcgtgccagagaaattctttgaagaagcggataagggaatgatccgtttcaaaaggacaacaaattggtggttttatgatgaagggattgagtttgaggatggcactaccctagaagctgatgttgtgatacttgcgacaggatatgatggcatgaagaagctcaaagccattgtccctgaaccttttcgatcatggcttgagtttccttggggtatcatgcctttatacaggtacgtacacttttttaatacacttttttttttatatagtaaacttgttctagactattccgaaatgttgtgctaatttgatactgtaacaaaatatacatgtcttttgttcttgtaaaaggcttatatatttaagaaaacatgtgttacaattcaaaaaattctaaagtttcattttatgtaaaaattgcatacacctaaagatatggttaaaacgataataatatatagttttacaatatttttctaggccgaaaaaaaattatatggctcatacgattgtggccttacgggtttataagactatatatttacatagaattttcaaaagaattgttaatagataacgattatataataatcgttgcttatataaaattggaccgttgcttatataataacgatgctaatttactaaaattttcaggggaacaatccatccgttgataccaaacatgggtttcatcggatatgttcaaagcagctctaatttgaaatcatcagaattacattcaaggtggctcagtcagctcttggacggtaaattcacattaccgagcaaagaaaagatgttggatcaattccttaaagaaatgcacgttatgagaagatcaagcagattcttcaaaaatcattgcttctccactttcagcattcaacatgccgatgatttgtctaaagacatgaatctcaagccttagcgtaattcaaaaagataatctacttcattaaaataactaaataagtgatagatataggattgtcttttcatcctcagattaataatgcacaagaccctttctcatcctaatttgtttttatatgtttaagtttattgtatcgtttgcttttaaataaatgaaataattgttttctcctttttcctcctctatgatggttatatgagaagtgcattggaggttgtttccaaaatcgtatttcaatgccatcaagatgctatgaaatacgcacaacacagcgcatcataatcatattaaaatcttacccacgtttatatgcgtttgtgagttggcagcaaaagcttaatgcagaaaagtaaacgtgacaccaaattatacgtagagaaaaccttttcattgtgaagagtaaaatttacaggacaatagtccactaaaaatcctctatcagcaatatactcaagtttcaactacgttcttcctattcccaccgaacctatccagagactaattaaggttccaaagaacaatctcgaaacaagaaaacactacaaagagttttatggaaatcatgttgttctgcaatttttttttatatgaatgtaaaatttatttaccaaaaataagacggttttacaataaatacaacataaagctgagaaatttgaatgtacaatagaactacactaaaacagaagaggatgagttaacgacaatacttttttatgcattaacctacaaatactacaatttgttctgtaatctccaatacaagaaaacactataaatccgatgcataactaaaaatttattatgcggattaacacgattttattagaataaaaatccgattttttttaaaaaaaaccatagaaatggatcgctaaccattcaaagagttaaacgagtgacagggaccaaaagtctgaaattcggaatagtcccgtaaagttgtgtactttatttttatgctaatcccaataatcattttatcattggacacgatttttgtatactagtgttgtgtatgaaccagcagaaaaaagagagccatg

SEQ ID NO: 1347 - DNA, 3000 bp, Unknown
  misc_feature (1)..( 3000): cDNA_ID_3061789_gDNA_ID_1620389_Annot_ID_155548 3000 nt of promoter + ATG
ttgatgaataatcttttcgatgggcatacattctgagagcttctgtatcgcttcctcagcagcaagcaactttgcggtatctatacgtttagcacaaccggaagctataaacatatcatccatatatacctgagcaatattttttctgctgccaccatctttcgaatacctgaagtcgatttgcttgccgtgtttatcagccaaacgaaaaagcataagaaatggttgtttaagttgcatccgtaaatcatccagtgtatatattggctccaaaagaaccctgaagatctgcaaaatttccattctttctacaataaattgagtcatataacttcgtattgtttacaaatatctagtgaaagaaacacaaccaacctccaagagtcgttgtacgttatatttcacatcaatataaacagctccagctacaccagctagaagattaacgagaattttgggggctttcacaactctgtatggatcatcttctttgcccatcaactctatgaaatctgtagtctaagagatagacaaaagatgatgagtgtatcataacaacagagatgttctcagttcacaagaaatgaactttaaaaatataccattttttctggctttgggacactgcctataaaggattggtaaatgccttttttgacggcgacacaagcatatttgtcatgacatgtattcgcatctcgcaacacagacaaatccttgggttcgagcatagggtaagtgaggtataagtgtttcgtaaaggcgagagaaagagccgactcaccaacgaacataagcccctggaataaaggtgaattattgtgtgtaagcagttctttcagaagagtcttgttcacgaaactgtaattcaagatcttctccactgcttccactgaagaatccatctctgagctgaagagcaatggattattcttctcatctaaacttttcggcttttgtaaattacttatgacaagactcactagagaagattccaaggctcttatcatgtggtaggctaaggagttttctgcttgctttttctttgatttaatatctcccttcatgtgaaaggttccttctatatttggtatctcaatctttactgaacaaacaaatttgggctcattttttggtcctttttcttcctgaacactggaaaagtaacaaaagtgttcaaattaatatgacacattcgtgcttgttgagccacacaaagtaaaacatagctatctaacattgatcttacaagtatagttttttcgagcatatatgtgactgctctacctaagattgtaacagtgtaaccacggattcgcaaacacagtatccttttctgagactataagactctagactactcaaagatatttgtttgactatgaatcatggttcttgttaagtagtaagtactacttagcaaagaaaaatgtaggaataagatatacctgaaaatcggccttggccacttatttttggtgcaaatctcaatcaactcccctctcccatttacgggttccacatgtagactatccttatcaacaaccatttgttttgtagtcatttcataggttaaagggtttccagaggaaccagtctgtatttggagctttctcgtatagcaaatctcaaacaacttccctttcacatcttcaggttcaacattcggactatcctcatcaataaccacctcttcttgtgacatttcatcagttaaagagttctcagaaacagtggacagagaaaataattcagtggagcaaatctcaaacgacttccctttcacatcttcaaggtccacatctagacaatctttattcctaatcttttcaataggcatacattctgatctgacaactttcgtatcgcttcctcagcagcaaacaacttagcggcatctatactttagcacatccagaagctaaaaatataccatcaagatatacctcagcaatatttttgttgatgtcgtcatctttcgaatacctgaagtcgattcgctgccgtgtttatcagctaagcgaaaaagcgtaagaaatggtagtttaggttgcagcagtaaatcatccggtgtatatattggctccaaaagactcctaaagatctgcaaaatttcctctctttttttattaataacttgagaatcatataccttagaattggaaccaaagacaaaaaccacattaagtagacacagacctcccagagtcttttcacatcataattcacatcaataaaaacagttgcagctattgactctaaagtgtcagcaagaatctttggtgctttcactaatccaccatacggaactggatcatcttctttcctcaccgcctctgcgaaatttttaacctaatattaaatcactcaaatcattcaatgactcgagacagtgacactctgtttctaatgattctagaaaataaaatagcagagacctttttaaatagagaaggattctggagtaaaaggaagtggtggagattgtgattgacggcgatacgagcgaacttctcgttactaacatttgcagttcgcaagtcacgcaactccttgactttgaggttagggtaagtgtggcagatgtaattagtgaaggcgacctcaagaatagagtcgccgaagaactcaagccggtcgaataaaggagatttttgtgtgatagcttccttgagaagagtcttgttcacgaaactgtagttcaagatcttctctactgcttctactgaattcatctccgacgaaaagctgagttagtaggtcatgtcacaagcaggacctgtcctaaatatgcggtgaactattttttaaggttataaacccgtgaccgttgttaacaacatgaatttaaacccttaactttagttttgaaaaattaaacccctaccagtaccacaaacccaataaagactaaagtagcaaaataaaacaaagacattgcttgcggggagagttacactcaccaaggcagtgctttcgtcgattccggttcacaccatg

SEQ ID NO: 1348 - DNA, 3000 bp, Unknown
  misc_feature (1)..( 3000): cDNA_ID_2134652_gDNA_ID_1620390_Annot_ID_155564 3000 nt of promoter + ATG
aaaaagtaaaaaccgaggatctcgtcgaagtcatagggtttacgtcaacaaaataagataacaagattaggggttaggtaaaaaaaactatttgattataaggtttagccactctctcctattgagttctaggcgacatggtgggagttttattgagcgaaagaaatggatctcaaaagagacactgttcttctatatcttccgatgatggaaggaagcgagttgataagacccgctcagcgatgctgacggatcttgatattctcgactgtcccatttgctaccaagcattgaagattcctgtcttccaggttttgtttgtttctccttctttctgaatgaatggtttcaactttcttttaaactttgcattatgaagagtataataattttggagtaaatatagaagtagagtatccctagttcatgtttggatttgtagttattgaaaatatatatgtgggtagatagttttgcaaggacgagtttatatcctctctacgttgttactgtgacagcttttaatgaaaattcattggtttaatatttttagtgtggaaatgggcatttggcctgttcttcttgctgtcccaaattgaggaataaatgtcctgcatgtgctttgcctgttggacacattcgctgtagagcaatggagagagttcttgaatcagtcttggtcccatgccgatacgcagatttaggttgcaccaagacaatctattatgggagagaatcaacccatgagaagatatgcaacttctctccatgctcctgccctgtacaaggttgcaattatactggctcatacaaggatctatacgagcactatgatcttactcacagtacaggtagcacggcttatagtttcaatggcgtttcctatatagccgcgatgatgttcatcagcgataagatactaattgaaagggtatatgagaagaaactattgtttgtagtgcagtgttttgaggagccgtgtggtgtttatgtatctgtaagctgcattgcaccatctgctccagaagtaggagagttctcatatggtctcttgtacactacttgggaaggagtcactatgacttaccaatcaccaaaggtgaaaaaggttcttaaagtgagctcccaaagacctaaagatagtttcatgttgatccctcacagtttgttatgtggtccattgttagggatgatgctttgcatcaatgagttgaagcaaatgtaagaaggttggtgtaagtctgttttcgttaagtagccttttttttaagttttaacctgatgaactaagatcagaagttgcttttaggctttgagttaacatttaacaaggttttagtttagagttgattttgtaggctcaaaaatcagagtcactgagccacctatcattttcttctccttatctattgaagaatctatgtagcatatttagtttcttgatgctgctcccgtcacagtcgatttcaacgccatgaaattttcaccgaactctttcactactcaaagtcttgcataggcatggtaaaaaaaaaaagtcctgcataggcatggttaaaaatagccttaacgttttcaccgaactctttgattgttgaaagccttgcgtagacttgggaagatgaatgtgtggttatctttaaccaccaaattcatctcgagaatggttttcataagggacttgttttctatttagttcatgaactaaatcagaaactttttttttttttaaagtcatgaccacatcaaacacaccatcgcaacattatcttgccatttttgtacaacggaatagaacagaataaaaattatgtctatccttataaaagttcaaaaccactaatggttcatttttggaagaaacatgtattgagattaataattggttgagtgctcattgagtaatcatttttctagtaacttttaaaaagacaaatcgacataattgatttcgaaaaatgacacgtgttgaaacaaatgaaacaactttctccttagtcattacttcctctattccatcaagtttgatgttttggattttatatttgttccataaaaattaatgttgtaggttaatttttttcttttttcttagtaaccaatagaaagaggagagatgtagaacttatattattaaattaacagaaaataataaaaataatataaaaattactttttttaatttgtgtgaaaaacccaaaacattattcttctaggaacagaggaagtattattgatgtgacgttctctttgctccactccataaaactcttcgagttccatcaaagtcatgatgtatgcttttgttccttcaagctcttcacaaatagaagactaaaaacataaaaataaacctaattcgtttccaacttttctcaagcctcttatattcttttttgagacatgaagtgttccttacaaaatggatggttcgagaaacactcaatcacaaaagaggcaacgaacacgctcggtaaaggggacatggctagatcttgattttcttgattgtcctatttgctacgagccactcactgttcctttatttcgagttacgttttgattattacatttttagttgaatccatagagtttcctttttatggtcatttagtataagatcgatcatgattttgcaagcttgctttaactttaacatgcagtagcatctcatcttcagttttatacagttttcatatattttgactgcccatgtttcattatcttttaatttgattgctagtatatatatatatagcgcaaattaagaaactttcgagttaataaaagtgacctaaatttgttttcgtatacttcttctatgtaatttgattgctggttttgttaattagcttccatttgtgttcattttcatgtaacatcagaaacatcaaacatttttaaaattgtcttcacagtaaatatcaacgagccatcagaacatattacaacaaaaaaaaactttattgttcgttgtccaatgttttagagagccaaatg

SEQ ID NO: 1349 - DNA, 3000 bp, Unknown
  misc_feature (1)..( 3000): cDNA_ID_3061811_gDNA_ID_1620390_Annot_ID_155587 3000 nt of promoter + ATG
aaaatgtttaacaaaacaaacgtttaaaatatatataatatataaaatctataaaattaaataaccatttcaaaataaaacttttaaattgatttaaattagaaatcttttaataaaaatattattagaacaagaaaagaaaaaaataatgtttaattttatcgaactggtatagatggtgggatggagtttagaatattataatgcatggattttataacaattaaataaccatttgaatgaaaaattttaaattaatttgaattatatatcttttcaattataattttattaaaataaaaataacaaaaataaaatgtttaatttcactgaacagggttagatggtagggatcgacagtaatacgagacggtataccacgagtaaaatccattagatttgtttagttttactgaacgagattagatgataggacgagtttgagtcgatactaatacgagacggtggaccactggtgaaatcttagatataacaatcaaaatataattataatatcttaaatactaaagaaaataaattatattaataaaataaatataatttaaatttaaattatttagttataatctagattttaacttaatgaactgtacgttattgttcttatatttttaaacagtaaaaatcaaacatagtaattgtatactaaataatatacagatataagagttgaatattcataaaatataaaacattaactcatatacatttttaatcgactaaacaaattaaatttttattcttaaaagaactaaatagtcccgcagtataccacatattaaaatctagttgtcgaagtatttacccaaatatcattttaaaaattctcactaaaagaaaagtatagatatgtgcagatattgtatcatatatagtacattcttgtcttaaatttatattcgctcagtttcgctgattatattgttttaaaacacttttcttatacaaaatttaatattttttaatagtggaccgtaggataatatgtatgacgtatgagtgtctaaccctaaataatagagggagtatgacaattatatcctcgagattcacatgattttggtaacatccaggaatttaattttattgaactttttttcaatctattggtggtgattcactacctaactaataattttatgtgcaataatattttgctatcgtcactttcagtagatgatactataaaaaagttcacagtgaatcttgacaccataatggacaaatacatttaataaaagtataggaatagtttatcattaaatatcattgaagagtaatagtgtaatacccgataataggcgattttaggcgtcacatgagtatttgttgtttccttttttttttcttttaattttttctgccacgaatttatttccattgggggaaatataatctttacacaacaaataaataaatctttacgaaaagtatagttttgattggtgagaaagagctgaacagctaaacttacagtgaatgagaaagaggaattgagagaaaagaaaatgtgagtttagcgtaaatattttaacttttggtatttaatagagtaatctgttatgctattttttggtattttaaatatatatctttttaacagcaaatcaattatattatattatattataaaaatgttacataaaatcattcaaatataaccattgaatcaaataaataaaattgaacacaattttgatgaataggtggaagtaatcttactttccacacagaagccttacaagcaacacataaaatatgttaagtactctcttcataaacttgtaaaatgttaacattttatagatgaaactttcaaatgtttttcgcataaatttaattaaacaaacacagagatatgctgcttaaaatagttcaaggatcatgttttttgttgtaacatccttggcatcattgtgggttagtgaccatggttttctttctcatataacatgaatagtctgatcggaggacagaaaagacatcatcatcggaccgtgtccttggaaacggaaagttatcgtcggtgaatgagactagcggaaacaaactttataacagattcatcttgagtgaagctaatgcatcgaaagacaaaccataaataaaacgtctccatgattggaggaaattgccggaaacataattgtttccaaccaacaaatgaaatctcaattgagacttcaaaactaactcgcttggatagatgcattatttcttattgatttgagatctgccatcaacactctataaagcaaaaactgcatcgagaacatcgaaggctgatgaacaaaggtctccaatccaagcgagttatagttaaaactggttcggtaaaattatttcaactaatgcatccaatcacacccaaatatatctcttatgtttccccgaagacactataattatggagtatatgtagagcagtcaagctgatcatactcgtcccgcgaagcatattttataaagcttttgtctaggaggtttagaaaaagtttataagtgcttcttggtcccggttttggtttaatgcatctaatttttttgcaggaagctagatatgtattggatgtcgattatgctaaatgaaaaaacgtaaaaccttcttatagaactactaatcctgtcaaagaaaattctacaatttttagctttcggatcgtccgaacctcttctaaaaactagtaatgtagttcgtgtatgaacctatgtggaggatatccttgaactaaagtatcttaagagaaaattactccaacagaaaattaacactatatgttaatagaaattgtaaaatgagttatatatagattattaacactagacgttaatataaattacgaggtggccccagttttttatcccccacgcttccctctcttagtccttatataaacttcttgtcttccaattcttcatacccaaaaacaataaccaattctcctaaagtttgttttctctcgcctctaagaaacaatg

SEQ ID NO: 1350 - DNA, 3000 bp, Unknown
  misc_feature (1)..( 3000): cDNA_ID_3061815_gDNA_ID_1620390_Annot_ID_155586 3000 nt of promoter + ATG
ggtttgattttttttttataaagtttttttttctattacgaagcccatacattttggtcaataattagtttcgttttttttgttccttttttctgttttgcacgatctcaattttgttttgaattatttttataaaaattaaattataaaataccattattaattaacgacaaagaaataccatttgatattcatattttgtagggttccatattgtcacgtttcattgtgtagctatagccagatgttcaactttgatgttgaaagtttgcgtgggattgtatcccatcaatccaaaataaatacccataaatttaaacttaacaaaatacacttcaaattattatcaagaaccatacatgtgtttatctttctctacccgtggattcaccatgaaatgttcatctagaaacaacagttagattaactcaaactgcaattacataatttgagtcgtctttatatatctacgtaaaagacaagtgaaaagaacgatactactctcttggttacaactaattcgggtaatcttaaggttctatctacaatgtaaaatgaatcgacgacaataggaacggcaatgcgctgtaatttgtgctccaaacaaattaatttctgcatctaatgaatgtagacattaataacaaataagattcatttaattattttaccaaaaagtaaagaaggtccactgaatcacgtgaaatggaccattccaaattcttcggaaactttaaatacattactagattgtctcactcacctaatagtaaaatagtatagtggctccacaaaattgccgacactgtattttgttttttcttcttaaaagtattcaacaaatacatcacatacaactattttccgaaaaaatataaaaacaaatactaacttttaaatttggaataattatcataaatcataaacaattttaaaaatatttaaactatgtggttggagtcagaattcaaattttaggtgggaccaatgtttggattgaaaattatagttttgaatgtgatgcaaaaaaaaaaaattaattgaaaaattacgactaatatttgatattttttttcttttttaattaaaaaattaaaatttgggttttcagtcacaatcttctcaaaatcgtaactaagagcatttccaaccctactctattttagagtcaaaatgcaaaaattttctccaaccctactctataattgactcaaaatagaaatttctgcagattgactctatatatagagcaactctattctcaactctattttttatttcaacttttttatttatactttagtccctcaaatttaaacttttttatttaatacatataatcattttacaaacaacaattacaacacatagttttataaacttaacaaacaaacaaatactaaatttaatatatttaagaaccaatgtttaaaacaattatcctttaaagttttcacacagaaattaagaaatatatttaatatattttttaattcttttattggttaaaatgttaaaacagttaaaatctatttggaatttttattaaacatttacattaaaaatctaaaacgataatattaaaaaataaaattttagttatagaacaacgattaaattaaaaccgaaggaatatatcgcacgtaaacagaccttttgacaaaccgcaatttttcaaaacgttaatttagttgactttttggttacctcgtatcgcgttacttagaccatctccaagaagacaccaaatcaccaaatttggtgataattttgctccaacgtgacactataatggacggcataattgttttttggactattcacaaaacaccaaaaatttatattattttatttatatttttgatttagttttatatttaaattgttggttttttaattaaagacaagtatactattaatattttttaatgttttcgtttttgtaatatcaaattttaattaagttaatataaaatgataatgtgcacaaacttttgaaataaatatcacattaattaaaatttaaaatacataataaagcttaattaaacatttaaaacataaaattacaacatttaaaccaaaaaaacataaaaacaaaatgcaattagataaatttaaaagacataaagaaattctattatttaaaatttatcgattgtaattttatattaattaaattaaaattaagcagttctaaatttaattagtatttatcaaactattaaaataactattactaagtattagtatttaataatataataatgaaaattttgtttttagtgtgagatttagtgtttatggttggagatagaaaaaaaatctgaacactaaaacactaaatttggtattaaaatttagagttttggtgttcaatggttggaattgctcctatagatttaattgttacctttttaccatcattgtatgcaaatgttgactttttggttttggagattaccaaaagattcatcgtctactagttcttcgtagataacatagtatatctagaaaactcggaacgaaaattttataaaatgtggataaacgtgaagtcctaaagctagcaaagaaatttggtcaaacgttagtttattaatttctctcaaaatattagctatttagtaatattacccaattatataaggatagacaaatgttacttacccaacaatatttcaaatagatgctttgtttctacttgatgcattgttataatgaagtggccgctcctttttttttattttgtcaaacattataatgaaataatgaagtatgtttttggagaacaaaaatgttgtaaaattaccaataatttgggtagtggagttggtgtacactttaggcttatattccattaacttaatgacgttacttgtaatcattgtccaatcagtgacgtcatatatgattttccttttgttaatcttttcaactgttatgactgggtgaaggaaattatcatcttcgtccctaccaaatttttcagcagcgaaa

SEQ ID NO: 1351 - DNA, 3000 bp, Unknown
  misc_feature (1)..( 3000): cDNA_ID_2134669_gDNA_ID_1620390_Annot_ID_155568 3000 nt of promoter + ATG
tccagaaacaactccactagaataagatcgcaaatacaattgcatatgattttacagcataattatgcctatcactttttctatatggactttagaaacagtatcaagccacgcatgtcttgactaccacctagcagcaccggtgcatcatcgtcttctctaacgactgcagattccaaaggaataccactaacagatcatcatctgtatttggtggggcgacgccacacacaagtgtgcgcatctctctcaactatatcatagacgtgcaacctttttatgtcacgacatccatctatatatactcaagacaaaaccctaagctccaaatattcttgcaatcttttttccttgatctgaaagtatatgagccaccactaaaggaaacatcacgtctccaatagaatcatgccatgtcatcttcattcctcacttgattctttctgcgttcagttctcctgttgtgttacacagcttccacttgtggaacatcagctctgatactttctgttgatactcttgcgtcacacagatgtttcaatgcctttgttgcagtctgtgcgataggttgcatttatgagtttgatgctagcagcttggtcacaagaggagcatcaatatattctcttgatatttcatgtgagcttgattgcttgagtttcaaactaagctaaaaagggggagaatgacgatactagatcatatgagctataactcagccatcaagggggagaatgttagtatattgtgatgttgctgagttgtgtagctgtgacagttggaacgtgaacaatcagtcaaaatcacaacatatgcagtgacagtttggagaaacattctaagttagtattgaagcttgaagatcatcaaagtacaatctacaaaggtgagcttgagttctaaaacgcagtaacaaagggggataatgaaagtatatttgtaactggttgttagactcaagatgctgacacacaatttaagatatgagatgatatagactaaattgttgcaaaagggtttacacaacaagaagaagtggactattttgacacattctctcctgtgcaaaattggcgagttttagacttttacttggtttagcagttgggaagggttggagtacgtcttaaattgatgtcactagtgcttttttgcatagtgacctggaaaaagagatctttatgagtttaccagaagaatacgctccgccaaatggtgcttcattaccatttaatcatgtttgcaggctgcttaaatcaatatatcgtctcaaacaggcttctcgtcagtggtacaagtctttaacgaaggtttattgacgatggttttatccggtctcaagctgacaacactctctttgtcaatgtcactagtaagtctatcattgctatccttgtttatgttgatgatattctcattgtgagaaatgatgatgatgatgttaggtctgttaaggatactcttggagcacattttaaaacaaaagatctaggagaggcaaaattcttcttaggtcttgagattgctagcaattctgagggaatttcggttcgtcaaaggaattactgtctcaatatattagctaactctggtttgttgggtgtaaaccaaaatttgtgcctatggatcctaaggttcctttgactaaagatactggcacatttttggagaatgctagaccatatagagaaattattgagagattgttatacttgtgcatcactaggcctaatataacttttgtagtcaatcgcttaagtcaatttctattttgccctactgatgtacgtacaccttcaagctgctcattaaatcttgaagtacctcaagaacaatccaggtcaaggcttcttctactctgcttcaacagatttttgcttgaatggttttactggtgcagattggggcacttgcattgactcaagaagatgtacttcgggaatatgtgtttttcttggaattccattaatcacatagaagtcacaagacattgtaagtaacagtaataatgaggcaaaatacaggagtatggctatgactaaaaaaaaactcctttggcttatttagatgttaagaaatcttcatatcaagactaatacttcagcctaactcttttgtgacaaaatattaaccacacaccttgtaaataacctaatctttcacgagaagacgaagcatgttgagatagattgtcaatatgtaaaacctttaagaagccattcttcacaagggatcaagtgaagaatgactttcttaaaggtttcacatattgacacatgaaaccaacttggtggcatattgacaaagccccttcatccaggtcttttctactctctcattagtcgtttatcgatttcaagcctttttaatccatcagatgattcggcttgagggggtgtatgaacatatagagtatattagtattaagtctcctatactttagtattataaatactctcttctatcataactttaagattaatgagaaaaacactttaaattaaagtgttaatatgatttctaatcaatatgggggttatcaattttatgttgtatacaagtattaggcaagactgtataccattgttagcaaataagatcttatggtgactctctctctcaaatgaaacgagtagaacgacctgtgtccccctagcaagtttcacatacgaccacatctccacagatttcgaatcacgtctccagtccacataaaaaaaagttaaagactacgttccacctaaaaagaaagttaaagaactcgatccgcatattttcgaatttagtggtttattattggtttactgtaccaaaaacaccattaaccgataaacaaagaaacaaaaccggatttacccaaaaaccaacccgaactaggacccattaaccccgaatatgactcgaacattcccaaattctaaaaacccccaattctagaaatccctaaatcgacaaaacccctagaaatccagattgttcttgagaccacgaaatcgaacg

SEQ ID NO: 1352 - DNA, 3000 bp, Unknown
  misc_feature (1)..( 3000): cDNA_ID_2134823_gDNA_ID_1620390_Annot_ID_155578 3000 nt of promoter + ATG
aaaacaagaaaaagtcagatagatttcatattagtgtggggctaattcacactcaaaaattagtttaaggaaggaggattgccacaatactgtacatatatattgtccaaagaatattatttcttctaatgtgggataattctaatatctccatcaaaataaaaccggtcctgaaattgtaaagactatcggtttaattttttttagcacaattcaatattttagggttttgtgcagagatgtcctacacggagaccgagattagtaaaaagaatttacagtcaatactcaatagttaatggtattggtttgtactagattcgatattttgtgaatgaaaatcgaatataaaaaaactttaacttgccaaattttgcaactttactgtttactcaaaaaaagtgcacattaatactacgaaatcttaaataatacgtaatatgactcttaaacgtatatagttaacgttttcactgtcacatatattaaatttttacgaatttgatggtaacgaaaaacaattatatttcgtattatttttgattttgatgatcaatatacattttggaagtaaagagtaaagttagaaaaagtgacaagttaaatgtttattttttacaaaacccaatattttaattaagaaaacaagatataaacgatggtgggaggtttagtttaaacaccttacctaacgatacctttactttggaaaggtttctaagcgggacataccactagactaatgagagtatgagactatgtactgtacacaaatattgagctgcaaaaatacagtaatctattttgaaactgcaataccaaatttcctttacttaggtttagtagtgcatggctcgactttgaagaaaatacttacaaagggtaaaatatagcagtacaaaacaattgaaatacttactcgtccatgtatgttgcttgatatttttattatctttccattgtcgttttgttattattattgacattgcaaaaaaacagaaaacaaactcattctaatcgttgtccaatcagtatgtcattgaaacaaaccaaaaatgaattatttttttatttaccaatctttttaagttaatcgtcacgaaagaaggagatcaattattaaaggaaaaaatatatatatatatatatagaaggaagatcgatatcacgtggttacgttaggggtggacatgcgggtatgttggtcgggttcggataaaactcgatcgggtatggaatttttggatataaaagtttatgatttagggtaaatctaaattagcggtttatttttagtttagtccaatcatatttgggtatagatttcgaggtctttttttcagaaccgatacccaaattattgggtaaatactcgggttttttggtaaataccgggatttttaaataaaaactttggatttcgagtaaaatttggatattcgaataagatttttgagtattttcaagtctgagtcgaattcggttacaattttttgagtagaaaagtttaaagaaaaattctttcaaatgccttttccatgatgccccttttcaactctacccttttgttttatccattttcatttctaccctctttaaatttttaatgaccattttacctctatttgaaaataattttaggttaataaaatgaaatattaatattttctcgccaaaaaatttcccgccaaaaatttttcgaaaaaaaatttcccgccaaaatttttcgaaaaaatatttttcccatcaaaagtttttttggcaggaaatagatttacaagggattttaaaagggttttaaaagatttacaagggattttaaaagtgttttaaaatatttacaagagattttaaaagggttttaaaatatttacaagggattttaaaagatttacaagagattttaaaagggctttaaaagatttacaaatgattttaaaatatttacagggattttaatgaggtttaaaagatttacaaaggttttttaaagatttttaaaaggtttaaatttgttttaaaacggttttaaaatatttacaagggattttaaagggctttaaaagatttacaaaagtttttaaaatagttcaaagggtttaaaagtgttttaaaagatttgcaaggaggggtttaaaagatttctaagagatttttaaagagtttaaaagagttttaaaagatatacaagagtttttacaagatttttaaagaatttacaagaaaacccttgaaaaactcttgtaaatcttttaaaactcttttaaaatcccttgtaaatattttaaaacccttttaaaatttcttataaatcttttaaaacccttttaaaatctcttgtaaatcttttaaaacccttttaaaatctcttgtaactcttttaaaacccttttaaaatccctcgtaaatctatttccagcaaaaaaaaaatttacaatgatttttaaaagcatttttttggctcagaaaaaaattgttacgaaaaaaaaaattggcgggaaacttttttttttggccggaaaatagtttggcggaaaatttttttttggcggaaaaaataaaatttggcgggaaaatttcagttttcaattacatgttcctactagatgagggtgatttggtcattctgttcaggggaaagagtatttttaaaaatggacaaaataaaaaggtattgttgcaaaagggtagtaaaaaaggggtaattttgcaaatctctaaattcaaaatccaatatggtaaaatctaaaattttggattcgatatcaaatccaatttttcggatactcggttgcagttctttttcccagccctaacgtagcacgtgattcctctgctttggtattttacgtcacaaaggtaaaaacgcaaggaataaccaaaaatgatattttctgtttcttttttgtttaccaatcttttctaacggtaactaaaagaagcagattgattataaataatcaacctcatctacacaaaaaaatattgaatcggaaaaaa

SEQ ID NO: 1353 - DNA, 3000 bp, Unknown
  misc_feature (1)..( 3000): cDNA_ID_2134699_gDNA_ID_1620390_Annot_ID_155576 3000 nt of promoter + ATG
gagattttaaaagggttttaaaagatttataagaaattttaaaagggttttaaaatatttacaagggattttaaaagagttttaaaagatttacaagagtttttcaagggttttcttgtaaattctttaaaaatcttgtaaaaactcttgtatatcttttaaaactcttttaaactctttaaaaatctcttagaaatcttttaaacccctccttgcaaatcttttaaaacacttttaaaccctttgaactattttaaaaacttttgtaaatcttttaaagccctttaaaatcccttgtaaatattttaaaaccgttttaaaacaaatttaaaccttttaaaaatctttaaaaaacctttgtaaatcttttaaacctcattaaaatccctgtaaatattttaaaatcatttgtaaatcttttaaagcccttttaaaatctcttgtaaatcttttaaaatcccttgtaaatattttaaaacccttttaaaatctcttgtaaatattttaaaacacttttaaaatcccttgtaaatcttttaaaacccttttaaaatcccttgtaaatctatttcctgccaaaaaaacttttgatgggaaaaatattttttcgaaaaattttggcgggaaattttttttcgaaaaatttttggcgggaaattttttggcgagaaaatattaatatttcattttattaacctaaaattattttcaaatagaggtaaaatggtcattaaaaatttaaagagggtagaaatgaaaatggataaaacaaaagggtagagttgaaaaggggcatcatggaaaaggcatttgaaagaatttttctttaaacttttctactcaaaaaattgtaaccgaattcgactcagacttgaaaatactcaaaaatcttattcgaatatccaaattttactcgaaatccaaagtttttatttaaaaatcccggtatttaccaaaaaacccgagtatttacccaataatttgggtatcggttctgaaaaaaagacctcgaaatctatacccaaatatgattggactaaactaaaaataaaccgctaatttagatttaccctaaatcataaacttttatatccaaaaattccatacccgatcgagttttatccgaacccgaccaacatacccgcatgtccacccctaacgtaaccacgtgatatcgatcttccttctatatatatatatatatattttttcctttaataattgatctccttctttcgtgacgattaacttaaaaagattggtaaataaaaaaataattcatttttggtttgtttcaatgacatactgattggacaacgattagaatgagtttgttttctgtttttttgcaatgtcaataataataacaaaacgacaatggaaagataataaaaatatcaagcaacatacatggacgagtaagtatttcaattgttttgtactgctatattttaccctttgtaagtattttcttcaaagtcgagccatgcactactaaacctaagtaaaggaaatttggtattgcagtttcaaaatagattactgtatttttgcagctcaatatttgtgtacagtacatagtctcatactctcattagtctagtggtatgtcccgcttagaaacctttccaaagtaaaggtatcgttaggtaaggtgtttaaactaaacctcccaccatcgtttatatcttgttttcttaattaaaatattgggttttgtaaaaaataaacatttaacttgtcactttttctaactttactctttacttccaaaatgtatattgatcatcaaaatcaaaaataatacgaaatataattgtttttcgttaccatcaaattcgtaaaaatttaatatatgtgacagtgaaaacgttaactatatacgtttaagagtcatattacgtattatttaagatttcgtagtattaatgtgcactttttttgagtaaacagtaaagttgcaaaatttggcaagttaaagtttttttatattcgattttcattcacaaaatatcgaatctagtacaaaccaataccattaactattgagtattgactgtaaattctttttactaatctcggtctccgtgtaggacatctctgcacaaaaccctaaaatattgaattgtgctaaaaaaaattaaaccgatagtctttacaatttcaggaccggttttattttgatggagatattagaattatcccacattagaagaaataatattctttggacaatatatatgtacagtattgtggcaatcctccttccttaaactaatttttgagtgtgaattagccccacactaatatgaaatctatctgactttttcttgtttttatttgcatagaaatttatgtagatcttttttctactatactatttcttacgtttttttttttttttttttttttttttttttttaagtatgtttcaaaatggagaagcaaaactgcaaagccataaatgtacaaaattattttcacgccatttttacaaattgttattaatttatcattttttgataaaaatctgaacttataaaagaattttataaattttggagaagtgtatggaaaactgatttttaaaattattttcagaaaacattagaaacttttataattgtaccaaacatcaatacttaacatgtgattgtgaatacagtatttgccaaaacaaaaaaaaacatgtgaatacagtataataatatgtcatttctcctttttatagtggatattaggctattttatacgcatgactaaactttatttacaattcatataatccgtttatgaccaaacttcaaaatcacttttatctatcaaaatcataaaatcatagttttgtcataccacaaagtatcaaaacccggttcaataatcgtaattacctgttcgggttattgaaaccggttcatatcggtttggtttgatttgtatcccgacctaaatctggatcaaaattaaattatcctctttgaaaattagatctgacttatg

SEQ ID NO: 1354 - DNA, 3000 bp, Unknown
  misc_feature (1)..( 3000): cDNA_ID_2045924_gDNA_ID_1620391_Annot_ID_155601 3000 nt of promoter + ATG
tgtgttttatcgagtagttttgataacaaaggcgagttgctggattcttcttggaaattctaatctctggaaagctgacaagagcggatggtaaatcaaattcttgattagcatccagaggatattattattaatacaagataactacgatcagatatttactctttcatggtatatacatttcatttccatgatctcgaaaaccctttaattgaacataaactttattcgactttgcaagaacatcttttcatgataacatttctccctaaatgagaaccaatagattagctttgctaagtgcattggttaagttcttctgacaagtataaacttgaaacatatatgaccatcaaacgtagctcaaagctcgaccccaaaaggtcttgcgttcatacttgctaacgggtcaaatccgcccgccccattgttccgtgactccaacctccaacgacaccgagtaataagatagttccaactaattgacctgaatcttggaacatgttcatgaattctcgacaccaaaaatgttacaaaaagtatccattaaaaagaggaaacgtgttacttctattgaaacaaagaaccaacaaaacaaaaaaaaaactttatgcctactttttgaatctttataagtcaagctaaaataaaaggttgtgaggcacaagcaaagctgagatttgttgtattcgtataggaaacaccaatggaccaaattttataccttgagttttgataacaaaggtaagttgctggcttcttcttggaaatctaatcttgtatgacgattcgggaagctaatcagagcggactgatagaattctatatgactaaataacatagatataagcatatagaataatttccaaaaagcactacaaacttttgatttctaggaaagagtttgtccacatgaaccttgtttgagcttgctcatcttcttctccacctacctttgatgacaagattggcctagtatctgatggtttttggttgatatctaatctttgagctatatactgatgcagcttgatatgaaagatagagatgaaattaatgtattgttgggtcactgtagaggattgtattcgtaatagtattgttaccatgatctatgatgcttttacttctttcaacaactagtttgatgtgcatcttttgttaattaacttagaaaattgtggccatatatcgctagagttggcctgaagaccaaatgtgacgctaatctaaaatacatatattgctaagaaattcgctcaagttcttgggatgatatttgaccaaaacaaactgtgatagatttgggccacaattacaatttttagcctacactaattattggaccaatcataagattggtttggcatttgttaaacataatgtacaaatctaatcaaaatatcctaaaatatcacttaaatcactccaaatctaaatagtaaattccatcaaatctttcaaaatatcaactcccacagtttataaaagaactattaaaattttcatatattgtaattttagctacataactttatataatgagaaatacaatccaaagatatagaactgaaccaaaaaaaacataataaattttagctaaataactttttatttagtaaaagattttttttttttttgggttcagttctatacaataaattaaaataaagaaagaagagttatgttctaccaactatataataaatggtgaatgaagaatcattaaatagaataggtttggtgtccacataacataaaaaaaatccaatacaggatagtatattcttattttatggtttaaaaaataatatttcaaactctctaatatataaaaagaagttttacattgaaaaatccgcaaataagcttaaaacgtgagcctattgacttttacttttttaaaataggcgttatattttgttgtttttatttaaaacatcatgaaactttaacgttttcaattatcgttcaacgaaacgtatattttatttattgtgcgttaagtttttttttgtcaacatatgaatcatatacacaagtaaactaattttgtcactacttaataaagaaaaaaaagttacaaaactaatttgaataaaataagttcattcctttatcagttacaataaaatcaacaaaatttgaataaaattagtcttcacaaaataatactaaatttgatggatttaactatattagccaaaattcaaaaaactctcatagaattttaactactcatatgattaggttggaaatgaagtataatttataacaaatactcatttctaaatgtcttggaaagataagtcaaaatcattatgacattatcagtgactactgactatgaaaatttgatttatcttgctttatgaattcaacgatacagtagacagagtcaatttacacgaattaagtgatagttactgaaatgaaatctaaaagcgaataatgttatatccaaaaataaacagattacattaaaaagaaagtgatgattgattagtaatattaattgcaacaattaagtaaagaaaatcgcgagaaaagaggaacccacgacacattgaaacttgcaaaaaaaaaaaaaactagaaagcgtgcttcgcaatggtcttttctttttcttcttcttctcaatatacactaataaaataaaaataaaaagcttctcttgcaattctctcttccctcataaatagagatgcagtaagactataaatattgaccagtgtcctagagagagaaactcgccgcttttaacactttttttttttctggtttttttttttggttaagcagtaagcactaagcacatatctcgagcacacacacaaggtcagtcaaaaactgcttctttttctgattcatatatatatattgctttgtgggtctttggagcgtgcatgttttttgttcttattgttgatttgtgtgtgttttcattttctgggcaacggctagttattcccacaagttgtagacgacagaagaagatcg

SEQ ID NO: 1355 - DNA, 3000 bp, Unknown
  misc_feature (1)..( 3000): cDNA_ID_1022554_gDNA_ID_1620391_Annot_ID_155613 3000 nt of promoter + ATG
ggggtaaccgtcctgctgctagttgacaatgtggtgattgccttctctttgttatttattatcttatgggaccatattacttagaaagtctctagcttttgttgtttacttaaaccaagcctcttttttattctggatgtttggttttggtttgattcttgatttggttaagtgtctttgtggtgataatgttattgaagttattttatctgtgtttttttctgcagcacaagggagagcacgccttgtaactttgttgaggatatggagatcatggttacaccagggtctagcacgaggtcgatgtgcagagcaaccaaagagtacacaagggaacaagataacgtgatcccgaccactagtgaaatggaggagttctttgcatatgcagagcagcagcaacagaggctattcatggagaagtaagcttattctttattttatttttgtgtcattacgaagagggtgaacaacactcatgtgttttcaataatcttcaggtacaacttcgacattgtgaatgatatccccctcagcggacgttacgaatgggtgcaagtcaaaccatgaagttcaaaaggaaacagctccaaaagacatggtgtgaagttagagaatgtgatggagttaacagactaaccaaacatcagaaatcgtgtaatcttaagtaataatgtggttagagaacaagtttgagagtagcttagggaccttaaaacctcacaccatttgtactactaatcttcttcagatgcttagtgaaattttctcatctgtttctttcaagtgtttgtttttctatctatctctcatgtttattcaaagctatatgtaatgatgatgattgagagggatgtgtgtgaacatgtttaagcttggcatatagtgaaaaaaatgattcagatgcagaagaaagagacccaattgagaggttcacgtgtgaattttggtaggtgtaaaaatctgaatcatatcctttttctttcaactatacaagattggtcccttttcttctcttaccataattatgacgcacgtgaatgtgtgtgtaaatactttgacgtttacattgaaatactgtaatgtaagttcagagttaaaagtacaaacacaaaggtgaattttgtactaattagtaaagagataagagtgttttgaatcttgaatatcaaattattattaacaagaaactgacaaaaagatgagacagtgttcattgagaagatctctgttgttttatctttttttttacatttcttggaaattggcaaaaccagtgtgatgaaactgtgaaatcttatctcgaacccaatcattgttctatgtttttctttaatctctaaaagtgaaaaagtgaatgcatgaaacgttcagatacattcattatattatacatttatacatatggacatggtgtacgtatgtacacgggtgcttgtttgatcacgggctcactgactataaaaatcatgttttttgggacatatagattcgcttacatcaactgtgtgaccaatggggtatctgaattcagcttgttcgatgttttgtttgactcttttaaactatttggtagtaaaaagccaaaaaggaagagcactgattacgaaagcctttttgtctttttgtttcttcttctctagctctctttcgttctccttttgggttagtccttcaaaataaatgtctttaacttgtcatgtatagtttctttctctcgttgaacaccaaccataggccttgcaatgtgagtcaaaacatgcattgaaaaaagaagtgaatttcaacattaaatgctctcgtttaacatgcctatggttccattaagcaaagtacacactctatatatgtcgaaagaactatacagtcggtgttttagccctatagttagatacattcgaactgattacagaaatatcaaatatccagttctaagatcggattaaggcaaatacatttaaactacttctagcgaatgaggttcacatagaaaaactttttaaaatgaatcactaaacaagattcattttctttctaaatagtgtaaagacgagtgatgcatgcaactgctctcctttccgttggtcccttgtcaaaatatacgaccgtgaataattcttcccatcatatttatctgtcggagagttccaacctcaaaacattctccttctcttatcaattctttctaaaatcataaaccaacaaactgggcctatgatcaattattcatattcaatttagcctataactaaaaccacactgctttcgttacactggccttccgacaagtctctttgactgtttttatcttaagcgccatcaagttttaaagaagacaaccccatatctttcctcccatgaatcatcgtgtccatattgctatagttcatgaaaaaactaaatactatcgacaactgaagaaaagatccggatcttgtggaccgagtgaatggttgggcccaattagaatggtctaccctaacatctagccgtctacacgattgatcatacgtctaagagggcgaaaccaccaaacgtttggattttatctaaattgatgtacataaagctaacatgattttagtataaacattataagcatcatggaaatcaataagctaacatgattttagtagaaacattatcagctaacatgaattactaaaaacatttattttattttaaggaaaaacatacaatactaagattttttataacattttttctttgtaacattataaattgttttagtttctacattaattaaatatataaaataaattcatttaaataatataagaaaacggaatctttgattaactgctgattattggccactgattaatttccgaccccatcaatagatgagatcagacatacacaacttaagtagaccaaaaaagcggttggtgtaagatcccaaactcacagattcccaaataatagtaatactcttcctcttctcaactctcaccagtcaccagcagatcatcggagatg

SEQ ID NO: 1356 - DNA, 3000 bp, Unknown
  misc_feature (1)..( 3000): cDNA_ID_3061894_gDNA_ID_1620391_Annot_ID_155619 3000 nt of promoter + ATG
tctcaagtccgtagaattattgtatatttttgtattccccgaaaacactatttgccttattgctttgtggtccaaaatgtttatcagtgagcggcaagtcttgtaaactagtgaataatgcctcgcaaattgtccagattcattgtgttttggcttattattgtatatgccacaaaacgactgagagtgacgatgattcgctacgtttttttttctataataaagtttataattattgatgtggttaccacttagatattaaaatcaattatatccttttcaatgattctaatgacgattggataattaaatttagataatgcttttttgtttgctacttttttcttttgtaatgaagattgaaatgctttgcactagttgggatcgaatctgcttatagtatagtacttatattcccacagtacatccccgacttctttttaatggtatttgcaactgatcatgtgtacaagaatggactgattaatctctgaaacatgaattataatttaagctaagaaaagtaaagaaagtacctaaaatagatagtaaaaccttataaacataaatctagatactactttaactgataaacttttttctgtgaggccattttttctaatggatactaaaatttattatgtgcaattgaataaaatctgaatatcactacaaaagaaaaaaaaaatgaacaatggattgactagtaaaacatttgaatgattagttattcactatatatgtaaaggatgatgtttgtgatggtactatccaaattgacaaaaaaaaaaaatcaaagatatttcgtccaaaataaatttatgcgacgagctgacctaagtaatgacttgtggtccgaatccttttctgtatagtgtcttctgctaattataggcaaagagctgatatacgcttctctttgtctctcttgcgatttctcctttttatcttttcgaatctatcaggttgggccaaactaaaatggaccgagctaaaatattactagactaagccactgttatgttgagttgaaccatctttatttgggtcgagccgttgtcttaatgggccgatgttctaatggaccgttttaccatattagcagcttgtttgacttagttaatctttgtttggccgaattaggcatggaaaacaaaacaagtattacatactaactatcacaaaacatatcgtaaaaaagattatatattttttcatgcagatttttactataaaatttaaaattaaatgtaatgtattaattataattaaactacaataaatagaagttaaaacaaatattagaaaaactgaaaagtattgacttaaaaataatattgtcatttaatttgttcgtcagatactcagatcttgagccatcatgggctgttgaatcttgagccaccttgagtttctaaagctggttgtggcaccatgtgatccacctccccatgatgtcattggaagcaattcgcaatcataaaatggtattattgtctagtttaccattttttgatattttgttttaaaaatgtcatttttactaaaattttacgtatttattatttttaatatttaaaaatatacgtatgtacgatatttttttcgcaaaatacatattgtatattaaatactaaattttaaaaataaatagaactgactaaatccaaatataaaaggtaaaatgcatgttaaatcataattttattatttaaaaatggtaaaaaccacaaattattcaaaaatacataagctatagttgattcttgtccaaatttgtgtacgaatttgcaaactcgaaaattcatatacacataacaacaaaatccttaaacttgtaaatgaatataattgaccgtttttcacaccattaaatcgataagtctaaaaacctttagctgaaaccgaattacgctaaaatatttgaccgagtagtcaagtcggaaatgggcacaagaccatcgaaagatcttcttttacacaccgtaatagtgaatacttacatgcaacataaattatttgacggttaaacccaaattaatactccataaaaagacacaaaatatgtagaaaaagacaaaaagcaatggtaattgtaaaacaacacgttttgctcgttcacctacgtggtaagaagtcaccaagtgatgtggcagtataattttaagctgaaaccgaatttgcttaaatttaaccgagtagtcaactcggaataaatgggtacaagaacagttctttttttatacaccgtaacagtcaatatatatacatcttttaatggttaaaaacctaattaaaactccgtacaaaagacaccaaaaatgtagaaaaagacaaaggcaatggtaaaacaacacgttttgctcgttcacctacgtggtaagaagtctccaaatgacatggcagtataattcttagctgaaaccgaatttcgctaaaatttgacggagtagtcaagtcggcattaatgggtacaagaagatcgaaagttctttttttttacaccgtaatagtcaatatatacatgttttgctcgttcacctttgtggtaagaagtctccaagtgacgtagcagtataagttttagctaaaaccgaatttcactaaaatatgtaaccgagtagtcaagtcagaattgatgggtacaagaacatcgaaagaaccgtaatagtcaatctatacctgcaacataaaaaatatagaatctttagacagttaaagacctaattaatactccgtaaaagacaccaaaaatgtagaaaagacaaaaggcaatggtaaaacaacacgttttgctcgttcacctatacgtggtaagaagtctccaagtgacgtggcagcttctatgaacagagacgaaatattgtccaaattcatttcttacagtaacaaacgtacgcatatttaagatctagtgcagaggttgtctttcccagcctgtcaacagacatctttataattaattattgagaaaagagaaaaacagaggaaaaaaagatg

SEQ ID NO: 1357 - DNA, 3000 bp, Unknown
  misc_feature (1)..( 3000): cDNA_ID_2045869_gDNA_ID_1620391_Annot_ID_155622 3000 nt of promoter + ATG
gttcttttgcccgtatgggcttgggaacagtggagataagagagagtcagataaagagagagaagagaatgagtaaaggtggtgcatgttaatgaaaaggagattgattggtgagaaagaaagagacctttgaattgggaaatgaaacttctttttattttcatatcttgagattagcatttttgggttttgcatcatctctaaatggaactctatttgctattggcttaactgtaatttcctcgcaaatggaactctatttcctttagtgaactttgactattacctttgtctttcattttggcacaccaagaatcacaagattaccttctttgagacacatatttacacatgaattatttcatcatattttaataaaaaaagttggttcttgttactctatttcattttctactttctaataatttaagttacagaaaaactaagtatatttttcctaccaaaaaaaaaaaactaagtatgtttttactaaatactatgcttaagttatataacgatatatcatgtaaacaaagaatgagagttcaagattgtgtttaaattgcgtgaaagaaatcaaataaaaggaaaatctctttcatttatgaattatgatatttggctttattcattagtgcttatctagattcaatcgttttgtagaggttgataaaccgtgtatggaactaatgtttgtataatgaaaagttgtgttcagcccccaaaaaaaaaaaaaaagaaaaaaacatcagtcgaaatcaatatatttgtttaaagaatagaagcagaacactccacaacttgagaagcaaatgggtagtcataaagactgtgatgggtcctgactcctgaccgatcgcaccgcccacattcccttgcaacttgtctcctcatagttggctacttcctctgttcactataccaaaaaaagtaagccaattagttttacgttttatggacttgttgcggcccgtttagctttcatttgttattactaggccggaaacaacccactggcctttacacctctataaaccaccaacgcaagttattttcttttcgacattgaaatttaatatatgttttcatcaatctcaaattcatcacaatgcagtacaagtgaattaactaactacactgtaaatctgtttgggttacataaattgtatagcgtgagctacatacaaattttctttcttttcggtgtatgtatttttgtgttggtttttgttttaggattctcatggcttttgaattgtttctagttatgcttcatgtcaaagcacaatttcatttaggtttgacaaagctagtcatagtcatgaaaaatatagggagtatattaaagtaggattttgctcttctcctattacacaacttgacatgctttttgataatcaatatttataaatagactattttatttaaactactcaacaaaaagacccaatttaattgattattatttaattatgaaaataaaaataggactattatgtttcttttctttaatttttaaaattctgtttctaatttgggctgcttagttgagtagtaatgtagaggactgttttaattaattactgaattttttattttaaaaacaatactattagtaatgtaattttaaaaataaaaaatagtattgtttgcatggaatactttgcctcataatggtttcactttgactattagagaatgggaagaagaactgtttgaagatgttgaactggttcttcttcctctttgtcggagtaatctgaatcgaaatcgacgacaacctccattgaaaaacatatatatatatatgtatagatttaagagaaacctagtaacatatttaatcaattcaatatttgatttattgtttttaaatagataattaaacattttaaaatagaaaaacaaaaccagttcaaaaccttactttatgtaataagttagatacttaataaacaaataaaagaaattaggtttgcaagaaatctaacatgaatggaaggttaggtaggcataaaaatgaaagataagtaaggaggttggtaggaagagtggtggaggatcaaaagagtatggcaaaagagttaattgccaaatgcaacgtcacttctttcactcctcatctaactctcaacactatttttgtatatataatcttgaacaatcggttatctcaacatttgcatattgtctacttttagattttgatatctattggaactcttactagctcattcatccgtcgggtaactttcttgacctctctccatcttatcttttacgagtcttaaagactttacttatctaagaaaatccgttttagtctctcaaaattgatttattagatggtatattctagtcacaacaactattttttggacgagaattttacaaaataattgaaggatacttaactctttcttactaaacaaaacaacttaaatctatatccgatatgaattcttgtgggtaaagaatacaaatcatgtatattatctggatatccaaattattcactaaaattttataaattatctcaaattcttctaaatttgtaaattactcaaattatcaaaatcactaatacccaaaatgagaagaaacatttattgcttaaaagttagattcttcccacgtggcccggtttagttatagttgccgacgattaatttccggtcacatttttaacggcgtgagtttgtatgtggcgtaaaacatgtcaaaatgcgatattttcgtaacgacgttaacttatacaaatacgacaagacaaggttttggcaacgaggccaatcagaccagacttgtgagaactgagaacgatcgatcaaaaatctctcccacgataaaaatgaggaccctgaagctcattgtacttaacgtcttcccctttccagaaaaatcaaccaaacccatttcagtttccccggaaagtttttgtctttcaatcaccattagaattcagctgcaacacaagtgtttgcaacagagagaatcatg

SEQ ID NO: 1358 - DNA, 3000 bp, Unknown
  misc_feature (1)..( 3000): cDNA_ID_1025511_gDNA_ID_1620391_Annot_ID_155621 3000 nt of promoter + ATG
agaatcattgaaaaggatataattgattttaatatctaagtggtaaccacatcaataattataaactttattatagaaaaaaaaacgtagcgaatcatcgtcactctcagtcgttttgtggcatatacaataataagccaaaacacaatgaatctggacaatttgcgaggcattattcactagtttacaagacttgccgctcactgataaacattttggaccacaaagcaataaggcaaatagtgttttcggggaatacaaaaatatacaataattctacggacttgagacttagctataagtcaatattgaatattttatagaaatccgagactagtggagacatcgcatgaattaagacggtttatcagcattattcaagattgatttggtttgcatctaactaacatgattaaaaataagaaccattgattaattcattccttagagtatgggttcatgcttgcatataaatcactcgttcgatttatttcgtattacatctatttattctgtttaggtgcaaagccggtcttaatagaatattgtcttgagaacatacatatataaactgtcattgtttctatctccataaattttgaaatcgatcctaactagttgaataatccctctataccaagaaggcaagaaccgacatttgaattaatttaaccaattatcttccacaattactttctttttgttgtccattgttcttcatttacttttgggttgaatttatgaactcaacaagtcaacaacattttatgaatcatatcaattttgggtacacaatcgtgaagataataacggagaaagcttgctaaagacttaaaagtggtgtttgtgaagcagtctatatggcccactattaaacatatgtgatatcatgcatgagttttggttactcattcaaaagtatgctgaacaattctttttttgttttcaaaaattacgggtatgttagattattttgagttaactaaaaagcatagaagattaaaaaaatgttacattttttatataaaatattacaactacatctagtgccggcttagcacatgtgcttaaggtgctaggacatatggtctagggtccaaaaaaaaaaaaacatgatatgattacataatagcactggatctacaaaatgtttgagccggtcctgactacatcacataatttcatgctaatgtttttgtgtgttcttacgcctaacgtcttctctacacaaaacaaaaacatgatcatgatttagatttggctgaaaacagagttcttgatttgaatttgactggaaaaatgtttcttgatttggttgaaacatgttttcttattcgccttactctcggatacctcgtagctgagaagatatggacattgttctttatagaaataatgtaaagcacgacttccataccttcttgcaaggatctttgataagttcctatcctcattaacatgtgttgcaccttgtttttcgatcctctaagcttccaagtatatgactacaacaacgagattgaatatctaatgatacaaatggtatcttaactatatactttcttttcaattcttctggtaatgtgtatttaacaattaattttgctaatcttggatgtagctttgcacatggattgctacagattagagctgtcacagcgggctgtccatgtccattagcccagtccaataatgtccatttcgatattggacaaatagtgttcatgtccactaaggcacatgtccattaacgcccgtgcccattaatgtccatgtccaaatgggttgtccaataggcataacaaaaccaaattttaacacaatagtatttgcttcagcaagatgcttgaatgtttctttgtaaataatcgctctagagagcattagatgtgtagaattccattttgtgcttactaccaattcttttttctgtttaagtaactcatattagtgagctaagcttttgatatttgcagtttcatgaatacacggtgtcaaaggaccaagcttcatagttcatactatgcataatgcagacaatgaacactatatcaaacaatagtaacagaaatcgaaagagacccatgtcaaaatcactctcaataagcaaaaaacagtaacaaaaaatcatttcgaattgagtaatcaaaaacccagatcgaattgagtaaaaatgacgagaatttgcttacttgaactggattaggaatctcaggaggatccatgatgtgatggagttgagatgttgaaggaactcgccggagaaatcgccggaaagaagaaatcgccaaataagcgtcggggaaatgttttttccccaaatttatttttgcccgaacacttaaacctaatattttttgaccattgggccgcccatgtccatcacgtccagtccgctgatgcccatgtccgttaacgcccatgtccattaatgcctgcttcataatgggcttgtccatgcccggtccattaggcgttggacacgggccactcgtccattttgataactctactacagatcaatcgttcaaagaaataataaaatctcagtagacctatgtttggaagaaacaagaaaatttcatagatccgtataatggatccatgattcaagattagcataattaaattcgaaagtaaattgaccttataactaaagtaaagtgaattaggtggttacagttttttccaatgacattgtaacataatatcttacaaaagccaatattactatttgaaaggtacttccgtactagtaatgtagggatttgagacgtgattatttatccttaatattctaattagattgaaggtttatatattaagttttccatagttaaaagtcaatcttgaaacaaaaagatagtttgagggttctcttgtaaatttcctaaaagtaaaacattaataccctaaaaatcgaaaaatcagaaaaagcttcggagcaagaaaaatcagagaaaattcaaaaacccttcacttgcctcactgttcttcgtc

SEQ ID NO: 1359 - DNA, 3000 bp, Unknown
  misc_feature (1)..( 3000): cDNA_ID_2045887_gDNA_ID_1620391_Annot_ID_155615 3000 nt of promoter + ATG
atgacacatcttctacgaaaatgcactggaaagaatgagtttgggagcacatagtttaaagattggttaattttcacgttggagtcaatttggaaaaatgtaattcctaagctcagtttttctagtacaatatccaaaagtgatacaaaggcagcacgaagagtatcaaaagctagagagaaagattatattttcactaaacctaccagttttcgaaataaaaccaagaaacaaaattaacatcaatgatatgatacgctttctaataatggtctcctaatgtgttgtaagtgggatatattgaaagaattaaagttcatataagatacatatgctcttggacatatatatgatgcagtttagacatagtttataattgaaagtgaaatacaagaaatcctcattagatagtttatgaaatatattgaactttgtaaaaatagtaaacaaaaataaatctaaatttttatttattttgtatttgaaataaaacccaaaaagaagatcttttcatgaaagagaaaaaaagaagtaaaattggttgtaaatttatttctgaatagaaaaaaaaaagaaattgtgccacgcaaaaccttaatgcttgagcttaataaaatgaaccttaatgcttgagcttaataaaatgaaccttaatgcttgagcttaataattggggattatgtggttaatagtatggaccaggaatcttagtcagcaaacactatatggattttctaattatcttaaatggaagtagtaatttatttgtttttgttttttaacataggaaattttgaaatatttaggtccaaattcgtggtttccaaatatctacacttcagatatccaaatttgtggtttaatatatatgtatatccaaactaaatttaattacaaaaaaaaagtggaattttaatatttagtttgccattaaaagattttagatacagtatatggatttttgagaggcatggcactattattcggaatcatagatccaatccggaattctttccgatccgatccagaaaaccggatatccaagataggtgaatccagatccagagaatgaatttacggatacgtataatccgaattataatttgattttaatttataatggtgggatacataccttcatctttgttgcctcgttccagcttgcatttctccgtagtaacatgttgcagatgattccttcctaaaggttttgattggtattttatatttcgcgcggcccaattgtcacatacattttgattatatccgcataataaatgttgttagcaaacaaatgaggattaatattgaaaattgtccctagatcaaaaatttattactgaaatcatacctttctttgcatataccacataaaatgccaatgaatcaaaattcatcacaagaagcaatcatcactagtagctgatgtgtatatgtagacgtctctttagggtttttacaacaatctccatggaattttcgatcaacatgttttattaaatcatattgattttttattattttatgttttaaggtaaataagaaattgtttattttcttctttgtaaactattgtcggatcatatatttatgtgatgtagaagccatgttatcgtgtacaatgcgtgttaaaacttaaaattgtgaaacttttgtatgtaataatgattgattgactaattgattttaaaagatagaaaatatataaattatgggtccacatggtaattttataaagaaaaaatcccggattttttctatttaatcgagaaatatagataatgatatacaaaaattggtgattttttgtgaaatgtcagttgactagaaatttgaaacaattcttatcaatgtatttttaaaaatatcatgtttaatatgtaagtttaatattcattagtgtgcataatgtaagaataattactaatttacataaatattttctcttatatgtgaaagtatttaactactgatttattgatatacaatgaaaaagtatgggctattaactttatatgatttcaataatttttatgattaatatatttgataaaaatgataaataataaatcattattttaaaagaaacatgtatatccaacaaaaaaagccgtgtgtaatacgcgttggttcaaagggtaatttaactatggaaaatagtcctagatttatttttgttaaattgagaaataaaaatcattatataccaaaattgtaaacttagcaattttttggtgcaatttccgttgactcgattttttggaaaaagtctgtcaatttcaaagaaaaaatattatgtttaaatacttaagttgaatatttattcgtgtgcataataataatttatttttcgtataaacattttttattctatgtgaatgtatgtaactagttgtttgttgttacatgttaaaagtatgtactattaagtttatatggtttcaataaaaaaaattcaatactttttatgatgaaattatttgataaaatttaaataaatgaaaattgtttttttaacaacaaaccgatcatattaatgagaatttattttaaaatagaaaagccgtatgcaatacacgttatatttaatagaaaattcgtagtcaaatgatgaatttaattagcagtttaatttttaagaagttaaagatttagtcaaatgatgaatttaaatttattcgacaacaaaaattatcaataaatcaaaaatgtaaaactgacgattattctatgaaaagtgaaaacacaacggaaaatacaaataataatgatgagtttggggttttatttaaaaataataataataataatattgtttttgacaattagataaaaaaggtaaactttttttttcttctcctttgttttattttaaccccacaaaactcgaaaacctttttcccattttctcactttccctcttcttctcctccctcaaagcttttccctctcatttttctctttccgctttcaagcttcttttccctctctcaaaaaatg

SEQ ID NO: 1360 - DNA, 3000 bp, Unknown
  misc_feature (1)..( 3000): cDNA_ID_1011462_gDNA_ID_1620391_Annot_ID_155605 3000 nt of promoter + ATG
gttgaagaatcattgtacatacctcgacaacaaagaattttgtgggatcctcataacagttatggcgtactggaaagcaaaacagtaagtattctaggaacgacatgttttttattcttccataggacttgtcttatatggtttcttcttgtgcttttatttgtgtatgctaagtaaatctgacattcaatcatcaggggacagagagaatccaaggcatgacactacatatgtgtgaattgccccgagcagcatccatagatgggagtgcttttgagcagatggaaaatctcatatttctcaaattcttcaaacacttaaatgatagagagtccaagctgaatatcaattcaaagaatcgtatggtacttccacgcagccttaggctattgcattgggacgcatatccattaacaaccttgcttcccacatttcctctgagtcgtcttgttgaacttcatctgcgttacagcaatctggagaacctgtgggatggaaaaatggtaagctataaacgaaacttgtagtttgcttttcagttttcaactctcagcgtttacaaatttagaatgtcaccaacgccatccaaactgtcctttctgttgtatgatattcagtcgctcttggagttaaggatgctagatgtcactggatctaagaatctgaccaaacttccagatctttcaagggcaacaaagcttgaggagctgattgctaaaggttgcacgaggttggagcaaatcccggaaacaattggtagcttaccttcactgaagaaacttgatgtatcccactgtgatcgcctcatcaatcttcagatgattataggagaattgcctgcccttcaaaaacgtagcccagggctttttcggcaagcttcattgagtttcccagatgctgtagttacactgaactctcttacgagtctagccatccatggcaaattaaatttttggttgtcacatctccgaggaaaggcagaccacctctgctttagttccgagcaatggacccctaacaaatttctgaagcaagtacaaaagacgcctaagctcatgtctgagttttacggatttaaatcactcgacatcatgcagttcatctaccgtaaagacagtgcctctttccagtgttatagcttttcagatttcctctggttaaccgagttaaatctcataaacctaaacatagaaagcatcccagatgacattggccttttgcaggtcctacaaaaactggacctcagcggaaatgatttcacatgcctacccacagatatggaaaatctttctagtatgaaatctctcaggctttgcaactgcctcaaacttcaaacactaccaaaactacctcaactggagacactcaaactttctaactgtatacttctccaaagtccactaggacattcagctgccagaaaagatgagcgtggataccgcttagctgagctttggcttgacaactgcaatgatgtttttgaattgtcatatacgtttagtcattgcaccaatttaacatacttagacctcagcggaaatgatatggtgacgatgcctgtaactatcagattccttaggctgttgaatactctctgcctcaatgactgcaagaaactcaagtcaatggtacagcttccaccaaaccttacatctctctatgcacgtggctgcacttccctggaaattattcaccttcccttggatcattccataaaacacgttgatcttagctactgccccaaattgaatgaagttgcgaatctgatggatcgatttctgagatgtggacgaaaggaagaggtgaactttcttcccttgtgtttctcccttgctcaattcatacatcgattccagttccatatcttttcttttatatttgatcttaataggtgcctcagcgttttgcttgcttatctggaagtagagtgcccatctacttcgactatcaagcaagggaatattccagagaaatcagcatacccccaatatggcatgcctctgagtttgtgggttttgatgcctgtatcataattgcttgtcagagtccttatcacataaagctctcgtcatcttcttatagctgtaaacaggaagataaccagtcctaccgaattgacctcaagcccgatttcgttctcccaccggagagtactcgtagcagcaatgacaaagaggcattctcagcacatcacatgttcatcttccacgttccaagtaacgtagacttcaacgagtttagccttgagccaaaacttgtaatttcagaggagtttcagtctacaccgggcagaataatatcatacggagttcgagtagtactcaaaactgaagaggatgatcgaaactacgacataaactgcggaaacctatccaaaaaaaggaaaacagatatgttgacaatttgaaggataagaacgacgaccaaatcatagatttctttcaaaataaaaacaaatgaccgatgcttcatctccccatgtatattttcctcatcgatcgcccatgatcaggctgtttctcttccaatttttatgagaataactgtggatttttggtttaccatctgcaggcatgcgatcgctttctcttaacttgaaatctctgcaaatgcgtctggaatcgatgttggtcggtgagcggggaatttcgtcgtctataaatccagggaaaatcatagcaaatctgttttgtgcatccatcctctcaagctcaccgaaaaagtttccaaaattatttttcttttttaaactcaacatcactgggattcactgctctcccgtcatcaccgattcggcgattccgttctgttggtcttgtgtatattgaatttagtttctctgaacccatgcgattacggataaggcctaattgattcggcccatcataaaaaaaacaacttattaaagtgacgtaaatacccccaaaaccctaattcaaaagaacacgagaaatatcatcagccgctcaagctctcaccacagtttgagaagcgaaaatg

SEQ ID NO: 1361 - DNA, 3000 bp, Unknown
  misc_feature (1)..( 3000): cDNA_ID_2045893_gDNA_ID_1620391_Annot_ID_155612 3000 nt of promoter + ATG
gacgtaaatgactcttcgtacaaatgcatttagtcggctttgtgtgatgcggacaatggtttgtttgccataattacttaggatagcgagccgcgttttgcatagctagggaattaagccattggtgcctaggttttagcatttatccgcagaaccaaatatttttcaaaattttggttacaaattctaccgcaacatgtccacatgtagacaatcggataatcatctcccaacaacatatactccaattaaatagttgattccaatttcttatatttaaaatcaaatgatataaaaaatgatcattgaatattggtggctagtgccgggttgccgaaataaaatataaacgagtggactgaagaaagttttgacttggaagactacaaaatagacaatattttccgttaaagatagataataaaaagacaatgcttttgtttgtacctaaaagcactaatcaaaatcgaaaggtaataatggaggtgaagaagacatcattctcacataatcatctccgcatcctcagcttttgctattaatattatatttaatataatttgttacgtaaatcatataaattgttcaaaattatttactaatgtgcaattaaaaataaagaaaatagtggaacaaagaacgtgttcattggcaatcttaacaatcgacgagtatgaaaggatgaaagatccacctagtcctagaaaaacaaaagtgttcttaaaatgttatagatgtatctagtccttgattaataatttttttaaaaaaatactttcataatttttagaagatatatattttatcatgcttagtttaacttgtggaatcacacgaatttgttttgttaaatggcagtgagtagttggaactttagttagcataagagaaaaatatttaaataatttgcaatcctcgggagcggtgaggttaacgttaaggttaatgaaatacttagttatatatgaatgtgttaatatgcggtgcagcatagacgtgctccatattttagttttaatgcttattctattttaattaagattaattttgtggacattgggtttccataatttctttgatattttaattaagatttgataaatttgttttgagattttataaacgaggtttacagaactttttaagagtatactctagttctttgttcttagtagtatatagcctatcaatatattctcaaccagtttaaatagatttatttgactttttcaagaatttcaaaactaaaccaataattttgctatttatacttatttctttaatgggatcagttgcctatctttataagtattctatacgtcaatgcatgtatttgcaacgatttattaaggcatgtgaatgtgaatgaagtatgaagaacgtgtgattagggccctacttgattcaagcaataacactaatcgacatcacacaccaagacgtacaaccccaacccaacaaagaacaaactctaaaaattaaaaaataaaaactctgaaattgtctgatttagaataaatatatcgttactatagagggacgattggctttgatagtaatactttttttttgttttcaaaatattaaatttatgaatcaataatttacgatcattaatgagagattgatgactttaaaattatgtttaaaagatttaaataatggatgaatcattatggaaatctttagtcttgaagagtactaagtataggttttttttttttttcttttcggttttgtattccaatgttctttttcaacataagaggcaaatcaactagtttgtcttagaactgcgtttaattgaatttgacaataattgtatttttgattttttttatcatgatattcatattcaaatcaactagttatgcacccttgaaattcactaacatcatatgaggttggatatctcttggtaagttcagaaccgaaccaccacatgtccatatctcctcccgtaaaatcagctatgctatcaatcatattgttttcttcttgtttgagagatagggaggaatatttgggccggaggacagtttattcctcccggaagtcatttcgaatgttaatttgtttttgaaaaacgatgccatggcataatccgagggaaagagtctctcaccttgactaacaacaaacaatctaacttggtccgcgggcaagtggtcgaatcacctaacatatgctcaacagcaatacaacacaaccgatgttccccataacaattgtgaccctatgatggaaaccaaaaattagtcccaacatatataccataaaaatatgtaaattgataaagcagaacctagtgtttggaaaggggctctattctttctaccccaaagacaaaataataaagataataaaaaatgatgacaagagagacaaaagtaaacaaaaaaaaggattttagaaatgtaatagatttccaatatcaacgctcctttttgttcccgctttaacttttcccactcgcaaatcattttacctttggattcaagcctcatgatactttttctttttctcacactttttacactattctctgttttgttgttactcatctcttatcaaacattttaaacttgtcgactttcactcttcactagctaccattgttaacttttggttcttaattcatattttctgctccaactttgtagagaatcttttgttatcccaaagaaaaaggtgcctaaattcacgtttgacaatgttgcttgaaaaaggtttgatcttgaaatttcaaaagagggaaaaaagtaaaggagaaaaatttggagagacaagaagtgagtcaagggacccaacaacaaagacaaagacaaaaactttggattttgccaaatactatgattaatgctcattcaacactactattaccatttccatcatcatcatctctctctctctctctggttttggaaaactgcctgagaaaaaacctagccataaccatcttcttcttctttctcttgttcttgaacataattctgcttc

SEQ ID NO: 1362 - DNA, 3000 bp, Unknown
  misc_feature (1)..( 3000): cDNA_ID_2134579_gDNA_ID_1620392_Annot_ID_155635 3000 nt of promoter + ATG
aattatttataaccattgtttacctttacaaaaagaaattaatatattaaaaataaggataaaatttatgaattaatgcaattgaattagtgtatcttgattttttttgttttatggtttttacatttaggtttattttgtagattttaatttccttttgaatttttatttttaagccttgtagatctttatattttaattatttataaactataaccattatttacctttagaaaaaaaaatcttataagctatgatttatgtctataaacaaatctttggacaatgaatgactacaactaatttttttttttttttttttgacaccacaactaattatgtccacaatatttagatatgtaatctatatataaccctaatttctcatctatcttcttcactgcatgcttctaccatttccggcgaccatgatctccgaagttgaacaaccaaaagagaagagaagtttgagttctgagccaccgtcgttgatgtcactcccatacgaaatcatagagaacattcttgcacgtatctctaaatggagttatcctaatctctctctcgtctccaaaagtttcctttctcttctctcttccccgcaactatacaagacgcgatctgaaatcggaaccaccgagccatgcctctatttctgcttggaatcagctaaccattcatctccacagtggtacactctttggatgaaacctgatgaaaccctcaccggtaccggtactatacatgactattcgttgattccgctaccttcgtcttcaccagtacttcgtacatccacggtagcggttggttcggaaatctacgtaatcggtggacacttcaaccgctcttcctcagttcggatatttgattgtcggagtaacacgtggcgtgacggtcctaacatgacggtagctcgatcggatccagtcgcggttctcatcgaccagagaatatacgtcttgggaggtcgcgagatggacgagtctgacgattggtttgaggtgttcgacatcaagactcagacttggagagccttgcctagttttagggctggccttgagttacgccgctacattgtgtggcccaacagatactttccgcgtcttggtgatagtcaaactgcagtcagattaattaacgtcaaccccaatgctttggaaggaaagctttacgtagcggcacagataaatgactacacttacgagcccaaagatgatacatggaaagttgtaagcaaatcaagtataagaagagtaaaggtttggtgtgtgatagagaatgtaatgtacgcttgccatgacgtctttctgaggtggtatgattacgaggatagacggtggagagagatccagggtttggaagaattgtgttaccaccctacgaggggtttcagtggggcggaaagaatagttaactatggtgggaaacttgtagttatgtggcgtccggtgcaaagcgacggaaaagataaaattgaaatttggtgtgctcagattgcgttagagaagcgcagtaaagatgagatctggggtaagatagagtggattaattctgtgcttacggtccccaagttgtgtgacttgtgctacagttgtgtggttgtttcgatttgatgatttgtaaaatattgtataaacaatattgtgaaatcatccggtctttgttattttttatgtttttgtttttaatggtcttttacttgttttggtgtaacccgtacaagttaatcttggtgtcgctgatatttggtccagtataaccaatttttaaactggtgtatagtattttcttaattatagttttgggaaaataaacttgtcccaaataatgttctaacatgtcacataatttaggtttatttgatagattttaggtatatttttaactatttctaaatattatttctactaatttttttagaaaaaacattaaataaggataaaataaaaataaaaattaattgttttttagtgttaaaaaaaaagaaaaaaaatagtttttttaattactgtgcaaaaactttaaacaacaattatctcgttcagaacaaagagtattaactttaaaatattccaaccttgagttttttctttgactttctcaacaatataccgaaacatctcagatttcttcttatcaaactgttctggtagtcccaaatattttccgccacctccctcattgtgtattctcaggagatttctcattcttcgctttgtgtcaatgacaggaatccaaactttgcggtctttaattggctaagagaggttgtggcttggaaaacaagatttgaggattgtcgcttcacatgggtccgacgaaattccaacatggcagcagacacattagctaaacatgcactaccttcacatacttcttatcatttttctaattttactcctcatgtaatcacagacatactccatcgtgactttgtctctgcagttcaataataagattgatgttgatgaaaaaaaaaaaactattgacttgcgatataactctaaattttatagataaatatgcgatataattattgtcataaaactaatcactttttttttttaatataatttgacaacaaactattacctattttatataagttattaatcttaaaaaaaataaatgttcgtctttaatatatacattttgagattttaaaaatgaattataactataatttaaatttgagaaacagttattttccactaaaccaccactaatcacgtctttgtcataaaaatttgacccaaaacaattaaggaaaataaaatatattagttgccattctgtcacgatcttatcgaaactgtgagatttttttcttttttaggtttttacaaatcattttgaaattcactcttcgccttccccaaaatttcaaaacccgcctcttcacttttcgccttcctctacttatttagcctaaatctctcataaatctggaaaacaacattttctctctaaatctctctctcactcgtttcaacaatg

SEQ ID NO: 1363 - DNA, 3000 bp, Unknown
  misc_feature (1)..( 3000): cDNA_ID_1379170_gDNA_ID_1620392_Annot_ID_155644 3000 nt of promoter + ATG
attttcttcaaaatctctttttagattttctctactataaaaaggtgacaaaaacacaaaaacacaaaaacgaatgacacctatttacaagaatctgcttgtgaataaaaacacaaaacgaacgacgactaagtgctttttaagttaaaattgagctagtctttttcctaagagaaacgaccaaatatcagaaacaaaaccgaagtaggattctacttgtgaaaaagataactaaagcgatgaaaaagtcaaaagtaaaacaaaactcaacatcaaaaagaatagagtagtatatatgcttcatgagccgccccatcctagcatgaggaagatcgagaacctcttcgtccaattcataagcgtataagtgcttgatattgaagacattcgtggtgtgaatatgtggagaagcttcaaacggtatgcattgaaatttaatttctcaacgacctctagcataccaattttctagctaggccttaatcttattgtactcttgagccagaaaacggtctttgggtaagacaatacaccctaacctattacggacactaaattgaacatcatgccaatgtttctttacattttatttgtacttgaccgaagtcattactaaagtgccatgagatcgattgtgtacacgaagcaactcatccttaaaatccaccacactaccatgaaaacaatatgggtatagaagtaaggcaaaatcattcgaacaacaagagatgaaaccataaattatatgtaacagacagaacctgagcttccattgattgtgtgattgcttgcaatttcaacaaatcatattgcctaatgcctgattcgcgacttatttatatggataatacacatagttactcatgtatacaacatcttctataaagattttaaaaatatttccagttacatgataacatgaaaaatgattagttctatggttacatattgtcattcttttgaatgtatgcatctaaccttctagagtcattgtgctccattattgtatctctattaacggttaccatcaaaatttttgcatgtcattttaccttgtaaatttattacaagaataataaaaaccccgattacaattcgaaagaaagtaaatccgacgacccgagtaattgataaaaatttaacccaaaaataaaatcgatggtgccacacgctatgtcttgaaatggttttattaaggttttcttgaaatggatcttgaaaatcttccaagaattgttaaatatgtcatgctatatcatatatgtcatgatcaataaataaatagtgataactgataagtgactacttttgaatgtatgcatctaaccttctagagtcttacattctctttggtgctataaattttatttctcttttgcaacttgtcaaacttatatatcttgctcgttttaagtctagaaaatcagatttttttttttaatttgaaaaaaagagtatgaaaaacgtaattattacttcacctttcaataacgatccaaatttcattccagccatatacatacgattttttatatatttttataaatcaaacgaaatgacgctaagaaaaaatagagtgcacatgttgtagcaatgcaaatgacaacctcgtatgaacaaaacacgtgattcgatcatgaaaagaaaatacttgacatataatatggcgaaggtaagtaaagttgttcaaaatgtcttcaaagtctaactgaatttcatcatcaacatcctcatcattcatcatcattaccaccttcacatggaaatcgattttctatccaaactttcattgaatttttaatatatagttttagatattagtattataaacgaaaaaaaaaaaagatattaatattataatttcttataacggtagacactggaataagacaagaggaccagttgctttaataatataaaaatatactttacaaggttcatgcatgcatacattgttttcacgagatggataacatttgttaaacaaataaaacaaattatatgtaaccatgtgaacttttttctttctaatacttatcctaaataacaacaccaataatagtgacccgtaccgtaagaatagtaaatgtaaaaaaagtcattctttttgttaaaaagaaagaccagtaaaaagtcattctcttcaaaccattcacactgaattattatatttacaatcccattatattagtaaccttacgtattagtaccaaatttataactcgaaactactataaatgaataatcacatagtttcaattatgaattgttatcaaatcaataatcacagtttactaaacaggtaaaatctaaccgttgataatgagataaagaatggacaaaaacatcacgatttaatgtgataagaacaatcttatcacataaacaaaaaaagggacagggagttacaggtgaagtgttcctggtcaaattgaaacttggaaataataaagttcttgaaatagaaaggtttatttttaattgaaaacgatatttgagaatcacacatcttaagttgcctaacaatctacgcatcttcttcttttctctatcctattaagaaaactaaaaatagcattttctgatttaaaatatgatttgatagttgtattagatttaaacgcgaaacctcatgtatatacataataatatatttattagaagtaagataacagattttctttttctttatagtaggtaaaactcttgaatttcaatacaaataattgttctaaagaagaacttgatacgaaaaaattgaccaattattggtcaatatattaaaaagaataaattattttagtgttcttatttctcaaatgaaaactagtatatagagaggagcttcgttgctcaaacactttcctctctcttaaaaacctcaactttcttctctcttctcaaaaacccttccctcttcgtctccaaacaacaacaaacacaacaacaacaaaaatcttacaagaagatcatttttagaaaccctattaggataaaatg

SEQ ID NO: 1364 - DNA, 3000 bp, Unknown
  misc_feature (1)..( 3000): cDNA_ID_3061918_gDNA_ID_1620392_Annot_ID_155650 3000 nt of promoter + ATG
taatggttggaattgtttgtagtgctttgtttcttgtttttccgaccactcgatatggtgttggttgcatgactggttaatttattttcacttttctgttttttggtttgttttagtatctatttcgtattttccttgtaatttagattatctgatttaaactccaatgttctactatttttatctattgtattgttaaataaaatgttgtgttgattctatctagacttgtttgataggaggagtacattatgacgttagtaaaagcttcctcaatgcagtactttttttgttaagatctcaaactatgcaattaattaccaattgagtccgtgatgtagtggaggccaaaaaaaaaaaaaagagtccgcgtgggctttgtcctttttgttgtgtaggcatgtcatgttggcccaaagtcttaatctccacgttgtgttttgtatctattttatttagattagattatgagttctttagatttgagcttatcaacccctgagttgtataagtgttcattgtcttcagtttctgatgaattgataggattaaaaagtgattttttttcataacacgttccttgtttcggcactctttcaaagatatcaacatagtcaagaagacgagaaggtcccttgttcatatcccgcaattctacaaagaaccagcgttatcaaagactaacaagaagaaaagtgacaaaatataagattggaagaaagaagaaaaaagagaagaagaagaaatttcaaatatgtgagggatcgaacaaaccaaaatactagtatttatatggttatgctttgatatcatgtcagaaaattcatcagtatgaaaagaaaattcttaattttattgattagccagtaaaattatctacataaacacataacttgatctacaaattttctataaatacgaagataaaaagtctacccaattagcaataatgaaatggagttttgtttttcctagtaacgatatgaaaatttattcgaatcaatcttgtattgtaatattcgaaatttgatcaccatgttttcattaagcaaaaattctccgttttcaccaagagtcacttaatgaacttagccagcttttacaatatagttcattcaagttcttttttttttttttttacaatatagttcattcaagttctttttttttttttttttacaatatagttcattcaagttcttttttttttttttttttacaatatagttcattcaagttctaattcgagaatgttcaagtcatgtgatatatcaacgagacttgtttttatacgaaaaatgctaattttaataaaacaaaactcaaataacgtttctttagttcggggaaacagtcgaaaaatgataaaatatgtttcctaagaatctttatcagtcgtgcctccaagtggggataatataataaatgtaatgaaaaaactttattatatagtatatatttgtgatttggggtggtctgaaataaaggtactatatacttatccacataattgcactttttcaatgttagacttggcgttcaattacttcttatccacaatattgcactttttccaaatcgacttggcgttcattagtaaccacaacttctaacatcgacttattacagccacgtatctctgatatgttgaagattttatgacaagaatataggcaaaaaagaggaaagaaactgaagatccactatatagtaaatacttgtagcttcatttaaaaaaaagaaagtgatttcaatgttaatttatttttcctacaagtaccaagctaaaactgtaactaaatgactattattatcagcgtaaaaaaacacatactccttttgttttttttttttgattttctagaaaaaaattgtttcaaaaagattgattttttggttttcaatgcaatatttatttagttataattgataaattgtaaacttcaataagaattattgaatatcattggtttagagttattgaaaattataaattacaaagaataatacatttaaaagcaacatttaatatgttttcttaatatttgtgtttttcctaaaaaatcaaagaaaaaagaacacaaggagtatcaatctgtaaaatggatttgtttgaagacaaagattggtttttttggggataaaatactatatttttttagtattttaattttttgttggatcttcttagttctttaaaaatgagaaaattaatgtttatatcatgtaatttgtttctttcataaatatgttttttttttctttctctccaaatctaatcatgatattgttttccatggatatggctattatagaaagctaggaattaaaaagtgtttcaaggttttaaatatgttttttgtttgttactctaaagtttgttttttcttctgaaatttcatttataaacagtaattttttaataaatgtgtgggtaacaaaaaatttattgacatagttagaattagaaaacatgtaaattagaagttaaatggcctttaatcaaccatttttacattaatttaaaaaaattcagacttttaaaataaaaaagttaaaaatgaaaagaaaagtaaaagtaaaaaaaagtgctgaccactgaccagattgaaaaggaaaataaaaagaaagccaaaaagagacgaaaaagagaaaaaaaaaagtccacaaaaacaaaaataaacttgtggctaagaatcctcacgtgtgatgacgtggcactctgggcgaatcaaaaggttgtacaattcgaaagatcacaaacccaaaaagcaaaatctgtaaatcttttttctttctctctcgcaaagacaaaaaagcattcccaattaacaaatctagaaatcaaaactcagacaaccaccgataacaagacagtcgtttctctctctcttttaaacaaataaaaattggaacttttttcctctgtcttctcaaaaagtttccgctttttgctcgctggagaagaaagaaagaaagaagtgaaaaggaatcattacc

SEQ ID NO: 1365 - DNA, 3000 bp, Unknown
  misc_feature (1)..( 3000): cDNA_ID_2105310_gDNA_ID_1620392_Annot_ID_155639 3000 nt of promoter + ATG
ccgttaatcttacaatcagcttcatcagattcaaactcaagctttggagaaaagcctgcatttttagctgtcacatagtaaactctcaacaaagtgttgaaagacatcgaattcgacattcttccacaacatttgacataaccactagcaaactcaacccaactcaatccttctttatcaggcacgaagaacaaatctactaaagatgatcctaaatgctccaacaatttgggaaacaagtctgaaactttttgctctccttcagtagtaattgtatcgtagctcaaaccaaaactttgctgaaacaaagatccaatttttataaccctaagttagattatacacgattctattgaaaacccagattaacggaaatcgaattataccttcaaggattgaaaaggaacagtattggtttgagaatcgacgagtttggagaaggatcgtttaagcagaggaagagctccggttgaagcagcaaggctttcgatttctcgtttctccgatgattctttgtcgtctgtagaagatgaagcacccatagtggtgaagatgatcggagaagatgcaaaaatccgaaattagagggaatgatcagagaaattggagtccatgattagaaattttgtttttgatctttaagaaaataaagagacgtttttgaacagttccatagatgatcttttcacgattcgccacgtaattggagtcaattgtggattgatccggttccggttcgagaaaatattaaaccggactgattagcaaaatgtatttaagccgaataccccaactaatattttcaccaaaagaaaaagtttcaaagctcccactaaatttgtctatttcaaaatattttctagctatttggagtttacattgacattttaactccaaaaaatatttttacaattttggcaaaaaaaaaatgtaatttaaaaaatatgcaattctttgagtttgagagaaaatgtgtttttgcggaaaatagaaaattatattatatatttaggttccatacactgtctaattaatcattgtcttatttgagtttggtcatatttggatacggtgctattgagtttggtcatatttggatacggtgctattgagtttgtatcattagttttgttcatatttggacttcacccatttagatctgaacagctcaattaacatctttagatagatgtgctcaacagaaaaattgagattatgcaatttagtgtttagggtttaggggttaggggttagagaaaaattatttccaattcaaatatcatttgcggggaaatctcagactattttcatgcaaaatatatagaggctaatttgaagagggtgcttgtaacaagacccagagaaggattttagcaactcatgggcaattaatgttgtccgtatgtacaaataaaaacccaatggaccgacttcaaggtcgcagcatgccagcatccaaactcgttcaggttatctagctttacatttgaagcaaagacgatcacttgcgttacgattagttagaatatggttttggtaccataaaaacaagatttatatatagaccataagggtttttactttttttttcttttaagcttcgacgccaatatatacatatgtgtagagaccaaaatttggtcgatgaatatacatcaacgacgacaagatataatatatgataatcttcaatttttgaatttttctagtctttgttaacgtcatgcatggatttttataggaaaataacatctatattgacaaaaattattttaagaaacaggaattcatagaaaactcttctttttaaaacatctgactttattatatcctaaagggacaagtagaaaactctttatttgttatatgtcactattctgttacaaatttttattgtttcaaataaaaattaattgcagaaaaaattcctatggaccaacaacgatggttagtcttagtcagcatgagttctggctattgatcagtgatcaccaccaatcaacgtgtcgccattagtcattaatctgttatgaaagtaaacgtatagaattaatctttatcatcacaacatcattctatatagcaaacctggtgcgggtagaacccgatctttatccgaaatatatatctttaccaaaaaatcgaactgaaaaattcgacatcattcttccatttccagattactaaaattcgaacaaaacaaaccgaaccagtcaaagaaacaaagcttaattattaagaaaacccactatactattttgttatttgtttgtttgttaaagactatactatctatatgttccggtcaatacactaatctctcacgatggatcggtccgtggacttttgttgaatagtgatgtccgtggacttttgttgaatagtgattagtgaatgttcatgttttggatattttaacacttttgtgagacggtcagtgaacttttgttgaatagtggatgttcatgttttggatattttaacactttttcttttcctaaagtattttaacacttattcgattaaccagtccaaagtcggtgcattgtagatgaaaatatcatgcactaatacgagtttccttaataaagaattagagttgaatcaaagtttaacgcctgctaaaacaatattctataatcacattcattataaatgattacacactattaattaggaattagtttgatagaaacgaacaaaagagaaaaaacaaacccaacatgatctgcaatcgtcaacgcgcgaagccagctcatgaccaatcacataacgcggttttcagttttgaattggattacaacgtcgtcgttttgtcaaattacctcaacactctagcccctttcgctgacttcaacatcaccatttgacttctcaatccctctataagttactcacgttctcgtatcactttccatgcatctaaaacaaactctatctactaactcgaaacacacttgcggtcttatctaaaacacaaaccaacaaaaagaaaaaatg

SEQ ID NO: 1366 - DNA, 3000 bp, Unknown
  misc_feature (1)..( 3000): cDNA_ID_1663090_gDNA_ID_1620392_Annot_ID_155640 3000 nt of promoter + ATG
taaaacaaaaaattgtgttgcctttgttaatcctctttacttactcatatctaaatacaaacacaaaatattggcatttaaaacaatcaagacatagttctttgcttatatatgatatattgattgttgtataattagtatatatataaacttacgagagaaaccgaatcacgagccgctaaggccaagatatcagcacaagagacaacaccaggacatgctgcctcgagctgcctcttggcatcgtcaatgacctcaaaaccatggaggttaacgtttgcgccagcggttctttcagagttaggtcccgataaaagcaccgaaccatcacaaccttggacaaagcaatcatggttgtgcattctcagtaacccgggtgcaacctttggatctgaaccaaagtgagatgccacagtggtccgaacaattgtctcggcattagggcacgtagtcgagtagaacccgatcctcgtaccttggccataaacggcgatgagacaactaaggaagactatgaccaaagcaaatgatcggaccaagcccattttttctttttgttggtttgtgttttagataagaccgcaagtgtgtttcgagttagtagatagagtttgttttagatgcatggaaagtgatacgagaacgtgagtaacttatagagggattgagaagtcaaatggtgatgttgaagtcagcgaaaggggctagagtgttgaggtaatttgacaaaacgacgacgttgtaatccaattcaaaactgaaaaccgcgttatgtgattggtcatgagctggcttcgcgcgttgacgattgcagatcatgttgggtttgttttttctcttttgttcgtttctatcaaactaattcctaattaatagtgtgtaatcatttataatgaatgtgattatagaatattgttttagcaggcgttaaactttgattcaactctaattctttattaaggaaactcgtattagtgcatgatattttcatctacaatgcaccgactttggactggttaatcgaataagtgttaaaatactttaggaaaagaaaaagtgttaaaatatccaaaacatgaacatccactattcaacaaaagttcactgaccgtctcacaaaagtgttaaaatatccaaaacatgaacattcactaatcactattcaacaaaagtccacggacatcactattcaacaaaagtccacggaccgatccatcgtgagagattagtgtattgaccggaacatatagatagtatagtctttaacaaacaaacaaataacaaaatagtatagtgggttttcttaataattaagctttgtttctttgactggttcggtttgttttgttcgaattttagtaatctggaaatggaagaatgatgtcgaatttttcagttcgattttttggtaaagatatatatttcggataaagatcgggttctacccgcaccaggtttgctatatagaatgatgttgtgatgataaagattaattctatacgtttactttcataacagattaatgactaatggcgacacgttgattggtggtgatcactgatcaatagccagaactcatgctgactaagactaaccatcgttgttggtccataggaattttttctgcaattaatttttatttgaaacaataaaaatttgtaacagaatagtgacatataacaaataaagagttttctacttgtccctttaggatataataaagtcagatgttttaaaaagaagagttttctatgaattcctgtttcttaaaataatttttgtcaatatagatgttattttcctataaaaatccatgcatgacgttaacaaagactagaaaaattcaaaaattgaagattatcatatattatatcttgtcgtcgttgatgtatattcatcgaccaaattttggtctctacacatatgtatatattggcgtcgaagcttaaaagaaaaaaaaagtaaaaacccttatggtctatatataaatcttgtttttatggtaccaaaaccatattctaactaatcgtaacgcaagtgatcgtctttgcttcaaatgtaaagctagataacctgaacgagtttggatgctggcatgctgcgaccttgaagtcggtccattgggtttttatttgtacatacggacaacattaattgcccatgagttgctaaaatccttctctgggtcttgttacaagcaccctcttcaaattagcctctatatattttgcatgaaaatagtctgagatttccccgcaaatgatatttgaattggaaataatttttctctaacccctaacccctaaaccctaaacactaaattgcataatctcaatttttctgttgagcacatctatctaaagatgttaattgagctgttcagatctaaatgggtgaagtccaaatatgaacaaaactaatgatacaaactcaatagcaccgtatccaaatatgaccaaactcaatagcaccgtatccaaatatgaccaaactcaaataagacaatgattaattagacagtgtatggaacctaaatatataatataattttctattttccgcaaaaacacattttctctcaaactcaaagaattgcatattttttaaattacattttttttttgccaaaattgtaaaaatattttttggagttaaaatgtcaatgtaaactccaaatagctagaaaatattttgaaatagacaaatttagtgggagctttgaaactttttcttttggtgaaaatattagttggggtattcggcttaaatacattttgctaatcagtccggtttaatattttctcgaaccggaaccggatcaatccacaattgactccaattacgtggcgaatcgtgaaaagatcatctatggaactgttcaaaaacgtctctttattttcttaaagatcaaaaacaaaatttctaatcatggactccaatttctctgatcattccctctaatttcggatttttgcatcttctccgatcatcttcaccact

SEQ ID NO: 1367 - DNA, 3000 bp, Unknown
  misc_feature (1)..( 3000): cDNA_ID_2996260_gDNA_ID_1620393_Annot_ID_155667 3000 nt of promoter + ATG
cttttagattttgtttcggcctttcattctaacatcaatttttttcttgatttggtaggcattgacaatacattatctgagttatgcaaacaagatgataatttccgtcgctgttgatccaatgattattgacgctcacaagctatgtgatgaactagaggaatctctcaagaatatgaaacttgctatcttagagaaaggattaccaaatcatgtcaattaagctccaaaacctaaagtaagacgtcagtgataatgtataattgtcaaattaatttgtattatgcaagggcaagctttgttatattatcaccgcaaataaaacattcttcttggttgtattatgccgtcgttatgttaatccgtattaaaaacttagtagtgaatttgtgtcatgttttgttttgttattgttcattcttttaccgcacttgtattatcatcatttgaagatatattaactttggtatcctattacaaatgaacaatctaacttccatatgactagaaaattatttctgcagttttcaataccgaccgatttctatggactcacactccacatgcaatagttatatctgcaacctacaatatatgtgattatgatgaacaacaaccacaaacaataaaatcctacgaacaaaaaaatatttttaggatatataggttctaaatatatactttagattattgttcgttttggcactccatagctaaattttctagatatatctattctctgcctctataccatcaaactcccaaccatttatctatttaagtcttgtttggatgcatttttccttccttctaatttaggagagaattgtcagccgatgtgtatgttagttgcaagatttgacgattaaattgattgaagttttcttttcatgaagttatcttttcatggttgtagtatcactgccttaataccatcaaactcccaaccattgtagatgtccatttaagtatatttggatgattttctccttctttctaagagagaattagttgcatgatttgattgaggttttcttttcatgaagtttccttttctagttatcaaaaagagttttattttcgtggttataatgtcactgtcttgaaaccatcgaactcccaactgttataaatttccatttaagtttttctttggatgcatttctccatgcttctaaattaggagagaattgtgtgatacaatatatttgttactttcatgatttgaaaattaacttgattagagttttcttttcatgttatcaaaaataagtcttattttatttgacgaaaaatcgtagaggacaaacaaaagttttttttttttttttatggttatactatcattgtcttaataccatcaaactttcaaccgtcttagattttcattaagtatggattgaatgcctctctcttttttctaaattaagagagaatgattagacgatatatatttttttttgtcatcagattttatttagagctcaaaaaaaacaattatgaagaaaattgtttacataagtgatatgaagcagttcaatacgaatttttcgtgcctgcctttacatttgcagttcgagaaattaaagataaagaaaatcttgtgaattcttccttatcggtcttgaatttcctccaaataagatgaaaacgttggccattcggttggggaagacaccatcttcaccaggtctgaacagtctgtaaaaaatgctactttttggctatcgacagtaatcatactaatcatacacttcatggcccagagtaaaacttcgacttttgttatatgttagtagacgatatatgttagttgcattatttgaggattatcttgattgaaattttctattcaacatatcaaaagaaaacaaagtttccttctcagtccgggtatttaaaactgatcttaacgaaacaaatcatctaggttctaagaagctatttattatgcagattcgacgatgaaaatctcaagaaatttactaatcaaaataaaacaaatgatacctaagagatgggcgtattagtcggcctcgagcccaaatgcttgctgaagccgggttttgagggcttttaatagtgtttgaaaatgggaatctgctttgagaaatgtgagattcgaaactcatgtcgatattggtaaggaactaaggatcattctcaaccataaccaaatatagtcttccatgtttctttgatttgcttatgttgtcgatggagattttgagaaaactattaatgtagtaaagatagtaacaattttttttttttaaaagatagtaacaatttttttttttaaaaagatagtaaaaactacgaacatcattttacaatagactatagtctatatcgtcgaaatcggatatggtcaatttttagttcgtgtataatttgacctattttccctcgttttcaacaaaaacgacgtcgtacgaacgaaccctaaaatctcgagcagcagagccaaagctagatttgattccctctcttcgatttttaattccttgctcctctgctcgtttctctaccggcgacgtaacctctctgtctctgttctgttccttgcctgctcgaggtacaaagctctctgtttcgtatctgctcttagctctcttctgtctcgagactctcttatctctctctactttgtattatatggtttaatctttacgaatccttggaaccttgccattagtgtttaggttgggaaccaatagataatgctatatggtttaaacttctataagcttttccaggaaattgcaaatactaatcgtcttcgaaaattttgttcttctttagtttcaaatatgaattcagtagagacccttatagagttagctgttgatgggcagaaaagtttcaatcttttagcttcttttttgtttcctgatgtgtttgctcacaaaccatttaggtgtgcatcttcttggaatcagctgactttgcggtcaatcggatttcttgggattgtttggagaaactttggaggtgatg

SEQ ID NO: 1368 - DNA, 3000 bp, Unknown
  misc_feature (1)..( 3000): cDNA_ID_3061954_gDNA_ID_1620393_Annot_ID_155675 3000 nt of promoter + ATG
agacctgtttttctgcaattttaatttttgggactccacgcagcttcctttcttccaccactcacttgcaggaaattaccaaaaagagagggcaaaaaaaaaaactaaaaaagtatactaagtccacgcaactcactttgtaaaacttttacctttaggaagttttgtctaaaatgccataaatccaatttttgctttcaaaatgtgcaaattatgtcatcttgtagactgcataagtttaggaagttatgttatctttaacggtcttcttaaactgtgtcgcattatgcagattcaacaaaaaatgtgtaaaaattatgtcatcttctaggcaattatgttatacctttaggaagttttgtctaaaattgtgtaggcaaaattatttatataataagaaagagttggtggagactaaaagtactaaatttttaggccgtagtccaagagtcgtttcttaagtctttttttttttttttttttgggtcaaaagtcgtttctttagtctttcattagtccaaaaaggactactaaaagtctttaattatccaagccatcaaaggtgactcctttttttgtaactcctagcaaagacacgttaggattactaaactcttttatactttggtaatgtctctctattatcagataaagagtaaggttcaaatagagtcacttctgcaacttttgttcactctttaaggagtaagctaatcacagtttacattttggccatcaaatgttgtgttgaagtgacttatgtagaaaattgaaaggtagtttacgggtgcatgcaatatatttcccggtcctctagaaacatcataaaggtttagaggtttgtaagaaatttcttagtagacttataaaaatgatggtagaatatctagaacctttgtaagctatctttggaggctataaatacatcatcaccccaatcatttgtaatcgaccgaataaaaagcaagtttaaataaaagaagacagtgatgatcatgattcttgagtcaatcctttgctattttcttaccacttttgatatttttaaccttgagaaatatatgcttgcattaaaaaaaaatgtgataagatacataatacagataatattatgaacaacgcatctctgaacctcttctctaaatcttcacttggccgcgacttctgtgactcctcgtatatcaaaggtcttcactttgttgaaatcattattcactgatgaagaaatgacatctggtccatacaactcgttgacattcggttcaacatcgttgctgcctacatgtgatgagctccaatatgaataggacttgctttcttgcataggaggcctcttcttgtcttttccatcttctctttttttaaccggctctagcaatctctctgctttcaggggtttgtttcctttcttgctctgcttcttcttgaaaaacatgaatttgaaacaactaagacatcttatagacattttcgtgggggagggtgtacaaacaagcacaaattgtacagaaaatatttgatttcttaaagatgtttaaatcttcagtgttgagagaaggagacatgagtgttttagctgatttaaatcttaaagatttgatttcttaaagatgtttaaatctttgacttatcaagatttgagtgaaggcagaattgacccatgcagcttcctttctttcaccactcacttgctaggaaactacaaaaatagaaaaagaaaactcacggcaaccaaaaacgcgaactcctagagggtttcgaagactttgaaatttgtatcagacatcaaatgaaatctttaacttcttttacctcaatcagcatcactaatcttcatagttgttaccaacgagctgttggcccaatggtaaatctcctaggtagatgtgctgattcgaggtgggagggatattttctccaaaaatagataaatttaattaggtatgggtcccgcctctaaaaaaaatgtagaatctttggatttgaacttccacatattcaaacaaaaaaataaaatcttcacagttgttcactgatattgtaaacataagatttataaagtttttgttaaaccaagataattgtttcatcttcatgtgttaacaaacatgtgggctatctcctctgtttaaggcccattagttgatcttcatttggccttgtctacttcctctgttcatggctctatacaaatcctgaaatcagggcatttacattttcccttttgacagaatccgaaagcgaccatgagttagatagcgattctccagtttactcatttgatacactgctaagaaaataaaactggatatagccatatttagtgtcatatcttatctctgtttgagtcaaggaaccatccaaaatcaatccacaccaaacacataacgccattaggaatttaggatcaggcttgtccattttcaaaatcctgttaaaagaacaaactaaaaaaaaagaaagtgtttagagattagacacgtcgtcgtttcacacgcgtaaactcgtggatgatggaagaaagttaaaagctcgtgtttcgaaagcaagggtttttggaccagtcgtcactttaccggatttttgttttggtgctcgacgactctgattcgaaatctctctctctcggaaaagctgaatctggatcatcaaagtaagtctccatcgttacttttatctcttcgtgaagattctttaatcccatttatttgttcatatttgcaatcttcgaaaattcctgaagctaaacaaaaatgggatatagcgacaaagcactgaaattggacttgatcaacagtgtttctctgtaattagagcgaaatttggaaaaaagatgacatttttctatgatttgcgatgtctgattcattcattcccacatgtttaggttctcttgtgtaaagtttgttcctttcttatgtcttcttatccaatttttgcaggtatcattttaaagtttgatcatttcttctttgggtatatagggtagtattcaaaatg

SEQ ID NO: 1369 - DNA, 3000 bp, Unknown
  misc_feature (1)..( 3000): cDNA_ID_2134555_gDNA_ID_1620393_Annot_ID_155686 3000 nt of promoter + ATG
cgttccgacctactgtactgtcatgatacgaggtatatttttgttatatataaaaacaacgataacctttagaagtcattaaaagaacaatgactaataggtctttattttgttgggcttacttaattttgagttgtgacaactatactttccagcccatttgttttttcattagaaaaatgttttgctactttgcattttacaaacccacaatgaaaaagaaggtagctggatcatgtgtttttttttctacaagtctgttgaaaggtggttcaaggaaaccgtagtccactaactatccttagttagttttgagttcactcaacctgagtcttcatttgcaaaaattgactatcaataaccgactccgattataacaaagttcaagcatttcaaatggccttattgaaagggcgaaacaatttcctgtcatcctggtctaataaaatccttaattatataaccaaaaagcgatatattgtctcaatgttgttgctaattattttctttctaggatgtagcctgtccttttgtatagataaatgtggttaagaaatttaagttggggaggtcatctattagttaagtaggaaaaatgtaagatcacgagcaagcacgatggatcttttttttccttatttggaaaaatcaggacgtcaaaagtatatatttgactaaagctggaagcacgaatccaaagataaatatcttgaattgaaaagtcctgaagaagttaatataaagataagttttaaagttctgtaggattattgaaaatggggaattttgttgaagtcgtcgtcagattaaagaagacatggaagctacgttccaactacttggtttaattagctaataaataaaattattaaaaaaatgtatcaccattattgtcatgtaagtcatgttcacattcactttcctttcgcaccataaaataatgtgacttgacccatagctttgcttgacttgtacatatgtgaccccttactcaatatagtactaatacctatacaatatttaacaatttgctaataacaagaacaaaatacatgtgggcaacgtttcacagatcagatcaaagtcacgtgcgaaagtttatatatatatatatatatatatatatatatatatatatctcttatgtgttgatatctatcaatttacattaaccacccgcagaagaagatagggttgttaaattgatgggtagatagaacttaacattctttacaaactttgtaatttgttgtatagtttcatgaatggtgttaattcatggcctgaaaataccatcgatgtatacaatctgataaggataaattgttttggattgaccatctattagttttaaaatatgattgtataacttggattggttagctttcagattatactatatattcaaaacaagcttttgtacgtatattatatcattttatccgcttaaaatgtaattactaatttttctttcatataagattcaagtttacctaaagaaaaaggattcaagattaccagttatcttttgcaaagcttattaattataaattcttaaaattttagattaaattaaaatatggaccgagtagccaacgaatgaatctcacatcacggcatagttgactagttgttgttagtatataatataatcaacattgctgcttcgttctgacgtcaatctgctgaatcagccccttcaacaaaaactacgtcatggggctgacgtcgagtgtccgacgaaactaatgccgttttcattggtgcattagtcgccactcgccagctacatcgcaattatttctctctttaagcgttgaaaaattgtctagatcttacttgttaatgttattctattacctaataattatcttttgtctggtctaaatacttacatttttatttaaaatctgaaccaaaactcaccaaaaaattagataattttaccattaaagatatccacgactagtggagtattttcattacaaaaaaatgaattgatcatatcatatgtgttcgaagcttattatattgagcaaaaaaacattatttgtacacgtttcatctttgatgaggtaaacattgcgatggacgtgtaaaatatgttatactttttttttttgtgaacatccaatctattacatacatttgtttttttttgtcatatgaacgtaaaatatattattttcaaaactctatattattagttaccgtataaattataattaaaaccacctatcaaaatattaaataaaaaatatttaacgatatacaatcaacaaaattaagcaaacaaatttattcttaaatttcatctgctatatattttcaaaaaaaaaataaaaaaaattgcgacacatattgaaatggaaagattacaaaagaaaattttaaaatcattgctaatttggggtttatcatagctcatatctctctctaatatatctgactttgtagaacacagttttctattagattcctcctatcttgaaaccttttagtgttctgaaaggagtagtttttaatttttaatctttaattattaagcgaaccgcgtagattagtgtaataagagaaacagataaattctgaaacaattaaaaacagattgtatataattaagtgagccgcgtactgggaaaggtatataaaataaactctgtttcctatacatcatgacagatcatatgctaatgtcaacacctaatctatctttttgtctctctttatttagattcacgcatataagtctagcagagcacatgtcctatatcgaaattataatttatcattggcttcttaaaatataacctagtgtatgtaaattatatttggtaaacccaaattggcaaagtcatttgggaacgtgtatgtacgactagtcctataaattctgatctccctatccgttcaaaagtttatagcacagagaagagacttgagaaaaagaaaacaaacaagaaacacatacacacacacacaagttcactatactctatg

SEQ ID NO: 1370 - DNA, 3000 bp, Unknown
  misc_feature (1)..( 3000): cDNA_ID_2134512_gDNA_ID_1620393_Annot_ID_155674 3000 nt of promoter + ATG
aacttatgaactttaacccatttgtttaataagtagcaaatagtccaacaattttatttagagtacattattataaagaaaatcacattacataacattaattaaaaatatatatttacgatacaattgtagacatataattctcccacaaatgatcaattaatgcattccgaagtgagaaatgagtttctttatccttaatttttctgaatcgagcgagataaaagttgtttttgcattttagtttaattggattaaaataaaagaaataatttgtttagaacaaaataaatactttgttattatttgaaggatcattttgtaaataagaaagttcaccttcaaaaaatgaagatgttaatagtataccttcaaatatgaagatacactgttcaattcttcattttgaagataaaaatgaagtaccattagagaagaattcttcatttttcacttcaaaatgaaggaaaaggtgaaaaatgaagcatcattggagatggtcttagctaggtcggctgattaattggctatcggcccgtccttcttcttgctacctaatatgtgacatattgtggctttttgttttactcctttaagtcatctagaatttgtttatatatcaaaagatatgcgaacagttatagatggattagtttgcttatactaaatatttttgtatagaacatcaaattgcatatgctttttattataaatataagtcttcctacacaatttcgctctctcaccaacaaaatggatgttgaaccggctggcctacttccttgcgagaagaaattcaatgcattttttacttacgttgtgttttgaaaagacatgatgattatgtaaataatgtttttgtttattacatatgtaaattaacatattttataatttgttttttaaaaatgtataaatggaaggccaattaaagtccttgagtatcaatacatgaaaaaattgctacatacatattttctgacaattttaacttttcctagaaatacataccaaatcacaaacccgagctcatttctattttatttgttcttcattttgaatgtacactgatgtttgtccccaaaaaaaatgtacactgataaaataatttaatagaatgattcaggatgtcaacgcgtcatcaaaagttcaagactactggaccaaatggtccaacaccaaccttatcgtaatttatctataggtgtgttttcaaatggataaaagattaaaagacatacatgatccagatagatgaaagcaaatgataagacttaatataaataataaagaatcgtactgattttttgtttgtaatgtgaaatagaatggctcgcaactcaaagtgtcagactctatctatgcaaaaaatgtcaaagacacgcagcttgtttatataccattcatattgccaaacttttggaccaaaatatttttattaagatcatataaacacaaagagccaacccactgtgatcggtgtgataaaatcccaactacttggagcaacatgtagtttacattattaagctgaaactctaaagatcatggaaatatatcaatcatatcactgtagggtaagtccaaaaatagaggtacgtacgaactacgaagacaacataacgttttagtttctaccaaactttattgactaagtacttttttttttaattgactaagtacttcatatagaagtgcaccgattattgcaaacccttattaatggacggcaaagaagagaaaatgacgacagcttccagcttcctaactcctaattgcatatatggactatggtaggtgtccttctcgtcagatcacatgtttgggaagattaatcattggataaacttaaaagaattgaattatgattagaagttatctgaacatttacttttgaaaataatatattacctaacaaactagtattattttggctaacgtcctatagattgtgtttcgaatagttttggaccttttggtaatagaaaaccaagtaaatgaagatagtacagtttcagtgttttgagaaaaaaagctgaactaaaactaaaatgtttaaggacacaatatttagtttcaattagataattcaacagtttgaacaattttttttttttttttttgaagtcatttatttatacaatgttttaaaacgcattaagcatttaggcagccgacaaacgcctattgtctaactgtaaataggcgcttccacttaggttcatattgcatatttactatatgtgtatagtgacaaaaaccaatatttctcttattttggatgaaggtatagtagttgttaaatgttcaatataattaagcattaatgacaaataaaataaaattaatttagttgataaaaagataatcttataaaaagatcgatgaatagatataatggtttactgaattctatagctcttaccttgcacgactatgtcccaaggagaggaagtaccttaactataattctgaacataattttgtctatcttggtgagtattatatgacctaaaccctttaataagaaaaagtataatactggcgtaacgtaataaattaacacaatcataagttgttgacaagcaaaaaaacatacataatttgtttaatgagatatattagttatagttcttatgtcaaagtacaattatgcctaccaaaattaattaatgatttcaacaggaagtctgagatgatgggccgacgtgtagttacgtttcttgaattgtgagagatggtatttattatactgaagaaaacattatttactaaataaattttcatttcacatcttctgtaatcaatgcgggtagatgaagaagttgttaatacgatggccaaccatatggatctcttttttggcgtttctatatatagtaacctcgactccaaaggcattacgtgactcaataaaatcaagtcttttgtttccttttatccaaaaaaaaaaaaaagtcttgtgtttctcttaggttggttgagaatcatttcatttca

SEQ ID NO: 1371 - DNA, 3000 bp, Unknown
  misc_feature (1)..( 3000): cDNA_ID_3062012_gDNA_ID_1620394_Annot_ID_155694 3000 nt of promoter + ATG
acagttggtgatttgcaacagataaggaaagtgcacgtaagctaatgaacggtaaattcaaattctccaaacaggagataaaaagtgtgggtaaccgcttgcaccacagttactcaacattacaaagagtttcaccttccagcattgcgattcactaattaaatttggtaaaattgataagaatgcaaaatcctgcaaatggttgaaccctatcatgatatattctacaaaactagatacatacttaaaggctgctaactaagaattagatccaagtacatcaaaaacaatctaaagatccaatttagatgcgtcatttcgcctaacaagaagagaacaacattcactcacaagtctatcctcttagaagcatgaaccgtagaacattgccctctattatcatcagcacacaagtttctagactctgtttctttgcttttccccttcttaagctgagaacattcttgctcctggaacaatcaaagataatttcaacactatatatacatgaaaatggaaactccaatgaactaaaaaactcaaagatatgaatataccacatccagcaattgcttcgagacacgttccagctccttctgtttaatcaaataccacaaagaacaatatgagaaactacatctttgtgatcacagagaacgcaataataaaacgaaaccctaacctttaagcgatcaatttcgagatctttctcactatcacagcgacgattcgaagtagtcggagagataggtttagcagcagtaacaacagtagagttagagtaatccattaacgcgtcattgaaaccgcttactactctttgagagagttctctcggcggagaatagcttaagaaaggatcaggaacttgaatttgtttccgttgttgtcccgctgaggattgtaactgcatagggtgagataaagacgatgaaatcttcgtcgatggcggaggagccggtagaaacgttggaagatacggaggaggtagggggcgatacatatcggcttttttcagggtggtttcgattgaatcgatggcgaggagaaattcgtcgttaaattcttcatcatttccactcattctctttctctctatcgctcgaatgactgatagcgagtgagtgggaaaagaggcgaaatcgaaatacccatttagtgagcagtacgcctgacacgaattcggatatccggaacaattgtgatatttgttattcgattggttttaacggaatatctgattttgtgatttactttaattcaaaaaaatttggatatctgaatttttatgtgatattttcgaatatccattttgatactgacatattgtacatgtaaatattaaacaagactgtaaactatataacaatatcagatattcaaatttttcatttaacatgctttcaaaataaattttaaatagcaaacataaccgttgttgttatcaccggtcatcaagttgttgttatcaccggttatcaaaatgttatctaattaattccaaaacataacctaatagattaaattgtcattgatcaaaacataacataaaagaaaaatgagcaaataaacatcttaacatgaaaacataaggtaacaacaatatacaaactatttatgatatctatatttacggatccatcgtaaataatcatctttcgctttaaagtttttgatggagcagtcggtaaaacttaggatccaaaaaactttttgtactattactattatttatggttaaaattctctttttcttattaacttgatttctttatgtgttttatattatttttataaataattgaaaatcatttttaaaatttgcaatattttattaatattgtaaaataccgtcataataaaaattattatggtaaaccataaataagattatttagtaatcaaatgacattgatctaatatttatatttttcttttctgaaaaaaactttctggttcgtttctgttccggttttcaaaactctgtccggtcatgtggaatgctaaattacaaatccaccttattataatttaaattacataaataccccttaaaactcacatatttatactttggtcccggtagttctcttttctttttaaattaaaggattatctgcttagcaaaaaagaagaagagaaaaggcaatgttttgaaacccgacccggacgatgaaccggactaccttctgggtcaccgggtcaccgggtcaaccgggttggaccacgggttaattagttaaaatttatttaataaatttaatattaatagaaaatttagagtattttataataaaaaaatttgtagtatttataaatataaaacaaaaataatcatatcatatttaatcaaatataaaattatattatatttaacaaaatataaaatcatttacacccaaatatatatatatatatatagaaaaaatcaaacaataataataaagtggttaaaaatttgaaatccaataaatgtctaacaccgtaacaaatatattaggagatcatcaatgacataaataaattaataaaacatcgtgaattaaaacaactaatctcggttgtctctctcaccattcgattcaattttaaggcggtattgtaaagtcttcaacaaaatctaaaacatcaaatgaatttaagaactgaaaaaacttctaaaaataattgaataaagtctaaaatcccatattttattgtaaaatcaagagaactttttaaaacccacacccggccggttcaaccggttcaccgggtcacgggttaattgcgagtttttgtgggttttttcggttttgaacttgttgggttttagcactaaacccaaaccggaaaagtgttcgggttacgggttaaccggtcggaccggacggttcgggtcgggcgtgaaaacactgagaaaagggttttttaggattctttaaacgcagagctgagctgagttacataagatcgagagaattcgcaaactcgtttcttcattcgtcttcgtctttcgcc

SEQ ID NO: 1372 - DNA, 3000 bp, Unknown
  misc_feature (1)..( 3000): cDNA_ID_2134782_gDNA_ID_1620394_Annot_ID_155704 3000 nt of promoter + ATG
aattgtcaagattaatatcttagatgataaaaatgactaattatcaagaattctgaaaaaacttttaaaatttttaaaaaatgagataatgaaatttaatgtacatgaatgaacccaaacaacatttaccattggaggaccgacttggttatatatgaaggtgctagaagagatgtgaagatgattttgtatctctctattttttatgttcttatatctgtaatgttcttgatttatgttgtcactttatcttcgtttaatgtctaagagggtttgggcctaggtctcttaatcccctccaatagtccatggtccaggttctttttaaacttcggcaaatttataattatatgaaattctaaacattttatttttagagtttttattctttcgtttgtgtcagaaaaagatctctccatttggagtaaaatttccaattgtttcaagctcaccgaactttcattccgggaccttaatccacgccggctgttgttaatgttttatgtataatttgattaaaaaaaactttgaccaaagaaaaaatgaaagagtcgacaaaaaataaaaataaaatgaaagaaagcattaactagaaaatacaatattatatacggaaccatgatttgtttacgttgaaggtggttatatttcaacacagacaacagtatatatatataggataattatgtttactaatggtcttataagacaacataggacgacatatacaacattttattattagttacacaccaacttcattacgggaacggagccaatttctgcatctcagtttcgattatgtcaaccgctaatccttttccgtgatgaacccaataatcagccatcgaatttttcttctccggtcccataattccaactcgagacgtcttcaaagattccgtcgagattccatactcatcgtcacgtttcttcaatagccctggcttgatctttcccatattcacgtcttgtggtgacatcataagtgatggtgcaccaagtggcaatttatcccctgaaattaccaaaacataacttaaattttttttctgaaattaccgtctactaaaaaagcaagaaaaatcaattcctactagatttttctatatgtatgcaaaatatggattaataaaaatatataaagaagtattaattaccgcgatcggtctgccaagtgcaccaaaacttcccataagttttggcaatattttcaagctctgtcttagctacaagctcagggacccttggagttactagaaggcctgtttggatctacaacaacaacaacaacaattctagtcaaaccataaatctacataataaaccatttgaaatgaggataaagtgcttaattaaaggttataaaaataaaaagtaacctcatagtcatgagagtgccaaagcttttgctcctccggatcaagactctcaaataacctctccgacacaatatactcgatccctggcaggtttaaacacgaaacatgataaaaatacatctcttcaaaaattatacgcatgcatacttcgagttcaaaattactttgtttgtcaaaaaatgtttgagaaaatacacatatagatacagaccgatgagatggggtttagaggagtcgcaatcgtaaacagcacattgaagaaagtcttggttgagtcgatgaacatagaagttgacttcaatctgacggctaggatcgtgaccataacaagcgaaagaacacaaatggagactcatctgtttgatcggtttcaacgattgcatcatcgccgctcctttatccatcaccaccgtcttcatcgtctttggatctcccggaggtaagttctctgatccgtcacgtgccggatacgctcctggacgctcatcgctcgacgccattttgattttcaacacacaaaaacgatcaaccacgtactattatacaaattttatgtatcttttctttcttttgtgtgttattataaatatgggatgtgattgtgtttggtgtcattgctgcatgagcaaaatgtgacgtggatgatttgagaaggacacgtcattgcgttgtttgtggttatgtggcgagaaatattgagattgagctttgtggatgacacgtggatatgttaatgatggtgattacctttggccacttggcacttataattgagattcttgaatttggttggactctgtataatcttcatagaaaaaaaaaagatcgttatagtctttttcaaaaaaaatctatatacgggccgggttttatgatttatctaagtttcgatttttttcatgtcaagtcaagttttatttcattattaaaatattaattgaactatcaaaatctatttttttttccttctccacatcaaaatgtgttaagttatgacatccaagcaacataattaaagcggttcgctttgatataaattaaatttttgtgaactttatttattgttttttagataaagttttatagatgttatgtaggactttgttttgttttgtttcaagtcgtttcactccaatacaatagttttgaatatgaattatgaacactttgacaatattttgtcacattaaatttacaactacaaatagaatttatgtaattaaaaattagaaactattaagaactcatatcatatattagatcattttgtctgttctttgaacaccttttatgattcacaatttatataataagataaatatatatatatatataatatttgtctattctgtgttatatatagaattttgtttcttaatttaggaaatgaatctcgagattaatatagaattcccaacggtaataatacaacgtaaactccgtgtaggtccaaactttaaaaaaaaaaaaaaactgcttccgaatcaagctttgcttcggattccgaacctaaaataaacacatgaccgttacaccgatcctaatttaaatacaacatcatcactctcctctctctcccaaaaatctcgcaaactctaatctctctctttcttcttca

SEQ ID NO: 1373 - DNA, 3000 bp, Unknown
  misc_feature (1)..( 3000): cDNA_ID_2134792_gDNA_ID_1620394_Annot_ID_155707 3000 nt of promoter + ATG
ggagtgatggtgaatttaatatagactatatagcccaaagtatttttataggtcaattggtaatagttaggtattatgagtctagatcaaaactaatatcgtgaggtcaggtcagaatgatccaccttgaccgtttgttgttatattttttagaaaaagactttgaaacgattggcttattattacctgattattagttctcttatgttttggtagttattttagggttttacggttattgataatgatacttttgtattgcttatatggtgattatttagaaactgatttaactacatttgtttatatctttgggtcccaaaaaaaaagacggtaattgtccttattaggaaaagagataacagtgatttaaatagatcaggttaaaaagaataagcaaaccacccaaaatgaataagctaatcatcactaaatgtggtcacgtgacaatgtcattgaccatcgtaccatcattaatatcgtccgcagttttatagtaatttttctgttatgttactttcttaatgtttattgtttctaacaaaaatttgaaactagtcggatttcttgtttcttacaaatttgattattctatttcgtttttttggttctttgaaattttcttgttttccatcattgatttttaatttttagcatagagatagaaatcacccgtttgataaaataacaattgaacaaataggtattcagctgtgattcaaacacggtccactcgatcatttgctgagcctaacattaataaggttgaaccttgtcaattttttttttctttttggtaataagtaccttatatcagttgtatatgggtaattaaaaaatattccataaattgagtaggttcttactgcttgttggtgaaaggctaatatgattgtatcattttcattttccaacttctgtggagtacaaaagattcgactaagttgacacttgacacttaagtttgtcaataaccaatcattgattggcaatcaatcatattataagattcactcgatttggggagaacggaacgctagaagacatggtgaacaaccatcgccaccggaaaaactggtcaagatgattgacaaaaatgtttgaaaccggttgaatacgattcggagtggagggacaaacaagttagtgggaggcattcagttttggtttacatcatggcaaaattaagaaaatttcattttaatagaaacaatgttgtaaagagtgtgcattgaattgtaaaacaaatcggttaccgctttttttgaatataatttacaactattaaaaataaaaatcaatcgtattataagaaatataaaattaaaagctacttgagaatcccatgatataaaaacaataaaaatgataattctttcttttcgtcttacttaaaaaagagtttttattgtaatttgattgagaaatacaaaagtggaatacagttttgatacacgaagtcgccaaatatcaaatctttccgtaaactaaaagttgacagaagataaatatatcctcgaaaactcaattcaaacaagaaaagctaaatagaaataatgaagtcaacataataaacaaataattctaaagatttattagacttgccaatcaatctcccttgaaccataatgatcaaaggcaaaccactaaacacatcaagctaaacctcctatagcaaattaacactccctcactaagcaagtaaacctagactcttgtttcaccaataaagaatcaagacgagtccaattcctcacacttctaccaaaaacagtgatgtcaagtcaactaaaaagtaaaaagaatgatacaattaaattattattggttttgaatataagaagtatatagttatataaaattttagaaaatagaaatttttaaatagacattcactaaaatttcaatgaaaaatctaaaattagaataccaattttctagaaagaaaaaatattctataataagaaagtaaaaaaattatttatgtattattaccatctaaatataatgcataatagacaatacaaattgcatagtgcccatttttctgtttttgtattgttgatgcacaattgtacaacatcacccatcacatcatcacttaacaacgataatacaaacaatgaaacagctcaattcaaaggtgcaaactctttgctctccttttatcaaaattaaaaacaaccaaacaatttttttagaaaaataatttttattttaaaatatgttattattaaaatctttttcacttcccggaaacggacaaaccgctttattggcaatgtgctctgcttcttctccattgcctctgtgttcgtgtccgtaaaacagatctcaaaatacaaaaacccatcaaaccttctctctcaagattccctctctgtctctctctctatatatctaaacagtgaaaaataaacctctctctacactctgaaaacagcgtttatctttgctttttcctgccaaaaaggcccaaaaaacatcactttctccagagaaacctctcaggttctacatgtgaatgtttggtaaatacagaaagaaagaaaaaaggagagacatctgcgacttctttcatatacggtgtcgttctcatttctctatttattcccccacttgcaaatctttgaaacggacccttcagttttttttgtttgttttctggtctctagtttgaatcttttctaaaaagaaacagagccttttgagattttagcactctgtgtttctttcaaatggtttcgtgtactagaagaagcacatagcttacatttttacttaaattttgggttatttcgaagagttttctgattggcaagttcagtgaatcttgggggaaattagggctattaccaaagttggtgaaatcagtttcaaatttggaaacttcagagatttctcaaaggaaaatgagatacagcttgatttggttcttctatagatacttagacaagagtctaacgaagaaaacagagcacttgtgatcatatattcatg

SEQ ID NO: 1374 - DNA, 3000 bp, Unknown
  misc_feature (1)..( 3000): cDNA_ID_3061996_gDNA_ID_1620394_Annot_ID_155713 3000 nt of promoter + ATG
agttttgaaatctcgaggatgatgtttagtttcctaatctggggaatgattttgtctaattgatgatctcttgttcgattctctaaccttgtttgtgctgaatctacaggctttaaccatcttcgttgattgtagaagtaaagtgggcataaaaatgaagactttgttgggttttgatgtgtcaaagcttctctaatgctactgtatctcaaagattttagagaattcatatcttttttactgtgaatttcgggaaaaaggaaacatttttcgaacatcgatcaccattttagagagaaagcggcggagagagagcgagaacgacaaacgagtttagagagggttcggtttttaaggctggtcgaaccaaacggtttttacctgaaccgaaccgaaatttatcaaaccgaatttgaatggtattttgttgacgtggcatcaaatcatacattattatcgggcggcgaagcttaggactcttgtttaggtatttgcgttaactgatcaaatgattcaaattacatctgcaaaacattatttataggtgtagaaaacactagtttaatcacttcaataataataattcactaggagaaaaaagaaattgcttctctaataataaaattgttcaaattataataattttagtttaatctccaaatcatttacgtaacaacatgagagagagagagaggaagagagaagagaagtgggtaccgagatagattcaaacacttgatctcaagtttctgtggtaactcaacgatttggacgagatgtgatctaatggttaatttaattgctcgagttattattcaatacacttaactattaaattagtcaaaacatctataattccctaaagcgaaatcaaaaatataaaacttaacaaacaagtttaaaagaaaaaaattgtaatttactgtataaaaaaatgttttatttgatatttagaaaaaataaataatacaatatttattttattatttaattttcataaatgattgaaagatgctaacactataaatttaaaaatatcttttattttaattacaaaactaatatttgtaagttttgttcaaattatttcatgcacctacgaaaaatggtggatccacgtgactttacaaaataatatatggttcaaaatctttaaatatatgaaaaaacaatcacattagcaaaacattaacttaaaaatgataaaaatactatatgacaatatgacatggacgaattgtgtgcatacacaacctaaccaatattcagaaaataattctatatttttaatgatgtcgtaagcagtggctttggtgaattatgccatagaccgtctttgccactttgataccatttcgaatttagtttggatcatcttatcgttcacatttttgctttatgatatatttgcgcttttattactatttcatagtataattttacccacattctaaatgatatgtatgagagattttacaatgatttgagatcagtagcagaaatgcaaacatactaacataggtaatataaaaaactcaagaaagcattagatccaagatcaattatatccaaactcaaaactaaaaagaccaagctgtttaagaccaatacataagtaatttaaacaagaatttgtaaaatttactctactgaattacaaggtaaattattttagttagtttgtaattctaccgtttgaagaggatagttgttacgcacttgcaaaaaaggataccttttacacacttgccaaaaacgttgtgtattgggataccgaaaattatggtatctcaaaacacgttgaccccgttacgattaaggcggttggtgaccctaatgaactttttctcggtaccttcagttactttgattctacctatatcgactctacctcagtcatttcaggtaaaaaaatttaatattatatttctagaaaaatgttctttaatattatacttatagaatcttacgtgagatgactttggtgtggatattgtagatgaaaagcaagcaagtgacgttattatcaaatcaaagatcatttcttgggcgaaggatagtcctgaagttgcaaatgaactattaattgcaggatataaagggtatcggtatgtacaagacctactaaaaactcaaggacataatgtttttttgggatagatctctgaaaattcgtcgcggaattatttcatgttaaaatggtatgagaatggaagcgattagcagaggaatgaggaccattaacacatgaaggaattatatgtcctaattgcaacgaaaaagtgtaaaatgaggctaaacaagatttatggagaaagggtaaaatgactaaatcagccgtgcatgagcacataagcattatattgcatgttttaagagtcttgaagcttgaagactttgctattactcgaaatgttatcaaaaattaattaaaacttgataattattttagtcgcaagataattattttttgttattgttacaaaaatcatcaccattcaaatattgtgtcacaccatttattccatactaacccaacttattactaacccaatatcgttcatacgagcattagtcttgagcattattgactttttcaatggtgaaataaagataaatcaagccgttgatcggaataccatatcagattcaagagtgtgctgttgtaccattgttctcgtagaaccgattacagaggatctaatctcactaacactgtcaaaagtcagatataaaaacaaaaaaaagtcttacagaacagaagacaaggaaacaatcgtttgacaacttcgaggattttcccgcttccatttgctataatcgtcaatttctttatttgtcttcttcttcttcttcttcatctcgattcaatttaatgccaaaaaaaacttatctttttaatgtatttataatgtttcaaatggtctgccctagaagaaagggcatacaaatgataactaacattgaagtctagagaattcttatactttttctacgatg

SEQ ID NO: 1375 - DNA, 3000 bp, Unknown
  misc_feature (1)..( 3000): cDNA_ID_3061984_gDNA_ID_1620394_Annot_ID_155716 3000 nt of promoter + ATG
aatttatatgtaattaatacacaaatgtcttgacgtaatctagacttttgttgtaggagatctaataccaaaagaactttttttgtttgtcaactaaacaccaatatcataacaatgaaatataaacaggaatatgggggttattatatgtttttcttagacaactacaagcacaatcaaccgcatgcatttggatatatattttgactaaaactcttaaaagtttaagtaatttaactaaagaattatgtaaccaccagttttcaattttgagtggtgaaattgttttccggtggttatcaagtcatccaatctacaagttttattaatttttttgtatggaaaacaatttaagtttctaaagatgtaataattttgaaaacccggttttttgcatattttggatataagatttaagtctaaacttcgagtttatgtattaaaaacaataaataatgtcttgataaaatatgcttccacataatccgatccaaccgatctccttggtggatgtaccatatactccggcgtatatttagacactggcttatgtccattaatacattaaactatagtctttctccggcggacatttctttaattcattaaatttgcaaatgtttgaatctttcaaaatagtaacacactaacaccccaaatagagtttaatattcatatcattcaacgcaactttgaattttcgtggtttctcatgggaatgttttggacatctatataactacatacttatcaatataatcaagctttacgcagctaatgtaattaaaaagttagtcctaatgaaataatgtaataaaaaagttaatcctattgaaataagttaaatgtaaattttgatattcaataaccgaaatgttagatcaaaacagtagactcgaataaatctttttattcaaaaagtacactgttgttttgtttgattcaactacaccattatttacttttcaaccaaccccatcaacaaataaccgatggtaataaatataagcatttactacaagacatacgtaaattttttaaaacacgttttatttataatttaaggatatgcaaaattacacctaggatacaacatcgaatgaaaatagataatttaataaattttgttaaaagatagggtccacgtttctatttcgcatcatctgcatcaaactaccacacaaagtcatcgcaccaaccatatacctctttgcttacttcacttgagtttcaaacccataaacaacaacaacagaaaatatatactgccaattaaagtagcattttcatctccatcgtaatgttataaatacacaaattgttgcatatatatgacaacgttgatattcatctgtattttgatttttgcactttaatatcacatgcaattattttcagaaaaaaatatcacatgcaatcctaaaatagtgtcatattaagaatttagttaatccaatataatgattctttgttgataaatgtttttagttaatttctcttatatactgtttctttacttgtattatggtttgaatgtgactgaagttttaaacacgtctcttgtatataatgacaagctagtagtcttacctcaaactgtaaatcaatttccacagtttacaccgatttttttttttcattttcatactaatggacaattatatagtactagtagtataatgattgatgcatgtctttcgtaatattagactaaattcaatatattgcctatctgagattatccttttttgaagtatacagattgtccatgattgaaaaaaaaggaattgcatgatttatcttttgatttattggataccaatcatgtacttatcatcattatctttacgaggtacttttttctttgcctctcttttcttttgaaaaagtgaaaagtaagaaatataaatactaaagaaaaatagtttatcaattatccgaatcactaaaattagttgattcactaagtttaatcttatataatctgaatatatatatatatatatatatatatttctttgttttgatgcatatagtgtcaatttatcacaaagtaaattaattcaatgagttcaaataattaaaattgtttatttcctatataaactttagttataactttcacttttacaaaagaaaaataaaaagtaccgtataaagataatgatgataataaaacatgattacagaatcctattttcctaaagatagatgattcagtgaagttcttttatatatttctacagctaatgttcatgcattaattttgatattggtgtttactgtttacaatagtggaattcgacgatataggttataaatggatgttgcggttactgcgaactaatttatcagcggtttaatctactttatttttaagatggacaataaacataaaccgttgttgattcaaattatttcaatataaaaatatctatgattagtctatttgtaatcatttgaatccgtagaataaatgaatagtggaaatcttttcacttcaatagttgatcaaaagtttattaatatttattgctgtaaaaacaatcccaattaatatcttttagtaaagatgcaattaaaaaaaaattgattgctattttgagtaatgcgatatagacaaaaaataaattgttaaatatattttaaaggcataagtatattttgtatttttgaaatcttacataactaatttaaagaagagagaatttgtcttagtaaaatattatttgccatcacttcactagatttaatcgagctacaagtttacaacaatttgacttttagtttttgcatcataatccacgtcatcgttggcatattatcaaccgtatgtaatgtatctccccctctctcttctctcttttctgataaacctcaccagctcctctcaaattctgcaacaactaaaccctctctctctctctctctatctttctctcttcaccatttctttatcttccatggaagaacagtcttcaacaacaaactaaaaacatg

SEQ ID NO: 1376 - DNA, 3000 bp, Unknown
  misc_feature (1)..( 3000): cDNA_ID_2134940_gDNA_ID_1620394_Annot_ID_155712 3000 nt of promoter + ATG
aaagatctttcttttattgtgtaaaaaggttttgacttaatccatatttttgggttattgtagtggctgcgttaatgtcagtgaagaacaagatgaaagatgagaaagaggttttgtctggttgggatattaactctgttgatccttgtacttggaacatggttggttgttcttctgaaggttttgtggtttctctgtgagtatcttttgcacaccacttgttcgactaaatgtctctgagaaacgtttctttgctgagtttattgaaatctttaatgcagagagatggctagtaaaggattatcagggatactatctactagtattggggaattaactcatcttcatactttgtgagttaaatgaatttgtggttaatcttggaattcaagtatgtgttgttgtaactaatggggttacttgttattattgtaggttacttcagaataatcagttaactggtccgattccttctgagttaggccaactctctgagcttgaaacgcttgatttatcggggaatcggtttagtggtgaaatcccagcttctttagggttcttaactcacttaaactacttgtgagtttgatgcaaagattcttgatttacttaatgttgcaattgttattttcttacaaggttaagtcttgtaggcggcttagcaggaatcttttatctgggcaagtccctcacctcgtcgctggcctctcaggtctttctttcttgtatgtcttactctacctaacattacagctccaggaaatttctatttcgtataatgtttcttagactaatgtttttttatttatgaaaaacttgaatagggatctatctttcaacaatctaagcggaccaactccgaatatatcagcaaaagattacaggtaagatatgcgaaaaatgcatgattattagccgttgcaacttatgtgaaagcttcttgataaacttttctgttttaggattgtaggaaatgcatttctttgtggtccagcttcccaagagctttgctcagatgctacacctgtgagaaatggtatgttgcttcgaaaattctttgcaaaactttatttaaaacatggtttcgtttatttaactagctgcaatcgatctgcagcgacgggtttgtctgaaaaggacaatagcaaacatcacagcttagtgctctcttttgcatttggcattgttgttgcctttatcatctccctaatgtttctcttcttctgggtgctttggcatcgatcacgtctctcaagatcacacggtacatatctaatagtctctctctgtctgtcatatacaatatatgtcaagactttgctaaaatctgcattactttttatggatttcttagtgcagcaagactacgaatttgaaatcggccatctgaaaaggttcagttttcgcgaaatacaaaccgcaacaagcaattttagtccaaagaacattttgggacaaggagggtttgggatggtttataaagggtatctcccaaatggaactgtggtggcagttaaaagattgaaagatccgatttatacaggagaagttcagtttcaaaccgaagtagagatgattggcttagctgttcaccgtaaccttttacgcctctttggattctgtatgaccccggaagagagaatgcttgtgtatccgtacatgccaaatggaagcgtagctgatcgtctgagaggttttcaattaacacatttcttgttttgttattctttcgatatataacgcgaaaagttccttataagattacatgtttcagacaattatggagaaaagccgtctctagattggaatcggaggataagcattgcactcggcgcagctcgaggacttgtttacttgcacgagcaatgcaatccaaagattattcacagagacgtcaaagctgcaaatattctacttgatgagagctttgaagcaatagttggcgattttggtctagcaaagcttttagaccagagagattcacatgtcactaccgcagtccgaggaaccattggacacatcgctcccgagtacctttccactggacagtcctcagagaaaaccgatgttttcggattcggagtactaatccttgaactcataacaggtcataagatgattgatcaaggcaatggtcaagttcgaaaaggaatgatattgagctgggtaagtaaaaaaattctatgagtcatttactcaacttagactgaacccataaggacaaaacttaaatctaaaccattggtttttgtaggtaaggacattgaaagcagagaagagatttgcagagatggtggacagagatttgaagggagagtttgatgatttggtgttggaggaagtagtggaattggctttgctttgtacacagccacatccgaatctaagaccgaggatgtctcaagtgttgaaggtactagaaggtttagtggaacagtgtgaaggagggtatgaagctagagctccaagtgtctctaggaactacagtaatggtcatgaagagcagtcctttattattgaagccattgagctctctggaccacgatgatagacttcatagtgtcttaactagtcttcttgattttgttgtcattgtcatggcattaactgtaaaaatttgttttctcaataactcttatttattctgttcttccaaaaataaatgaagatttgcgtttccacagtctcataaaaaattatctatcgttaattttaaaactcatacataataaagtgattcggcgaatgaaagactatttgccttatgtaactaagaaggccaaatatatgcttaagattatgcttttcttatgggctttataatattggcccattaaaccattttaataaatcaaaggggtaatttcgtcattgcgttaattcaagaaaccctaagtaccgacccatataagttctctcactttgcactcgacgcagttttgggctttgcaaactctacactgcttcgtctcttagctcgacattgatctccttaaaatg

SEQ ID NO: 1377 - DNA, 3000 bp, Unknown
  misc_feature (1)..( 3000): cDNA_ID_2134785_gDNA_ID_1620394_Annot_ID_155705 3000 nt of promoter + ATG
atgtaggactttgttttgttttgtttcaagtcgtttcactccaatacaatagttttgaatatgaattatgaacactttgacaatattttgtcacattaaatttacaactacaaatagaatttatgtaattaaaaattagaaactattaagaactcatatcatatattagatcattttgtctgttctttgaacaccttttatgattcacaatttatataataagataaatatatatatatatataatatttgtctattctgtgttatatatagaattttgtttcttaatttaggaaatgaatctcgagattaatatagaattcccaacggtaataatacaacgtaaactccgtgtaggtccaaactttaaaaaaaaaaaaaaactgcttccgaatcaagctttgcttcggattccgaacctaaaataaacacatgaccgttacaccgatcctaatttaaatacaacatcatcactctcctctctctcccaaaaatctcgcaaactctaatctctctctttcttcttcaatggcgacgaaactcatactcaagaaaacgacaaaatccatcagccgtcaccaacgtaactacctccgccgtcaccggaaatctcagatcggatgctcaccgtctccggccacaaccaccgtaatcgccaccatcaacaaatcgatctacagatgtcatcgaacttttctctgtttgttttctcgtcacgcaacaaaaggattcaaaatcctcaaacctcgcgaagattttcagaattctccgtattcattgtttcacgaaagatctggtaaatcattcgacgagacgaagaagacgatcgtgttagatctagacgaaactcttgttcattcatcaatggagaaaccagaagtaccgtatgatttcgtcgtgaatcccaaaatcgacggtcagatcttaacgtttttcgtgatcaaacggccaggagtcgacgagtttttgaagaagatcggagaaaagtaccagatcgttgttttcacggcgggattgagagagtacgcgtcgttagtgctcgataaattggatccagagcggcgcgtgatatcgcgtagcttttacagagacgcgtgtagcgaaattgatgggaggttagtgaaggatttagggtttgtgatgagagatttgaggcgcgtggtgattgttgatgataatccgaactcgtacgcgcttcaaccggagaatgcgtttccgattaaaccgttttctgatgatttggaagatgttgagttgaagaaacttggtgagtttttgtatggtgattgtgtcaagtttgaagatatgagagttgctttgaaggagtttgttggaagagatgaatgatttttggttaatttcggtttagttgattttacttgtattaagaggatttgattaagtagacaatgatgaacaatagctttgtttgttcgatctgtctttgtgtaaaacatcctcgtgataagcaatttgttaatttgtttgattagtgtttttctttgtgattgaatcaatgggtttttaatgaagattttgaatttgaacagtggactgagtttgacaagatcgagaactttttgtgtgggtagagttaaattatgggcctttattgggctttttgttcaatggtgtgtttacatatcaaaacttttaagttgtttttgtttactaataagccatattatgaaacagtagttttgaataattacaaagaaaacaaaaaaagatcaatcaatatattttaaatatttttttggatcactttagaagcggaatgtcaaagctttatcattgcaatacaaaagttatggataagaggttacatgaaattgacttttgaaggagactgcaaaaatctagtcaatagcttgaatggaggcagctcaagatttgatttggttaactggacctatgaaagaagagcatgggagagaatatttgagcaattgacaattggacactaggagcaacaaatcaaacctgcagacattttagcgaagaaacaacaaacagaagtttcagacttcatatctcattttcatattccttcttgtatatccaatgagttgcactcagattacattgatccaagttaatgaaagttgatttttttttttaaactacagtaaattctctagaaattccattaatatataattactaaattatggagagattttactaatttttttaatttcttacaaaattatatctgaaagcaggtttcaatataatcaatatttttctaaaaccaattataaaaagaaaattaattatgaagtttagaaaacaatacaaactttttgatatagtaaaaattttaaaaatgaattgtaccaaaaaataatccaaatataagaaaaatgaacaacattagagtcataatttcattaaaatattttatatataattatagtaatctatatatgacatatatatataaataaattactatcatatatatatatattgataagtttatacaattattaatttatgataaatgataaggctatattttaacataacattttcaaaaatttattatcttattgttttatcgatttgtgtcaattctacattggttccaacttgcatcggaagaattttttaatttatatagattattaatttatcgagtattaatttatagaaattttactataccatgatttgaggacaacaatgtttatttttaatatccatttaaagttttaattattataatacttggcttttgggacatattcttagagatctttaagatatgtatattgtaaaatcttaacatatgttgaaagctcaattatataatattactatatgtcaaattattttgagactacataatgcatatctaataattgtgtttacaataatcctatataaatagaggttgatgagcaagcgactaagttgcaatcacatttcgtttggatcatctatcaccaactttcaaactttcaattttttttatagtttcctagtttttggaaaa

SEQ ID NO: 1378 - DNA, 3000 bp, Unknown
  misc_feature (1)..( 3000): cDNA_ID_2134766_gDNA_ID_1620394_Annot_ID_155700 3000 nt of promoter + ATG
ttggagtataagagatttcattcgaccatactcatttgtccttatcttaaaatactttatttcgtttttgtcttcatccaagaatcaccatatcttattatccattttttttgggttcagctagcaagtagcatcccttcgatagactgaggagaaaaaataaacaattatctggctcttaccgaatctaagattttggccattttctcccctttttcttttgtgcaaaccattacaatatctatggatagatcttcatatttcacatgtatgatatatgaatgattccactgcaataagttatcaaactaagagacggcaatgtttttttttcttaattcatttcactgcaatgacgttattttattgttgttggtgagatatcccggctgcgagtttgaagactcttgtatagatgatttgaagacactaaaatatttcttctcatttcattaatttgataatattttaatagtgtgttaaaaataaaatatatatacagtatactccttctgttttataaagattgtcgctgtattttcaatgcacaattttgaataaaaatccatttttaatcctatttctttagtgtattaataagagagataattttgtttagtatattattaattaaggggtataatctaactttttaatagttttcttaatagtttttgtgaaaaatatagaatgatatttttttgtgaatcaaagaaaatataaatatatatttaagtattgtgaacctaaacccgactaattaatctcaagattcgggacgagacgattgataatattataagactgcaaaaactatccctcgaaagaagctattgataatatagtagaacatgaaatatatcatccctaacaaaaaaaaaagcttgaaactaacttcttgcgctaaccactatctcacaacacctttggtaatccttacagttttgttactgaaatgaaattatgtcctttaatctgaatttgatgttttaacacgatactaataacaattaacaaaactgagtggtggggacattctataaacttgtttgcaatcttagtttgaccaatataattgacatattttgtgcttgtatatatgtttgtattgtacaaggacttgccaaagcctatatgccaaggtcccaaaaccaaagcctaagacccatgctcgagcatgtcattccttgttttacttggagttggaacttaattcatacatattgtatgtatgtgtagtatgatctaatttgaaaaatatttttaataattcacgttacagaataatttaaatttttacaaagtaattgtataaagaaatttaaatagaaagtctgtttcattacaatattattttattgtagtatttaaaatgaaaaatacgataacatttggtagtatttaaaaaactggtcatcaagtttttaacatttcagaatagcgactcagctattataggaatgttgaatccataaaagtggtgccagtctgagcataacatagacggatgaagaaaatcggaacgtgataatatttttcttatatcttagaaaataagaaaagatatgtggtatgcgtttgtcaatataattagtaagagaaacctttatatcttaaaagcatactttgaagtttcctctatttcagaaactaatatttttctaagtaaataatagaattcgttttcctttaagacttgggcatgttacgttttttgaagatgttaacaagatatttttggatgcctcttatgataagaacatccactttgtatggctgattgagttttgcaactaatagtattctctttgaaaaaaaatatttctcattattatttttcaaaataatatatcatttttttttttttggtaagtatcaaatttcctatgatatgtattcattttgaatacatcaacttcttattattgtaagccaaaaatgtaaaatttgatcacctatatttaatcgacatattagtgatatttaataaattacttgcacccatatttttttttttgacatctttgaatcgataatatccgatctataaccaatctctataatacgggataatacggcttaatggaattgaactctgataggaaaggtgtaatcaaaatggagttaaccacttaactaaaactacatccctgaccatatttttatttatttaaaagtgttctctccattaaacaaaggagaaactcttatacagtggaccaacaatcgataagaaaaacgactgaaacaattaatacaacataaaaatcgtgagctaaatattgtttttgcaggaatatcatattacgaaactagtcgtaagaatatagcggtatcaacaacatattatatgtaaatttacatttagggataacataacgattatcgacgatattaacacaaaccaaaagactccaaattcaggtcatttgtatacattttctacaacaatattttcttagtttgatcaaaaaaatattcaacacttgtgtaaagtttagtaacaatgtgaaaacgaggcttaaattggattggataagagtaaacgataatgtttgggttgggccaagttgttaatagtggaagatatagccatatagggatggcccaatttagtttatgaacttatgacttcccaaaagttgcaaatctttctttagattggtccaatttattgatattatagaattacctcacaaaaagaatataatgttgactatacaataggataatattttattttatacatacattttgaacattatttctatatacacaattataatttgcactgaacaagaagaaacagaaaactagtactaactgacataattaaataaaagtgagccggatcgtaattaaactttaaaccgggaaatttgataaccgggaagatatccacgtcagcagcacgataacaccgccatcgctttccttaatttaccttttctctctcgacaaagatattgactaaaagtcaaacagtcgttaccggaatca

SEQ ID NO: 1379 - DNA, 3000 bp, Unknown
  misc_feature (1)..( 3000): cDNA_ID_3062008_gDNA_ID_1620394_Annot_ID_155697 3000 nt of promoter + ATG
gagtacatcaaaaccgataaaaacccgaaggcttttatcaaaccggggaaaacggtttacaaataccaagcagctccttccatgaccgggttttctagccgcggcccaaacgttgtagaccccaacattctaaaggtaattttttcttttttctgttaacttcaaaaccaaaccaaaatgactcataaccgaaattaaccggttttattcgtttgcggttttaacagccggatataaccgccccaggactgtacatactggctgcatggagcggagcagattcaccgagcaaaatgtcagtagatcaaagagttgcaggttataacatctactcaggaacttcaatgtcttgtcctcatgtcgctggtgcaattgctcttctcaaagccattcatcccaaatggagtagcgctgctataagatcagctcttatgaccactggtaaacaaaacaaactatggtttttttttgttggttcggtttagctaaaccaaaatcttttaaataaagtctttttgatatttgtttaattttattttttttggttagcttggatgactaacgacaagaagaaaccgatccaagacactactggtttaccagcaaacccatttgcacttgggtcaggacatttcagaccaacaaaagctgcagatcccggtttagtctatgatgcatcataccgagcttaccttctctatggctgctcggttaacatcaccaatattgacccgacattcaaatgtcctagtaaaattccgcccggttataatcacaattacccgtcaatcgcggtcccgaatctcaagaagacggtgaccgttaaaagaacagttacaaatgttggaactggtaactcaacaagcacatacttattcagcgttaaaccgccatcgggtatttcggttaaggctataccgaatatattgtcctttaaccggattggtcagaagcagcggtttaaaatcgttattaaaccactgaagaaccaggtgatgaatgcgactgaaaagggtcaataccaatttggatggtttagttggacagataaagtccatgttgtgaggagtccaattgctgtttccttagcttgattgttgtttgcttatttgggatggttttattagtcggtttggatgttatagaggtcaaagtgaaagaaatagaaaatatttttctgatcactctatagactctccttatgtcatcgttgttacttgtgaagatggtagaaggaaaaaaaaaaagatggtagaagaacttgtggactcatggtcatgggcttggtttgagtcaaacaagaagccataccactatgattacttgtaatttaacaatcaaaattaatatataaaaatgccaagaaatagtgatgctaatcacgatgggtatcaacaaaagtttcatacagaagaagtgatgcaaatttcctcataatttagattcatatcaaatatttttcaacaatttggatacaattagcagaaatttttgcgtgcgttttcaatgtatgcattttgagaacatattacacgattatcactcttaactatttactatttactattcacaaaagaaacataaagacgaacgatagcgttgttatgtttttgtttcaatctgttatactaggtgtaactagactcgtcgacaaagaagaattttaagatgggctttaggccttgccaaacaacaaagggactaatcgtaaatcctctccttgttcgcttaaaaaaatcaggaaaaatatcattaaaatttattgaaaatgttgatttacatcttcaattcttaacgaaacaaaatgaatatcaaatttatgttgtctttctaaataaataccaaaattttgttgatttggccatattaaacatgatgttaaatagttaatagaccttgttaacatagttaaactttcaattagcagatccgttaattgaaaacaatatcattctactaataataaaatgctatcgttttatcgtaactgctaataaaattccaagtttcaaattatatgaagatttagggtaattgagtttgctcgatctaagattgaatttaggaatttctttcagtcgttaacacaaaacgatgtcgattttatgttataggaaatattgttgttttcaattaacatgcatgttaacagaaaataaactctcttaacgagatatgtttaaccctttaaaatcacgttctctatgaccatgtcaacaaaattttagtatttatttgaaaagtcaataaaaatttaatatttgttttgcttctttgaaattgagaatttaaattaatgtttctataaattgggaattttaatgacatgtttcccttgaaaaaaaaccaggtatgagacagtgagactggaccggaaccacaaaaccaacatgttagtggtatgtattcctacgttagtttttttaactagctagcattgaaccggactcaaaccaaaaatcaaaaccgaaccaaaccagaagtacatcaagtcgctctggaaatcaagtaatcaccaatttacttttgagtgcaattaaaattatgaatttgaagatttttcatgcaagtatattaacgataaaattatatatcccattaaacccatatctagattctcgtaacaaactaaaattttcttttatttattaaatatacctaaatgcgaaatgtatagaatattcctacacgcatatataactcatgtataccccccaatctattagggtaaatagatttttgtagatcatgttaataatttaagacgatgaaagcatcgtaaaatgatctgttttcgaagcagcaatctgtgtaataattcgataaaattatttttacactagcatatatcctttttttctcaaaaatcctataatttggttggaccatttttaaatttgatgctctctgtcgaatgtaagtagccaatcaaacatctataaatcattaaggttatgacattcggccaaaccaaaacaaaacaaaaaaactaaggccatg

SEQ ID NO: 1380 - DNA, 3000 bp, Unknown
  misc_feature (1)..( 3000): cDNA_ID_2134760_gDNA_ID_1620394_Annot_ID_155698 3000 nt of promoter + ATG
agttacagtaaaaaaatcagagctattctctgcttgaaaattagctgtcgtctaactctaattcttgttctatcttatatgatcacctcccaaaatggaagaagataatatataaatcagtttcagattatctaaatataaaaaaaaactctgaattctgttatgagagactgagagttgtcatagcaaacaaaaaacgggcaggagagattatattttcccaagaaaacagaaggcatatgatgaaacagaatctcccaatcaaatgcttagctactttttcgtagccaactatgtacgtcgatgcctctcaattatttttccccactttttattcaatttattcgaccgagtaggacttacaatactcttatattcagttgttataacataacgcttatacattagattatctacggcaggacattgtatatttaaaatttccaacttgacaaaacagttatcaaaatattctaatatttaaaaaatcgaaaacactaataaaataatataactttttgacaaaaaaataatattattttggttttcgaatcattttaaaaatatagtgtttaccgtatcaatgttgtatatacaactatacaattgccagcgtataaaaacttgtatagcgaaaatgcagtacgatttatcacagtacaacataaatacggttatgcatactgtactgtattttagaacattaattattaattaacccaaaataggtttttctagacgatggtcctgttcgtttgcctgtcgctggcgactgaaaccagcgacagcgactaaaagttgttcgtttgcttgtcgctggttcagcgaccaaaagtagcgacagtcgccaacgaccagcgaccgcaatttttggtcgctgaaatttttagcgatcagttactggtttcagcgattagtcgactgtttttggtcgctggatcagcgacatgcaaacgaacaacttagcgatcaaaaaatataaattaaagaataattaaaaataattaaattaaacagaattaaattaaattaaacttaaataaatgtctttctgcactctgaacggttgtgtcttttaatcgcaactttccgtaaaaaatattgacgattgttttttctcgcttgtgtcttttattgcaaccttcctatattgtaattttctagtcaaaatatttacggttattttttccggttagttatatatatactattgaataactacgaaatttataatatgcatcatttggagttagatttgttttaaagaaattattatataaacaaatttataatatttttctctgcgatatcacgacgggtttgagttctagtttaattaaaataatttttattaaattaagttaaaataaattaaattcaaataacataaactaattatagtcaaattaaatttgataaaactaaaataaataaatatattaatttatttttctcatggtgtaggatatatatgatttacattttgattttaaaatataaattagcaccaaaataattatttttaaaaaaatatatagcgactgtttatagcgacagtcaaacgaacaacacagcgacaattattagcgattgtcgctgtaattggtcgctgagtccagcgacagataaacgaacaatgtatgtagtcgctggttgctgtcgctggtcgctggatccagcgacagagaaacgaacagggccgatgtaaataacttaaaataagaaaattttcttgaaatattggtaatgcctcaaggcccgcgactatcaccgatcttgttcgctcccacatctatctttagtagtttggttcatgaactctttctcaataaatgatcagtgctattcaaaaaaaatagagactatcttttcgtatcaccataatatctatataaaagaaaataaacatactgaaaatgtaaaaaaccaatagagaatgtgacacgtttatgaacttttagagaattttattctttttattctttcgtatcaccataatattactccaattttgtttgtgggagactcgaatccgaattttgggggtcactagagcaggggtgctaccatcatttttaatgattcctatgcattaaaatttgtttgaacatttaactcaggatcaattgaaccccttcttcgaaccccttcttctttaagaattagtgggtctgccactccaatcaactcattcgaggaagacaacattctcttggaaagcaagactattatctccaacggtattaaacgaaaaaacgctctacatttatatagattttatatcgtatataactctttaactgttattgtttgtaggttttatatgtcttcttaataaatcggtcctttgatggccggatcattattttagaaaattttaacgatttatcgataattttgcaaattaccgtaatatttttttttgtgttttatactcattcacatattactaaaagataacttctaagtaagttcattcttcaatttctccaattcaaccatgattaactgtggatatatagtaactgtgggtatattttgatagatatcgttttgtttttcttggtcaacctgatatagttaaatcaaattattataggcctctccacgtacatatcattttaattatttcagaaatgggagtatcacaattatgttattttctaaatgtaatccgcgactgtaagtacataaaacaaaatataaccttaatcagtatgtaatttaccgaaacaagtttttcaaaatatgatatgttataaataaaaatagatttcttaccatttgtaacggttctagtggtcaacatgaagctgtagtttgcaagacgtatccagtcattagatcaacacgattaattagttaggatagttttttaatttctatatatacgttttgatttgttgctctttaactattataaatagcccatcaaacccctacaacggattagggctataacattccaccaaacacaaaagatacaagtttaagaccatg

SEQ ID NO: 1381 - DNA, 3000 bp, Unknown
  misc_feature (1)..( 3000): cDNA_ID_2134849_gDNA_ID_1620395_Annot_ID_155729 3000 nt of promoter + ATG
attctacaacacctgggatggtcgatagagaagtggaatgagctatacaaggaccttcctagcaggcagatcaaggtcgaagttccagatagaacagcggttgtgaccacaagcgaagaaaccgaggctctgagacctatggggattcaagatgctattaattctgaaatcaagaagtactcgcgtggcagagcttttataaggccatcgggtacagaagatgtggtgagagtatatgcagaggcttccactcaagaagatgctgattctttggctaattctgtggctcagctcgtcaaaagcttccttggttcaagctaaagaaccatctgaatttctgcaagagtatgttaatgggagatttttttaattttcttgttcacctcttagcttttacatcttttgtgtaacccgaatgacaagttttcttctcagcttcttttgatttacttcgtttctcttctagctcttctgcttctttctcctcaacgtaaacctgtaaatgctttactttcctgaaaagaatcagcaacgccattactcttttttattaatgaagctctaagaacagaatgtttcttctcctgaaattgtgtaagggaaagatagttgttaaggaatcagtagcagctactttatagtaagatcataacaatggtgtacttgaagaaacgttatgccgtaatctttggcttaagagggaacatagctcatgccttttgttttcctgtcctatctctaatcaacttggtctccgacagtgacttcacaacaaacctaccacagaatcttcttttacttacaactttcatgtgagatcctatttgtgggtatgataaaagaacaacttaaccagtgacagggacttgttgttatgttgttgagaaacttcaggtccccactttaagttgttattaaatccatttagaccaaagagattagagaataggatcatcactgaacatggagaagagagaaacttgctggcttttattattgacaatagcatatgtcatatctaaaaaacattgagaagacagtcccttgtgaattgcatatgaagtttgtagtttaatgtcccacacactccaataattatgtcatcaaaacaaatttcattaatgcatctttccaaatggtaaagacaaagccatgttctctgttttagtatgtccaacgcgtcaaaaccacaagtttcaatgattttttcagagaaatttcaactccttagttgatcttgctatatatatactcacataactcactctttcaatcatcaaccaacaacaagaaatccaataacttgaatcttttcatacatcttcagaagcttcaaaaagaattcaaacattttaaacaaaaaaacaatagatatggctttcgtgagaagtctattgggagcaaagaagattctaagccgctccaccggagcaggatctgcggcaccaaaagggtttcttgcggtgtacgtaggagagagccagaagaagagatatttggtgcctgtctcatatttaaaccagccttcatttcaagctcttctcagtaaatccgaagaagagtttggatttgatcatccgatgggaggcttaacgatcccttgtcccgaagataccttcatcaatgtgacttctcggctccaatgatgatgatccaacattttttccttcagttagaaatagacttattcattgtaaatagatgagccctttttcctctttcttcttgaaagagttgttctaaaagtgtagaaagtgaaatacaaaattgatgttatatacaaacttcatgtcaatacttttttgattgatcattgaaaaagaaagacaacaccaaattcaccaatcaaaaactactctaattatagtttcatgttgattaaatataaataagtggaacatctaacatccggatccgtggcgcaatggtagcgcgtctgactccagatcagaaggttgcgtgttcgattcacgtcgggttcaatcccccgaactttactccggaaataccttttttttgtaacttcttatttccatttttgctctcttcgcttatgcttcgtttcatccggtttaaccaggaggctactctggtttggtaatctaattactctaaaccgaaagtccttagtactggttcgaaatctgaaatctaaaccagttgactcacaaccagtgaaatcaacgatcaagggccaagcctatcttcaattcatactcgccagtttttgtgcctaaaggttttttcaaaggataaacaaaggcctaaataattttgctaccacttgaacattaattcgttctcaattatgtaatatttaatcatttatcttgttaattattcttaagtgattttacttaatactagcctagaaacaatttcaaactttcaaattcaatctcacgggaagcatagggtcacatctatatctagttaaagactaacatttaaaacaaaatttgaatataatagtaaccaaaaataggaaacgaaaattagcatagagattccaacttttgttacatttttattcctagatataaacatcatcacattttctttataaattacattgacacgtaacgctttaactatggtttagatgtggaatacatgcaggttacatcttccgcactatctcatacaatcaatgtatctgttctgagacttttagaaatgtgaatctgttttgtgtaagattaaaaagtaaataaaattatataatttaaagtaaaaattggctgtaaaccagtaacaatagttaattcttgagacttaaagagtaaatgaagttgttagtcgctgtcattgtagtaaatcaagttactaaaactggcaaactactttgctttttgcgtgtctttgaagtcacaaaacagagctcctctatttagtattattgggaagaaaacaaatagaaagagaattagtgagtcataaatcagagagcgagagaaaagtggtgagacatagagtgggaggttaacgaaagagagaacg

SEQ ID NO: 1382 - DNA, 3000 bp, Unknown
  misc_feature (1)..( 3000): cDNA_ID_2134893_gDNA_ID_1620395_Annot_ID_155743 3000 nt of promoter + ATG
atttgactaccagaaatataggctaagcaagaatcttaatggacaagctaacagcagtttaaacaagacaagtaagcttagttattcattactcagatacaaaaatattttaatctaaagattcattcttttttcatactattttccttcaagtaaactaaaagcaacctggtttaggtgtgatgaccatggtagaagaaaacccccctgaagtagacgaaagtcacagtgagagtttaagcattggaccacagccgagcatgtaaggatatgcctatttgcttacatattctaccttagtagattctcaaaaatgacctatatttgtgcacgcaggaacttacccataagtgatgcccttcaaatgcaaatagaggtccagagacggctacacgagcaacttgaggtatctatcatatactgtactctgtgcattcaccatgttcaaagcagctatcagtgttggaattttcggttcctatatttgttctaacaagaccaatcaagatgagtctggtttcattaattctcatggaaaaaaataggaacaatttacagaactatactcaaaattgtagaaacacatagatcagtgaaaatcataagtatagagtatcaatagaggcgagatgaactatatagaaacagagaacagagcatttagttacgatttcattaaaaatattttaaaactgagccaggtacagcgacatttgcagctcaggatagaggctcaaggaaagtacctgcaatcgattctggagaaagcacaagagactcttggaagacagaacctaggtgcagctgggattgaagcaacaaaagctcaactctcagaattagtatctaaagtatcagcagactatccagactctagtttcctcgaaccgaaagaactgcagaatctacaccatcaacagatgcaaaaaacgtatccacctaactcctccctggacagttgcctaacctcaagtgaaggaactcagaaagccccaaagatgcttgacaacagactgggattaagaacatatattggagattcaacttcagagcagaaagagataatggaagagccattcttccatagaatggagctcacatgggcagaagaagaaagcctcagagagaatcacaacaggccatatctttcaacaatggttaacaacgcagaaccgagaatctcgtcttcaagaagaagtcctggaagattgtcaataggagtgggattacatgaacacagaggaaggagtagcaacaacagtgagtatacagaagaaagattcaacgagaataatgaagattgcaagcttgaaacacacacaagaacagctctagatcttaacacacacgacgaaaactatggcacaacgcgtcctaaacagtttgatttaaatggtttcagctggaattgagaagaacaaataagctttagaagagtgcaacaacctttttatgataatcacacaggaaatgaaaagcctttgatttcctttgttagcttgagggattcgtctaaaaattgaattattagtcgaactcaaaagagacatcttgtgcaacaatgtacaacactattaatttgcgtagttatgatctcatcatataaatacagataaatttactaacttcatggaagatactgaaattcttgagagaaggacgtaaagctccgtgctttttaacaaagcaagaacatacccatagatgtgtaagcattcacaacgttgcaaatcgaagaaaaaccggaaagtgagaaacgaatggccccgtcgaacgacgagagattggggattgtccgacgccttttttcaaaccgggtcggttcgcatagatctgggtcgggttaaactggttttatccgaattcgggcaagaggaccccatctgttacctcaaagagtgacaatgtcatgtttcgtccctgaaattttagtaggcgcttattttcacccattatagttttctttggaccacttaaccaaacattgcaattttgtttattttatcgttaaatacacatctcaaatttttttttcttttttttttatagaaaaaaacttttgatttcatataattaagtttaatactgtagaaaaaaacaaaaaaaaaccattaaactaattaattacaatctactgataaatttttaaagtaaaaatataatcgttttattttatatgaatgaaaaatagtcggttaactacatttgcgtgtactaaaatgctgataaatttatataaaattaaaatatatctcgtatatatttataatgtatgacatacatataggtgatatatctaatttcagtaaaataagtcaaactgttatatattaataaggtatatttaagtttagatttactaaacgatgtcaacatataaaaatcattgagtacgagattttaaatttatttttctataaaaataaaaaaaaactttaacaaataataatataaagtatatttaatttgtccggtataaaattaccgttataataaaaaataaccagaatgcgtctcgcgccataaattcaaatattctttaaattgttttacattactttccatttttgtgttttctttttatacttgaaatatctacttcaataactttaatttaattttgataaccaaattattatagaccttcacatttgggaaaaaggagtaaaaatagggggtaagaatcagaaagtagtaaaagtatgaggggcaaatcggcgaataaaaagcccggtaactcttttactatgggccgtcaatgtcaaactcgaaactctcgttctgatttctgtaatcaaatccacaaaagatccaatcaaaattcattcacccatcatcgttagttacacatcatcgtcttcttcctctcgctccctctgatagcgaaaccctaaaatactctcagctgctactttccgtaaccaaatcccgacgaattaaccctttttttttttggggggataaaatcatcggagtctcttctctggttcggctgtgatg

SEQ ID NO: 1383 - DNA, 3000 bp, Unknown
  misc_feature (1)..( 3000): cDNA_ID_1534189_gDNA_ID_1620395_Annot_ID_155747 3000 nt of promoter + ATG
gtactgactaaaacgactttccaatttaatctgagtcggcaatgtgtagattattactgtacaaatatctttaatataaaaatttgtcgcatgttaatatttccagaagattacaggctggaaaatcgatgtattctctcaactctttttttttcttcttaactttttaaatgcgtacaataacaatatgcatcaatatttctattagtactattattcttgttaaattattatgtaatgttcttttaaaccgttaaagttttatacttacataactatatatgaagctctagtaaacaatgaccaatgatcataaatatttaaactagagactagactagaccgtgctatataatactagcgagtaaagacaattatacagttaatttggttggagattaggtgtcataattccaaaaaaaaaaaaaaaaaaaattggtatgatgatttgttcacataagaagaaaataacattctaaagattttctaattattagaaaacaaaaagaaatgttttcttaatttcggaatttacagatactttgtgatagacaaattttaggtgtctgcttttttacttttgtatctactaagaaacaactacatttttgctttgtctactaggaaataacggattgtgacgaatctacgattactgagtcagagagtgtcaacgcgccaaactcatccaaaagatcagtaagttacatatgaacgtagtagtgacattgacaaaatccgatgtatccacatttagtttcattgtcagctcataaattaattagagtaactagttattttctcgtattgattgtttagttgtaatagtgggcaatagttctcggttatttacacagaaaaagtcagacgaagtattaaatacttagaatacatagccgcacttttctattttgatgatatatgtatgtgacctaattttcgttttgttttttgacgtcgttatatatgacctaataattataagttctacaagagtagagtactccgatatattggtattgcaactaaaataatatatgctactaatttgcatatatatgtaaaatctatgcttttttgttggaaattcctttatgtttttttagtcaagcgcttggtgacttgactagtcaatatatattcaccgacttgggaaaaatcaggttaattccaacttaatctatacttacttcacggatttcgagcaatcatactaataattatatcacgtgtagtgttactattatgcgacttgcaaaaagttacgaattttgtgtgatatttgggttttgagagaataattaaacacacagaaaatgaaaggatccagattaagttactctgctaccaattaattaaataagttaattatatcactatcgtctttcttcggcttcactgaaaaggctaaaacaaacaccacataaaaagaccacagccttttcaagtaggagcggtgctaatcaattaatataatactcagctaattatacattctctaattaaatactagaaaacatatactttataattaaccgtagtatttctcgactttgagaacactatagaataaatgaataaaacggataattattgaagataaatatgaaactcaatttttttttgggggtctaatgttaaattatgaaactcatgattaatagctaaatacagaaaagaggagatttcttagggctttctttctataggataataaccaaattaaaaacaagaacaatctttaatcacgggtccaccacatcaaaagctatattgtataaccctctttagtgaaattattttcaacacgtttttggtttgatatggtatttattttccaagagttctttccccacagtttttaatacggtatttaaaaccagctaagctatagcatgaaaacaaatcaacatataattaatgcaatcaacattatgtatatatataatatatttagtcgaattattgttagctaaattagttagagagacgctagtttcacaccttcaatacaaatttgagtaccaagtatttcttaagggataatttaaaaatctcaacagtttgttaaatgtattatcaatgactaagtttgagctaaaaagtacatattaatcgaatttattacttgtaaaaatataatgaaaaaaatcgaattgttgtctaagtgaaacttgttcaacaattcaggaagttgcttggagcgtacgtatctttcaaaatcaccaaaaagaaggaaaaaagaagaaggaaaaaaacaaacaataaatagatttatcttttagttaattacaaagaaagctcatatccatctcctctatttaaaagccattttttccaccctttcaatacttttatttctctgctttaactgcccaaaagattctctcccagctagctttctcaattcatttttctttcttcatcttcttcttgtgtgatctctctttccaaataagcttatcattcttacaaaaatatttctgggtttctgatattgttcttgttctcttgaatctttattacttgaaaaacatataaagtgatggcggttgtggttgaagaaggtgtggtgttgaatcatggaggtgaagagcttgtggatttgccacctggtttcaggtttcatccaacagacgaagagatcataacatgttaccttaaggagaaggttttaaacagccgattcacggctgtggccatgggagaagctgatctcaacaagtgtgagccttgggatttgccaagtaagtagtagtcaattttccataaaccaaaacaaaatttcaatttttctttgaccattcatgtgtaaacacaaaggctatagcttcttgattaagatttatcaattcttgatgtctaacttgtttttgaaccaaattttcaaacttcgaagccaaacaaatttcaatcttctttgaccatttcaacacacaaaaggcttcttgatcaagattctgatttttgtttttggttggtatagagagggcaaagatg

SEQ ID NO: 1384 - DNA, 3000 bp, Unknown
  misc_feature (1)..( 3000): cDNA_ID_2134913_gDNA_ID_1620395_Annot_ID_155750 3000 nt of promoter + ATG
caactaaaaacaacaaaacaacaaaacataccacaagaaaaacataatcaatgttaagttatattatatatggttcaacttttctttctcaatcttgacaaaattgaccatacgtattttcccttagagcatctacaacaatgggatccatattttacaataaaaaatttacaaatagacatttgaactagatttatatttgacattgtccaatgatgggatccaaatatagaggatctaaaattttaaatgtttgaaaaatgtgtctaaggtatgtgtgtttgtgtgtccaaagaagcgtccaaaagagtgactaaatgtccaaaaatagatctgtatctaaggttttttcttcaattttgatttaatttttagatctttgatgtttaggacatcctattccaacaaaatctgaagaccgacgctaaaaaccctaaacagacttatatttcatatgtgtaggtgacagtgacagaccgtattcctcaaaacgtggaaagattcttccgtttgtgagattcgatctaatatttctttaaaaatatatatattactacaatatgttcagaagaagaagaatcctctacaatcaattcatacaaaaatataggaaatcaaatagcaatatcgttttttttttttcatcttttatagattgactaaatagagcaagaaaactagcaaacttccttttttgttgatatatactacgtacaaaagataagttcttatcataaaagtttgttgaaacatgtttacctcttctactctagggtttggatttagagtttagatacaagctttatttcatatatttctcaagaaaatattaatatctcattatattttcatacattatatgaataatacgtactgtcttcctcggaaaaaaaaggaaaccattattgttatctatgaaaaaagtaacatgcgaagagctgcaaagctcctcataaaaaacttgaataatctttaattaaataaacaagaaaacattgagactctcagatccttgacttataatgtgtatactaataaagatataagaatacgggagaatcttcaaacgaaacacaacgaaataaaatgatgatgagtaacgtaactacctttagaaaaaaaaaaaaaaaaaagaagtcatcgttttccataatcatcatatttttgagggatattcaccaaacagaatcatggtcctttaaggtggcagagacgttggttttgattgccaatggaagaatactccctcatggtccaaccactcgttttgctctcatcaccttcaacgtagaacctgagattcctcttcttcccgatcacttcaccggttttcttcgacacgacatcttttaactctccagtggctttccaacctttaactttgcgatttgtccttttcacgaaataaaaccactcgttaggttcaaagatatcattctctgtgtgattaagccgccacggctctttggcgtagatgttgtccctgtcttctaacaaatatatcgtgtttggttggtggaagccaagctttggtagaagataatcgagtatgagttcttcttctgaaggattaaatctaaagcaaccaagctcttcctcttcatcgtaaaattcttcagtcatcggcatcatcttcttcttctgaaatttcctcgagtcaaatgagagagaattaattatgaacctcctctaatgaggtttatataaagtggagtatgattgagaaccgactattgaatattatctaatttggattagttttggatatatataaatatacaaaaaggaaagtttacaagtttttcatgttatttttataaaaataaatccaataggcacagggctataccaaacgaataataatgatgtcaaaaaaataaacgaataatagttaataatttttcaaaaaactaaagacatttattttgtggcccaataattccaaacacatcaatttgaaaaaaaaaattatgtagaggagatacaaaaggaaaacaaaaaaatttgtatggtttcgcactgggctgggcctatctagagtccaatagtcagcaatggtttggttaacctttctttcttaaccttggctaaacagaccacaagtttgggttctaaggttagataacaataaaatctcagggccgacccctgatacttatgctcataagcatatcctaattcttttagctaatatcgtttaacgaatttatgctaataataacatgcgatctcattacttgaatatcaagaaatgcaacaaactctctctttttcgtcccaagagggggtcttggcctcttgggtatactttctgcagaaccataaattatgtttctcgtttaggttctgtcctttttttttctttttttataatatcttgactatataccagcctatgtatatcatttttttttactctaatatatactggaaaaaggaaagaaaaaaggtttttgtttgtgctcaattcctataagttaatttttacatgtatctgttctcaatagtgtctacattcatttgatcattataatttgtacactagtacactaaaaaggaaaaagaaaaaaagcagtatagactttccatagtcagagctcaccaaaaaggaaccatggtcatttgaggtggcagagaatatggaaatgaactcattacatattttgtacaacaaacccattttggaattaaacaggccctctatgttaatcagagcataaggatttcatctttttctctacaaacttttcaattatctttttctaagagttacaaaagtatatttgttttctatataaatttgggatagtctatctacatttctacaaaattcagctaaccgttaggtgagtcactcatagtcatacatatcttccttctatataaaaaaagaatattagttttgagtggactgataaatatattcttttcaacaagaagaaaacaatcttcttaaacccaaacgttcaagaaaaagaaaaaaaaacgatacttacgatg

SEQ ID NO: 1385 - DNA, 3000 bp, Unknown
  misc_feature (1)..( 3000): cDNA_ID_2134897_gDNA_ID_1620395_Annot_ID_155744 3000 nt of promoter + ATG
ggtggatgtttttgcttatccaaagttttatctacggaagaatcttacttctccatgttttccaaagggtttcaaacaacttttgaaataaatgtttaaaacgaatcttaaagaaagtaaacgaaccaagagaatgtataaaactgaaaaaaagaaaaacaagaatggatactactaccaactacttgcaactagacaatcaactctttataatgatccgacttgtcgaataatttagccagcatttgcgtttgcgtccagtcgcagtgccctcgattttttatagtttcataatattcaaaccaatataacaaaactgctacatgattcggttggatgcagacaacactgccttgtggtgaacacaaaactcctacaatgattctcctaatcttttgttgtgcttataagaatcacaattcattaaaatatccacaaaaatcgagactaagtaaaaggggaaagaaatagacccgaatagtctctttttttttttgggttcgggttgtgatgaacaaaaaagattcttgagttgagaatgcgactcaccaagctttctttagttttggattctcatattctcattctctagaatctcatgaacgaacccacttattaccctccattttctctccaaacgaatataattccgcggtcatttcccgcttcctcctgttttatgtatccaatcctctctcattcaatcaagcgaatcacaatcccacgtgttgaattatgctccctatggaagatcaaacactgattaaagttagtaaacaagaacaagaatctgtcaaagggaaatgaacgtacaaggaagaacattttgtctgtatcactcttttctttcactgaagaaggggaaagactacataattaagcacaaactagtataacaattgtgaccaagataacatatcgtttaagctctagttctgaagaaaaacacagtagtccaaaatctggaacagaacctgctacaaaaagcatacacaaaatttgatcttttctgaaactacatttgatatagaacagaggattatctatctgacaaaagagaagccaatcaaaagagttcaacataaattgtttgcttcgtctaatttacttttgatggtatacaaatagagttttcaaacttgcagcacacaatatgaagcctctctttgtggaagcatattcccactcacatgccaatcaactatttaggcaatatgctcaaatacttttaactgaaggttatgaaaaaggttcttcaccaaacagaataaagtgttaatgagaaatcagaaccatgagatttcaccaaaaaaagattgaaaaatgcaaagatatcattcaaggaacataagatttgtttttttgacattttcctttcaaacaatagaccatatttctacctagtttttttttttaaggcacctatcaaactcattaagatatgtgagactctatactagatagtggatatattctcaattgcacatagagaagccataatttcagcatttggcaatcacgacttgtatatttatatatctttatctctcaacttattctatatagctgtatatcatataggagagtatctctacacttaatcagtcagtagaaatataatagtgaagtccaaatcaaactcgcatccaacaccataatatgaatgatgataaaatttagagccgtactcaccactaaagtagattcaaggaagtacactgtaagaaaccagccaaacattagatgcatatatgcttcacgaacttatacatatatacatgtaaatatgtacatgtatgcacacataaacacacaaacaatacatacaaatatgcactgaagacatgttatgttgcattcagaacagacaggaaaggttacacacatacatagattaacacatgcatggatgagccaaatatgttgtgccaatcaaagagtgtaagatatggaccccccactaatttttatactatttagagagaataggtactaaacttgttgaaggagacagcaagaaatattctacattcgctttctcaattatctttcaagaaaaatcaatgttgaaacataaactttcaccccccttgcattatgcatatcacaaacctgggtattctacgctatataataatacaaacataatcactatattttcttgaaacatggccaaataaaccattattgattttggtcaaaacctaacttaaagttttaatagatttaagatgtatgtagagactgaaaaaatgactttcaagtcggaacaaaaacaatacagacaagtggaaagcattgagaatatacctcaagagatagagaggttggagctgtggactttgaaaaaattgaggaataaggaaaaagaatgaattcccctgcccaagtagaaaagttgtcaaaaagatttggagaataagatactttcatataccagaatggtgaaggaatgcgcatatgatgcattaattgtggatcaattctcgtatctaatgcaaggctttaattgcactgaaaagttgtagtccagaggaatcaaaactagaaaaaataatgtaagcacacaaggtacagtttaaacgataagaacacaaataacaaagcaacgattggaccagttattcatattccataccttagttatcatcctctaatttgcctttttgccattcaactttctatataaagcaaagttgcaaagactttttactcttgagagaccccggcctgagaaaaagagcataaataaggaaagcagcaaagacatcttcccaagttggtggagttgcaaaccatagtgtatctctgaactgagagtagcaggttgcaattaaaaactaaagattgtgtcaggtaaaagaaaaacatttggtctttgcactcattattaatgcagtattgctaggtgggataagcttacctttttattttgaagacagacttatgtattaccacaaccagcaccaaggaaagagcatcctctcttcatcgagaatg

SEQ ID NO: 1386 - DNA, 3000 bp, Unknown
  misc_feature (1)..( 3000): cDNA_ID_2134889_gDNA_ID_1620395_Annot_ID_155742 3000 nt of promoter + ATG
aagcagttttcttcacaacagcaaaatcctcttttacagcaggtagcatattcaatatggaataatcacatgcttaatagtattcaaaacattccatcatattaagagattatcttttctaatctgtttctcagagctcttccatctctcctcatggaagcttgggaatcggagttcaggcaccaggttttaatgtcatgagttctgcctccttacagcagcaatcaaatgccatgagtcaacaattgggtcagcaaccttctgttgcaggtacattcactgtttaggtttagctctgtggtttatgatatgattgttgatagacactatttctgggtttagcaactaacatctttggcaaaatattatccaagttttatataattgattaaagtaaactttgttaaggggtttaacatcttggcaattacttaaatactagatttgttggagcctcagtttttggattcgagtatagaaagtacagataaaaatatcagcaaaataaagggctttgtctttgatgtttgtgcagatgtagaccatgtcagaaatgatgatcaatcccagcaaaacttacctgatgattcagcttccatagcagcttcaaaagctattcaaagtgaggatgactctaaagttctatttgatactccggtaagcaggaatagttctgtgctctcatttattacttgttggtaactttttgatatacgctttccaccagatagattttaaagcggataaaaaacttctgtctttgttagtgttggtgagtgttgtgatttgtcattccttcgcttaaaattctcatatgcaattcaatagtgaatgtggtttatggatatacataatgacagctgtattctattaaaccaagcaactaactaagggtggcctctgatccttcatgtgttttctgttttatcttcagtcgggaatgcccagctacatgttggatccagtacaagtatctagcggtcctgatttctctcctggacaacctatacaaccgggtcaatcttcaagtagcctcggggtcattggacggagaagtaactctgagttaggagccattggtgacccttcagctgtagggccaatgcatgatcaaatgcacaatctccagatgcttgaagctgctttttacaaacgtcctcaaccctcagattcagaacgtcctagaccctattctccggtacatcattcttctgaattctacttaaataatatccgcttaaatctcatattgcctatgattttgaacagaggaacccagcaatcacacctcaaacatttccccaaacacaagcaccaatcataaacaaccctttgctctgggaacggttaggcagcgatgcttatggaaccgatactttgttctttgcgttctactatcagcaggtaccaaaatctcaatgctctgttccatcttttatttatcttcttttccccggttcacgtcaaccttatcgactttttttccctgtgtttgtgtagaactcataccagcaatatcttgctgcaaaagagctgaagaaacagtcatggagataccacaggaagttcaacacttggtttcagagacataaagagccaaagattgcaaccgatgaatatgaacaaggagcctacgtttacttcgatttccaaaccccgaaagacgagaatcaagaaggaggatggtatgatttcattcatgttttccgattacacattgttcttcttctttggagatggtaatcgtaatgttttttcttaaatgtctgtgtaggtgccaaaggatcaaaaacgagttcacatttgaatacagttatcttgaagatgaactcgtcgtatagaatagagagagatgcatgtttgtatatactctcgagcaagtgtgttattatttcctgcgactatttgtactcttcttttcaataaactaattacttttagtttcaacaagttgaaattcttcgttaacgactcttaaagacaataaaagccagagtatcatcatgaaatctttaatgcttagattattccaaaagccgatttttttaacaaacggaaaaggaaaaaaaaacaaacggggctgttcatcagagatctaggaacttttgtttataaattttttttaacatttccaagatataaaatacctttttttggtacaccattttgtacaaatttctaaaaaatcccaagtcatcattctctaatggttgagaaaacaccaatgactttggaagattattccaagaatgaagaattgcattaatatcatctcctgccaaccaaatactaaacgaggcttgttgaacatgtaatgttgaactattcccaatatatttattgaaatatagtccaattattttttcttaaatgtctagtacagaaatgtgcatgtaccgaagattaagcagtgtcggttaaataaaactgaaaaaagaaggaaaaaaaagaagaagaaagagttatgacttgtaacaatgtgactatgagtatggggcttgtttagcggatcggtgaaatttggttattacaagcacgtggagagtgtcgttttcgggatttgacctgaagaacggcatcgtttctcgtgccaatcaggcaatcccttagaccccaagcaattcactttgccttttgcttaatgtaataaagaccgaccaaagaaaaatatgtacatagattaataacctcatatcatatgaatatgacctccatagatccacattgttgtactcttatgtcatgatatatcacttcttctctgtatcttactagttacttcagaaacaagacaaaatttactcgtattattcttttgtctcctttttttttatgtttcaaaacttctcttcgattgttctcatagcttaaaccaacaatacaacaaccagttttttactcgtgcaaagcgaatctaaaacattaccgataacttatcaaaatcccaaaacttgatcagttttttctacaagcggcaaaaaacagaatacatccaaaatg

SEQ ID NO: 1387 - DNA, 3000 bp, Unknown
  misc_feature (1)..( 3000): cDNA_ID_3062041_gDNA_ID_1620395_Annot_ID_155732 3000 nt of promoter + ATG
cccccttgcagaaataaaatgacttgaattacttgtcagattgtttagatttgccagtaatcaatccgtcttttacactgatcagtaaagtttttggcttaatgagttagttttacaaagacaggacaaataattcaatatgacagaaatgatgctatgtgtgttcattgtctcttattcttgcacgctttgctagaggctactttttagtttatttggtgagcatcaaatgtagattagttaggttattatgctgtataacccttttagccttatgaaattgtttcatgagtagcttatcctctaaaatactaaatgttttcatcatttctttcccatttttggtccatgttaattgatatcatgaatttttttgttcatattgcagtgtgttttctaggtatggtatccatagcttgccttcaatcctgatggtgaatcaaacaatgaagatgcgataccatggtccaaaggatcttgcatccctgattcagttttacaaggaaacaacaggtgagagtatgcttcatgaaaagccagactgtgtctctgtttgtactttctggttttgttttctactgtatctgaatatattagctcacaacttattaaaatcctttgaagaaaatcagttaaacttttttatatctgtgtctttccaggtcttaaacctgtccagtatatggatgaaggtgaaccaacaagcttggacactgatggaaacctgatcacatggctacacaacgggtcatctatcagagaaatagcagaaagagagccatatatggtacttgcactaatgtttctgtctttgaaactggcaattttgatcttccccatcatgggatcacggttgaaaacgttatgggcattgtatgttccgcatctgagcttgggaatacttggtgagactagccaactgtttggccgtgccctacacatgatcgatgtgaggagactatggataaaactgagactcaccaaaacaaggaacttccaagaaagagcaaagaacgcacttgcatcagtctcactaggaaaatcttcatcacaatcagcctaaaagggtgatttagaaatccttcactgtcaatgagcttagtttagattactttactttactgtctgtgagagatcctttgactgacatgtttctatacctttggagttccactgtctctgtatgtaaatcctgttttgcttcttttgtgaatattttttcttcttcttttgaatattcatgttcttggtccacttcgttgtgcttacgttttgtctatattgattatggatggtttggttttaattggtgttagagatggacacttgggtcgtgtatgtgaaagaaacttgtccaacttgtggatcactctggttcacatgttttgaagtttcgttttcctgtcgcttttgcgtatgtgtctgacagttgaatctctctatttagatattttcaacttaggaatctgcttttatttgattctatcgtttattacagttataagatttagcttcaagcgtaaactgactaataaaccataaaatcaaaatcaaagaagcaaccttcaatgtttaaagtgtagggaacaaagtagcacaagaggtgaaagaaaaaaaaaagtagagcaaagcaaaaacaaacggaatcgttaacaattactatatgttatgaatgattttttttctttgtagacttaagagtttcttaaatttgcaattgaattctgtatgctaagtgcctaagttcaatgattattgctttttgttcatccgcatttgaattttttttaatggatttgcaactgataatctaaaagctaccaaataacctaatattagtgtttttgaataattgcctttgtattttacaagtattgatttagttgattttcgacgaaaagctttcctcaaattttttaatattatcacctatattctcattacgtaaaggatcatatcaaggatgataagaaattataataagaaaaataaatgattctaggtgtttattaaatgactccctctttctacacttgttaaatgaaaacgtagttgctttttcctggaataacactaataattccgagcaagcaacctccactactactatcttttatcatttttatccctagaaagggactttaaacttgtaacttgtataacacatcacatcatcttctttttttcttcctttcgttttgtggttaatttggtaatttactttcgatgcaataaacaagccgaaaatatgaaaaacgttcatctgttaattagtaccaagtttatacttgaagcttgaatatagttatctacaccaataatttttgtattattttacaagaaatttaaatacccgcttaggtagacgtcttaatccataacttatagaaacttaaaaaacttggtacgaaagattcttcttaatcatcagctaactaaatcttgtttttatcactaaatattttattagcaatcaaatattgtggaaaatgaattagcgtgttaaccaatgggtttggttataggaaatataaaatatcaaaggagagaagggaccttgtcaaagaagacaatcgatacttcttaacgtgggtcctaaaatggcaacatcttttttttgtcatttcatgtgtgtagataagctctaatttcttacctcaccaatggttatatgaatataaaaatgatttctgtaaacaattctgttgaaattatgtaattatcattatatattaaatcactaatcaacactttatactttttaacagtgacaacactaaatgcgtccatttaagagtttcgcttttccgtctcttcttcttctttgatcatctatttaaggatctagagaaaccacttcgcaacgatgagggagataggtcactcctcaaaattaccaaacacaaattagctccaataattgcaacaaatcactctcacccaaacaaaacttttcaaaagccctaatccgagaaatcattcgacaacaacacgaaggag

SEQ ID NO: 1388 - DNA, 3000 bp, Unknown
  misc_feature (1)..( 3000): cDNA_ID_2134870_gDNA_ID_1620395_Annot_ID_155736 3000 nt of promoter + ATG
ggttctaaacagctcgtgatttgtaaccctactttgaaacgattcttccctttacctgagcctcaaggcaccggtgacgaatacaacgtaggagggtttctgggatatgaaccgatagagggtaaatacaaagcattgtgcattgtcagaggatggaacactcaagttcttacattggaaattcaagaatcatggagagtaaccaaacctggctatacacattggcctactaaagatactggacgatgcattaatggagttatctactataaagctattatatttgatagggttccaaggcatgttatatttggctttgatctcagatatgaagagtttacacatattgagtttccgatgcgtaattatgaccgctttcttatggtatcttatgagggaaggttggctttgataagttccactagctctgttgttgaaatctggagtttggaggatgcagggaatcgaaaatggtcgtatgaacagtttcatttatgtcttcctcccaacacaagtctgaagggtgttattgatgctggtgagcttatttacacaggatttagtttgaatagatcgttctgtgttgtgtattttgatcctaagaaaaacaatatcagagaaaccaagtttcaaggaattgcggataaccagatttggcaacctgatagacttggatttgatcttgtgaatgacttttatgtattaccaaatcacattgagagtttcatctcgttttaagagatttcatctttttgcatggaatgacactatatatttctgaagtgttcttcagatctttttttgtatccactgattgattgatcccactggagatcccaatatgttttaatgatgatactacatattctagagacttaatagaaactttataaaactatacatggagagactgtaatatgtgtttttgagattgaacctacgattcctctgttctgtttctagcaatttccatgtgatccttttctcaaaaatagaaaagagacttttgtcctaaagttaaacaagtacagaagaagtacttgaaatcttcactcagacgattagagcttagagcatacgaagattagccttagttacttgcagtatgaattcaacattttgagacatggatctctgtaaaattgaccaatatagtggttttattatggtaccttatgagaaaagattagcctggatagccacaaattcattgatattggaggacttggctaaatttgggcgctattagtctattactaatgctagtgaatttattgtgtcatgaactttgatattattagcagttttaagagccctcaggacaataacatttggtaatgaatgtaataacatcccttacatattagtgttataacactatctagtttactctcaatttggatgtgagagaccaataatcataattcataacaactgattttgagaagggttctgttttgttttccaaagaatgacacatagctaattatatatgcaagtttatgattctctgatagattcttcttgttatgattatccgttcacattgaagggctttgtcataatttgatttttctttagtttgaatatatcgtaagtcctaaacatgcatgtcttattaaacaatgtgggctctgctctgaagactattgcctacatttatgctatctactcaatcccttaggagttatggcatttagtttccagctgatgatatgtagaacattcataagcgagctcaagattctacaatacgtgtataaaagatgaagcctaagctactactaggctgcatcggtcaaaacacacaagccttgtctttttgtttctttttcttacaaaaactttgtctcctacagtgacttcaccaccaacaccatcactgacaaacactaataatgaaagaccaaattcgtatcacagaaagataagactgaaaaatcaaaatgtttcaatagcattagcctccagaagaaataacaacagtcgttgtacttgtatcctagctaaaagcaaaatgtaattgatttattgcgaattaaactctatcttgttacaaactttaacaaaagttttaatattttgaattccgtacatgtaaatggaagcatattaattgggaaaacaaaagaaacatagtggataagattgtttacaagtcaacacacaccaatttagaaaaatcaaagaaatcccgatttgatgcgaacatgacgacgcaaccatatctctccaaatcaaaagattatgtgtgtcacattccccactaatttcacttatatctagcataagatgccatataatatacatgtagtatgtaacgttttgagaatgttcttattcggcgagattatttttctgacaatacatagcacaatgtttagttttcccaaactatataattggaaaattttccaatgacatctcaaatatgtcgacatatccaaccgtaattccgtaaataggaacaaaaacatccaaagaatttaagtctagttgatctcaaattttaggcaagttgcaaataaacacaagtatattttagttgaattatacaactaaactcaaaagtacatgttgttccagaaattaaacagatagacagttagttggtaaagatttaattagttgattcaaaaaagaaaaaaatttctcgagttatcttaaagtatgtttgtcttaacttatcaaaattatatctaaaacccacttaaaggcttaaaccatgattattgtgtcttgtctttttttgtaattaaattacttaatcagctccaccgtaatcagctggacctccactgaatcttacccaaacatatcgatcacgtgcctgtgtataaataaatacatacacacttaacaagttacaatcagactgacaccaatcttcctctttaacagtcgttttattacagcgttctgatcaaaactccagtgaaagttcaaagtacacagagagaaacaaaaaaagaagaagaagaagttgaagaagaagaagcc

SEQ ID NO: 1389 - DNA, 3000 bp, Unknown
  misc_feature (1)..( 3000): cDNA_ID_2134876_gDNA_ID_1620395_Annot_ID_155738 3000 nt of promoter + ATG
tgcattgtttacatcagtgttatttgaatcaagctgaaacatcttcctcttcaacagaggagaaaaagacaattgaatagtgttttttagagacttgcacattaggccaataactcaacactaatcacttccagctgaactttaggttgagactaaaaaaccgggttcaagtaaggctaacttcccgcataacctttgctacatcctctgggaaaacagggtttatgtaacaacctgtgccaatctcaaacccacctaccccagaaagctgaggtacaatctgtaagaaccagtgcgtataaggtaattgtgattctgtaaccttgagtggagaagtatggatcatatagttatacggtggatcgttaagttgctttgctatcttctgaagcatgagtttcagaagtcctccaaggtcaacagcctgataatcatcaaaacaaagtgagtcaggtgatcatctaaccaaaccataaatggaacatagtagatcagtaaaaggtaaccttaacgtcatcgagatgatggaagtgggaagaatgatctttcggaataatccaaatctcaaagggatacgtagcagcaaaaggagcaacagaaacaaaatgagacgactcatcgatcacaaaatgttttgatttagcttcacagagacaacatttcccagtctcctcgaaataatctttagtaccatcaaggcgtgaagaaaccgttggaggaacaactggtagagccatcatttgactgtgggagtgactcattgatgctccagccgacgcaccttggttcttgaaaaccttcaacatacgaaaacaaacgtagcagatgaatgtaactatgcaagcaacacaaaatatccacacataacacaagtattgacggctaaacaatgtataaattcacactaatagagctactacattgggatctatggataatgcttacctggatgtaattgatggaatcatgttgcgcaatctgattgatcctcttcttataagcgatcaagatatcgccgatacccaccggatcgatatcggagagctgaatcgaatgaacaggggattcgatcactacgtcgtggaatccgaatccgactattgtccgacttgttcccgtctcaggttgggtcgattgggtctcgagattcctactaagagccgggtacagattctcgatgacccggagtttccaattcgggtcatgatctggcacacgaaataactccggggcacactcttgctcacgaccgatgcaaaatgggcatgaggaaggtttgggattagggttctggggagatttggatttgaaatcagtcggtctcttggctctggcgggagagaatatgacccagcggttagttaccggatctttcctgagctcaggggactgattctcgactgagtcaccgtcgccgccgccgcgatcagaggcatggctcggtgacgtcatctttctctccttcttttgtgtgctctgtagctgcgacacttgtgcaatttcgttaccgttggcgttggacagaaatttagcaatgggcaattccggtttaaattgaaccggaaaactcgaaccgatttgtttcgatctaagattcgaatttatcggtgtaatccaaaccgaagagggttcatattgtattcacatgcctaaacaatcgagattttacactataatcctctttataataagatttgtacaagacaaaggatgtggattttacattaagcccttatacacgtgcgccttactggaacaacatacaagtcccattgtatacgtacgaacgtattaaattagtatattaacaaatttaaattcatgcgagcaaaacgaagcaagcagcaatattaagaccataaacattcgagaagtctacaagctttttattttttcaaaatatagatttattcataaattaaagcaatgaaaataaaataaaaatctaccaaatatttgccagaaattttgctaaagttgatcaatccatccaaagaaaaaaagaaaattttggaccgaaaaaaaaaaaaagaattcatccccaaatctgcacctcctctcatcttcttcatctccttcaatcttcattatttataacctaaaacgactgaatctttctctctctttatctccattttctaggtgtgcttatcacagctagaaagttcttacatttaaatcgccctagttggagaaagccgtcggtttctcattttgaaatttccaaggagatctgaaagttttaattttttggatcgatttcatcgttatcatactccgatcatcatttctgttcaagggttaatcgtaaatcgttcatcgggtataatgtttttgacatctcgttttttattctgtggtggttgttgtgttttgatgctttgtttcatatatttctcttttgattatctggaaagatcttgtttttgggtgatgatggagcgtgtttttgtatcaaactgtcgcttggttacactattcttttgaatctatatgtttctgtgaagatgagaatctgtattgatggtttctgattggtatcttgagtagtgaatcgactttcttcacagattcttttgatgtgttggtcatcatcatcatcatcatcgaagagcctttgatggcgttttctcgagagtaacgatgattttgttactcttgaaccaaagttgatgagtgtatggtctgaatttggttgcagatgactgtgattttgattgtttttatctgtttgattggaaagtgattttgatggaaagacaatgctttaagtgcaagccaatgtttcttgtattctttttgattgtatttttacttgctaacacaacggattggtgtcttttcttttggattgtgaaggaaatgcaaatgaaattggttgggttcacctttttatcaactaaatacgtactctctgctacctctctttatactgcaggttagttaaagaggtttactgaaagcaaaatactttcttactctttgtatggagtaagaatg

SEQ ID NO: 1390 - DNA, 3000 bp, Unknown
  misc_feature (1)..( 3000): cDNA_ID_2134853_gDNA_ID_1620395_Annot_ID_155730 3000 nt of promoter + ATG
cacatcgatcatgtgtagggcacggccaaacagttggctagtctcaccaagtattcccaagctcagatgcggaacatacaatgcccataacgttttcaaccgtgatcccatgatggggaagatcaaaattgccagtttcaaagacagaaacattagtgcaagtaccatatatggctctctttctgctatttctctgatagatgacccgttgtgtagccatgtgatcaggtttccatcagtgtccaagcttgttggttcaccttcatccatatactggacaggtttaagacctggaaagacacagatataaaaaagtttaactgattttcttcaaaggattttaataagttgtgagctaatatattcagatacagtagaaaacaaaaccagaaagtacaaacagagacacagtctggcttttcatgaagcatactctcacctgttgtttccttgtaaaactgaatcagggatgcaagatcctttggaccatggtatcgcatcttcattgtttgattcaccatcaggattgaaggcaagctatggataccatacctagaaaacacactgcaatatgaacaaaaaaattcatgatatcaattaacatggaccaaaaatgggaaagaaatgatgaaaacatttagtattttagaggataagctactcatgaaacaatttcataaggctaaaagggttatacagcataataacctaactaatctacatttgatgctcaccaaataaactaaaaagtagcctctagcaaagcgtgcaagaataagagacaatgaacacacatagcatcatttctgtcatattgaattatttgtcctgtctttgtaaaactaactcattaagccaaaaactttactgatcagtgtaaaagacggattgattactggcaaatctaaacaatctgacaagtaattcaagtcattttatttctgcaagggggatatcaacacccaggatttgttgtgaatggttcaattgatccatggcctcactatatcagataagatgtaaatagaataatctaagtattctaagtaagttcttacgatggtaaagcctgagattgctcaacaatcaggtgcgttatgtgaggaaacattgaactcagaacatcaaactttgggcgtactgcacgtgaaaacgggcaccgtgaggtataaaatagtatggatatataggcatttccatggtttgcatccatgagtttgtctagcaagtctccatctacctacattaacaagaacacaaattaagatacttgagttacaaaaacaggcaccctatatagaagcacccacacatatttaatttctttgcaataacatctttgctgcatttcaacattagaaattgaagctaatacattgcaggtgacatgatgagattctgttggtagcttaccactgttgacacaaataaaaggaattcattgcagaacttaagtagaaaagagagatcccacatatcggagaaacaagcatgatcgtgacaaatacatcattagttatacacttttccaaccaaaacaatccaaccatttaagtagattatttcatcataaactaatatattgactggaaacaaacatattaccaccagctttctttttacagtaagggactctatatccattgaacattcctcaaaattctaactgcaggtaaactactaccacgttcaaaaaacctctgagacctcaagaaacattggagcaaaggtaaaacatcagtgaagttaagctacaagcctataccgttctcattaagctttgcatagtgaaaaccacaaccaaaagctgaaaaaaagagacttgttgtcacgaccacaacactctaaagtgatatcatgccaaataagcaaaagagggctcgaatcgatccttacaaatcacattatggaagagttatcatctgaattttcaagagatgatatttaagcaaattcttccactttaaaggcacaccaaacgcatgcctaatccaatcgaagataaaaatattcgttttgctataacaatgatgacgtacctcgataggagggcttggatacaaagaacgaggacatttttgctcgatcacggatcggaacacctcgaattcgtgattgcaaacgtcaacgtaagcaaacccagaaggtaagcatgatccagctattgcagagacgaggaatattgaaacccacaaattcattaattaaggatcctaaatctacggcgaaacagaaaaatacagataaagtttcccaaattcgctaagagaatcaccagaaactttttacaatttacaaaatcaaaaacaagagattagataaaagttaaaggtgaaatcgaataacaaaaacacgaaatcaaaccaaagggaaacgtaagattgagcacgagagagcttaaagaacacaactttaagagaaaaactacacgaaacaatcacaaatatagatttggagaaaatctcagatccatgaaaaagtttttattgtcacttgtttttgcagaaacattacattacagatggagaacgccaaaaatcgattcttttttttaattttcttttttgacaaatcgcattcgtcacacattccttttttttttaattttctccactacaccactaatcttgccgtgataggtgcatgtgtatgtgtttaagacatatctcttttgttccggttggattagtttatgtaataaccaacaactatacttaatacattttgtccacttttgaattttctgtttcttattttgtttactgtaaaaaagaatgaaaatcattgagatattaaaactaactaatcactaaggcccatttagtagacccaataaggcccatatgctattttttttctccagaatttgacctttatgtatttgaccgagtggaaaagtaatacagttcttttcttctctcctcctctttcttcttcctgattggaattttagggcttttgaaagcacgaacgcgtgaagctctaatcgagaaaaaaatg

SEQ ID NO: 1391 - DNA, 3000 bp, Unknown
  misc_feature (1)..( 3000): cDNA_ID_2109094_gDNA_ID_1620396_Annot_ID_155768 3000 nt of promoter + ATG
gatattagttaaaaatatatacatatatacatatatacataccaagttaaatatatcaaaatatccaaaatgtaaaatttgacttatggtccgcatgttaaagcaaggatgttgcaagattcgacaaaacatcgtgtaatgaacagaagaattgaaattagtttgaatactgaattgatctctttggatcaagatgagtttttttttctcactccagtttcaatcatgactaatcatacaaaatatttagttattcgacatactcttttttggtaaattaatgattatcctacatactctaatgactaatgggtttaaccaaaaatttgcgccttgaaatcttcagattatgattaaaaaaattattttcctgaaacaaaataaaaaccagatgttgagtgacaattctgaataactgcatacaagtaagccaccaaaaaaaatgagataacaactatgccacacccatttcatattgcttataaccatctttttgagtaaacctttaattactagcacacaatattgaaaatggtgatgaactatacgtttgttgtgactgtactactccaacaaaaacgaacgcattagattcgtgaaattgttggtgtgtccaccttcaggcgcatcccacttttggtagccttttagccgtgaaagcaagatcttgaacaaatgcgaagataacttgaacattattagtccattgatcgatccaacggtagatagctcttctgtaaaaaatgggaatgtccaacttacttttgattggtttatatctttctactttcaaaagattataagtggactggtatattctttggaatataccaagttcattctctttcgacctttctttcctctcgtacgtgcttcaatcatttctcttaattttgactaattttatttggtcagtaattttgaactgattcaatttctctcctctgacggccaatgcaaggtcccactaaacatacaattagagcgaggcgtcataattgtgttaacttaagtgtttgattggtttgtttataataaaaatataatgatcatgtgggttttgttttgcaatttctcattaatatgaagagcctgcatgaaaattcgataaaatgggacaaaaggcatccaaacaactaatccctttgggacttgatgtgtgatgcctcgagtccatctatgttaccagtagaagtgaaataaactatgcaacaagtaatgcaagtatatattcattatggtctaatcatgatatattcttttcgacacacgtacatatattgttggttaaataaatatgaaggtttatccttcaaccaagtgaatatgttgtctataaaacttggtaggaatcatgaaggtttattcttacatacatcatcccttttcaaaatatgtttaaagcttctaatgcaattttggctcactttctatcaatctatatatgaaaggttaatccttcaaccaatacgttgtatactatttttggtaggaatcatgaaggtttattctcacttacaacatgccttttcatttttttaagtttctaatgacattctgtctcacactttctatcaactttctttaatttggtcttaaactcgattacctatgtttattttagggtaatatgccaattagaattctatttgaatataaaaccatgattaaaaagacatttagaaaggagtagaaaagggctaaggaatggataaattaatgatggtataaacacgaaaacgattcaagcggctgaaatgtcaattatttgtttaacttgcaataatgatgctttagttacgatttttcgcaaagctaagcaacctagtaaatgatatttatgtatttaaaatttacaaccaaacagaatttggaaagctataaatacatcaaacaattcctttttttggtaaattatatatatatatatatatatataagatgaatattgcgtgttatccattacctaaacttaagcaactataaccaatttaacaaaaaggaaaagaaaaagcaaactatataaaagatgaatgctatataactatataagctatgttggtgttgtaactctgaatccattaaaagattttctcttaaaattgataatgttaaattaaccaagaaaatcaagtttttcatacgttagcaatgtcactgaaagaaacatgacccaaaaaaaggagtgaaggtaagtgtacacaagtagcatttaaagagtcgggccataaactctcgttttttagtctgtgacatgggccattcattacctaaggtttatgtttgggctacttcacagcctgaaccaagtatccttccatcaccataaatcgttgacatgaaatataggaattcgtatatgaggcatttgtgttttctttcatattttagaggcaaaatacaaactaatttttttttagagaaacgttaaaaagaagtcgccatatattatttttcctcgtttaacatttttttttgaaaaaattgaataaatgccacatgtcatcattttattgcacaagtgacttgtgtttaaaagtgcaaggaattttcaacataatatatttttaggttgaattgtcaaaaaatgcaacatgtcacgatttaattgcatatctgacttgtcctctacatagtataaaatgatattgttgatgaaacttaaatcataaatacttcaggctaaaaataatcctcacactaatttcactttcatagcagaaaaagaaaaaagaaagaattatttactacttttttttttttcattttacgacgacgttcataaacagaaccagtggcactctcgtaaatatcttcatcagttccttgaagcataatttgtgaaattttcttttaataattttcatctccgccgtattaatacaagctctctgaacgcactctacgacgagcctaacgtctttctccgatcgccggttagcagattcaagcgagatacgagatccgacgagcagatcttctgcttaatctgtaaacatg

SEQ ID NO: 1392 - DNA, 3000 bp, Unknown
  misc_feature (1)..( 3000): cDNA_ID_2135009_gDNA_ID_1620396_Annot_ID_155783 3000 nt of promoter + ATG
cttatgaatctctcatttgtgttagctcgcgacccacgagcctcaaacctataatatttactgttgtagcttgcatcccaagaaacctataatattactcattaatcaaataataaggttttaagcatggactaatgatttctctcttgcctgaatctttctgtgattcttcatcagttgcttcacgcggctgaggttgctcatccatagccagaaccggtagaattggctggatgctggaggtcgcggttttcttgaaaacagtgccatcatcaatgtctggatcttcaattctcaaggcggaatctgagttccatctcttgaaatgccttgaagatgagttcttcttcttcacgttctctaaatcgaacaatttcggcttgtacttttcatgttctttctcactcgctttcaccatttccatgattttcttaaatctaaggagaggttctctgtttttgaatctctctgttttctcctcttgaaacaaagaggagtttttaggcgggagagacataatgaaagaaacaaaacaagagaaaaaacagagttgtttgatgtgtatgtaaagaagaattaagaaaaaaaaacttgttaaaacacaagaacgaaaccgtgtggtataataataacactcgactgcaaaggcaaatccagaatagctttttgagattgacttctgtttgatgctttgttttttttcctccttttgcctcattagattcctaactaactaaccgatttgttgtccaaactttcctcgatttttatcatttacagttatgtaaacaaatttaggattataagatgctgtgcttacatttagaaaaaaaaaaaacataaaatttgaactttttcactttactatttttaaattgtatcacggaatatttgtacacttaatcgaatttgaatgtttgactgtttaagagataaattttgaactttttagctttatatgtaatattatagtttttataagtaatttagtactaaattactttagatttttataattctaattcaattatttgatgtaataatctttttgtctatagtttcgttatatctctcttaattaatcccataagccgtttatcttcattaaccactcatataatcccaaaataatacaacatcttacaattttattggaaacaagatctgttaacagaaaaagaaaaaaagaacagcttcttcctacacagacaaagctactttgaggttaaaagaaaaggaaatgaaacatggatgtggtttagaagaaactaaagagtggcgcctttgaagatgaggaagttgagagtccccaaatgaaaatagatgaaagttcctttagaatgtgtgaagaaacacccaaaattggttcccacgacacattgccatccacttccatatctctcatcgaactcctgatttttttaaaaaaaataacaccaacttttatatatgatttttagctagaaaagaacaagaaacaagactactaaccttcttgatgtgagcagcgatggatatagaatcaaagacatcaaaaagatcgagagattgagaagcaatcttcattgcttgcatttgcatcttcacaggcatgtctgtctcttccaccttcgctttcccttccaacatctttttactcaaagactcaaaatttctatattaaaacaaaaatagagaagataactcgtaaggagaagataaaaatgaattgtacgtcacgttttggacaggttttagggagagaatctccacatgttctgcctctgtcgttttctcttttcttcctgagtttaaggaactgtattattaccttgcagatatctagataagaaaatcttgcttattcttcttcgttcttcttatctttaacttttgttttggtcacaatttttgaagagagtacatagtaagtctgaagtcataaatggatcggctatgttgtgagtttgataactacgataagagcagtaagaaaatagggtgagctgatgagtcatcagagtagtaggaatgatgtgtctgacgtgtgtccacgtcgttttcagacctctgattgataggataacgatggagaggctcatatatatcaaattctgattttgggagttctgaaacctgcatgtgatcagaataatgcgtctctgtttcttgtttgttgctaaatgggccgaccaaactaaggcccaaccctttaagtcatacatttttgatttgaaataagaatactttatagcaactaggaccaacaaaaatgaaattatcattcctaataatgttttcttacaatttggttatataatttggcacacaaagcgaatctcatgcacatttgtcattgatgttgctagtaataagcccatacccttcaataagacttcttgccgctattcgtgattcccatatctaatggattattgattattgcactttgcaactcaatgcgcacataagacgagggtgatttgtcttgaacaaacaagctcaaacaccatgtagtactttaatatagatttttgttgatatgttcgtattgcattgcatgtaataacacgattttgaaacaaatatttagtcaaactatagtagcatgactttaaaagaaattattaaagatgtgttaattaaatcataactctaagttatgatggtttagtggttaaaaagttcgtgtgcaagaaccaacctgaattcaataatggttgactattgaataatttttgcagtaattagattttttttttacaaaaattttagaaaataatttatttgttctgtttttggaaaccaaatgatttcatcatatttattatttactggtcaatattcaaaacaaaaagatttgtttaatcaaaagtttccattaatgattacttaagctcccgccgtaaaacatggtgagatttagaatcagaaacactcctccgatctttctcttcatttctgaacgatcacttcttcctccgcttttcaaaatccgaccaaaacccagtaacaatcatg

SEQ ID NO: 1393 - DNA, 3000 bp, Unknown
  misc_feature (1)..( 3000): cDNA_ID_2135001_gDNA_ID_1620396_Annot_ID_155781 3000 nt of promoter + ATG
ttggtgcaagagaaacaatatgaagtattatcaaatgaaacttgtgagggatatgaagagaagattgaaggaaaccctcgagaaacttcaaataaaaatatatttcaagaggaatgatatggatgttgttaagaaatcgattatatcatggttttttctcaactctacaacacttgaaagagatggtttttataaaacacgaaagcatgtgaggatagaagttgatccaacttctgtgcttaacgaggtaagttcttaaatactaacaaagtttgtgaactaaatcaacagtttagttgattaaatttttttcttttgttttacctggttcaaaagcctaagagcatttcaatggagagagttctcattttgttataaattaaaagaatatttatgactctagacatttatggagagaggtttagtttttggtcataatggtcataatgtgttctcgtccctccactttttcctcataccttatggttcaaggccatatttgttttgataataaatgtttagtatgttaaaacgtttttatgactaacattttattaaacactattttctcttaattgaatttattagtagtttcctcacactttatgaatttattattagttttaattttaaattgtcttttaaaattcaatatcgtatatttacgttttttggtggagtagatcaaattagcatggatatacaagcaactctatgagatcacatttacaagcaactctctcaagatgtaattgaagtttgaaggacaatttaatgtatcaaaaactattaaataaaattagtttttactttaaaatagaccaaaaaattgtttggtgataagatttatattaagaaacttttattaataccatcattataaacaaaaattgatatgataataataataataataatcaaaactgctgaaaataggttgcaaaacgtggcttatatataaaacagttcccaaattgaatcgaatttaatagtttattattttttaaaagtgtgtataccctacaagatttggtatcaataaacattgttattatatgtttcaaaaaaattcttaatgtttcaaaaatttgtttaaccttctctaaggccgaagtaagttaacgatttgcaaccaggcccatttatgtcacatataatggcccataaattcacttcaatcctaaaaataaaaatctaaccttcataatgggcaaaataaattacgatcgtattcaggcccacaaatacaaacaaaggcccatgcttttaagtacaaccctagaattagaaaacgttgatataaataagctgtcataaaattgagcttcttcttctctgaagccgtatcctagggttttctttgcacactactcgctccaatggtgatctctcctcttcctctttcgtcgattgaccatgaaaaccatctctgatattattattgtggaactttttgagtattgcagggaaagggaacagggagtttcggtaagaggaggaacaagagtcacacactctgtgtgagatgtggtcgtcgtagtttccacatccagaagagtcgttgctcggcttgtgcttacccagctgctcgcaagaggacttgtaagaactctcttcattgttttaaaaaaacattctctgaagatgcgtttcattttctcgatctagatttgcttttgtgtgttaatattcattctccatgatcgtgcttgagtctgatatgcatttggaccaatttgtatattcgttctctaacagaagaagcttatctatgtagctcgattgacatgtctattagttttgtttattatagcttgaaatgtttaaactttatcagttctttaatgtctttgcttcaattgattggttggaatttgagggattatctatgttcatttctgtctctgagctcaattcttgtctctttggttaacagacaactggagtgtgaaggccatcaggaggaagactactggtaccggaaggatgaggtatctccgtaatgttcctcgtcggttcaagactggattcagagaaggtaatgtatcttagtcttaagtttgttttctcttccagtcgaaatgtggttttgatggcacatttcttgtctttacataggtactgaagccaagccaaggagcaaggcatcagcttcatcagcttaaagagccagttcgagtagtctctcaggaaggactaaagcttagcattttttgcattcaactagttgaagattacttttcatgtggatctcatacattatgttatgtgggttttgtttcttttgttattcacttataaagttttgaacttggtttaaatatcatcttacatttgcaaccttaacaagccttcttcataggtttcattagagtcctagttttgattgaatgatatctttgaagttcgcgtaaaccaacctcaaacaagcctttcaaattacattctttgaagtcctggttttgattgaaccaaatcgtagtctattgaacaacctaaaaaacattgatttcaattgaccactgaagctctttaacacaataaatagcatccctgggactgcgactataataaaagttaaaaaaatgttgtcaagggtataattggaactttcaaaatagtcggagaactaaaagtttggtcttaatcggaaaaacatagaaacaccgtttcctcctccgcttcttcgtctttccgtcgtccactgtctctctctctctctcgcgacgcagatttcgattcgtcgaatattttagctaatcctctctcttaatctctttgaacatttttccccaaattcgccgcagtgaatactttctcttcccgtaaatctccaaaaatcgagttttttttattacttctcaattgaatttgcttcttccgattgatctcttaattgattcgcttgtgggttggatttgaatcctctcttactttccaaaggtcataccttttcacagatctatctttgaaattgtgaagaagaagaagaagaagacg

SEQ ID NO: 1394 - DNA, 3000 bp, Unknown
  misc_feature (1)..( 3000): cDNA_ID_3062079_gDNA_ID_1620396_Annot_ID_155790 3000 nt of promoter + ATG
aaatgtcttactagtatttaatcagtcatcgctctattaatttggttattcattatcataaagctggaggagtaaatttagttatgtcgttatcaccagtcctatattgatttgtgtttaatgcggtttcaaatggttagttcgtgtttaaaattgttgatctgtctcagctccatgcctaatcaagaaactatggttcagctctctgtttcttgtatgaaccttacctgtcataaatagcaacaaaaaagtgcagtaattggatttatttgaggatggagggattatcaaaatgagatggaattattacctgttatgattccagtctcgatttgatgaacttttggagacagtctctgaaagtttcaagcactgccctttcctgctccatgtatatatctgtttcattgacacttgtcttggtcttacattgggaatcctcttctccattgtattgaacatctatcagttcgatcaatcttccacgtgattgtatttcttcttccacattacgactctcagactcacttgacagctcaatggcttccttatcatcaggctttgtaaatatcctgttctggtcctctaagtgagattttaaaggaagtatgttgatgaagccaaaggaatagtagatccagtaaagtgtagattttgtaagagactacagatatacctgcagttgttgtagcagattctgacgctgcaacgagaagtgagcataaatctcccaagtccggaagaagtgtagaggtgtatcccatgagggaccttttctttctagtagcacaatgaaaattcagttaaaatatttatgattatgaggtgaaggaagatgaactatcattttaggaaatgcaaaatcgaacctgtaaggaagtttaggagagcaagacataggggaacccagagcattttgaatggaattgtcaggtatcgaaaataacggagctggacaagaattccactgctattccggacagaaaaatgagttttatggagataaacccaaaagtgcatatatgttatgaagcaagtagtatatttcacttgcctcagttagctctcggtctcttctcctccggtatacttgtggggaattgtgagcagaaaatgcaggaggctggaacgcttcactaacattcttgcagttgatgcatttacagttgtctgagcacagaagattagcctgaaagcactcacagtacttcttcaaacacctggttcttttacatttgcagcctctcgaaagcagtccaggtttagtatcaggtgcagccttacactacaatacaaaacacagaacatcccagatacttacaaatgaaaaaggatgtgaaatatacctctttgaagcttaacctacaaaagtgataggtgtcaagaacatacctgattatcagttaggctacctaaagccttttcactgaaggcatttgggttgcgacctagtacattcaccatagctgcttctctagcatcacatttctcagagttgttatgacaatcaacacaatcacagtctgtacataccactcctgatgcaaaacagtcacagtacctaataaccaagcgtcaaacaaatatccaataatgcatcaatctacagcagataatagaaatctcactattcaacattatactcaaatctctatcagcttaacactaagtaattcttggatcctgaaatgaacttacaactttaaacatttggactgcttgcatcgacatcctttgtgtttcctcgaagtaatgccttcttcatctgtcttatcctttgcttctgaatgctctctgcttcaaaatcaagaccagtggagatcagagagtagattttggattgaaattactcaaacgagaagcatctctagtgaaaattggcagagaaactggaacaataccgagaaatcggaggaaaaagaggaagttctttaacaggagattctcggaagacgggagatacctccaatttggtgaaaacgagcttcctagggtctttctctgtcgcgattttgccggaatctgcgtttcctgtcatatcggtccttgacacattatagtcgccacacaagttagttcctcaatttggcgaaccgattagagcatgaacggtgaggaatcctcagagaagcgtcgattcatagatcagatcagatcagtgtatcggagagtcgccatggctgacagatatcagaacaaaaatggaatgctggatcctaattcggaacgatgaatgattgtctctctctcgattttttttttggccagctccaaggggttttctaagaaacaaaaaggttctgtgaacaacgcgaaggtattcaaaagcgagagagagtgatcttggagggaatgatgatgtgttgatgacgaagatggagttggattaaagaaatctaatttcatgattaataatttaatataacaaaattagtcttctccaatgctcaaaccggagacctaagatgtacactccctttaaaaggtactgataaaaaaaaagttattaattgcatgttggcattaaatagaatcttcctctagagttcaaaacttcacaataataaaatcaatgcatatcaaagcatatgtataagatgttagctaaccacaattgttattcatcaacggtcaggatcacatcactcaaaatgcaatattcagatggtctttaattttgtgtaaatatacttagaaagaaattcacaacacaaataaatgagaaaaagcaaatcagtaattaaccttaaaaaaatgcctaataaagcgtcattaaagaataacccattatcgcctgtcactcacttttaatcatcaaaacacgccacgtgccaaactctccactgaatcaaagtcgccaaacgcttcagtcgctatttcatgatcgacacgaaggctctcttttggcgattgcaaccaccacctaagaagaacggctacgtaatttgactgtacgacttgcgaaaaaagtcgaaaccttttaacgaaccagacctaaaa

SEQ ID NO: 1395 - DNA, 3000 bp, Unknown
  misc_feature (1)..( 3000): cDNA_ID_2135289_gDNA_ID_1620396_Annot_ID_155787 3000 nt of promoter + ATG
ttgaggagcaatcctctctttgtgaatggggcagcgaatgtctcaaagaacttgctctacaagtaacgaaagtagaagagaatctcttctcagaatagtgtttgattgaagtagaaaagtcaagttaggttatgagatgaagaaacctgaagaggattgtaaggagaaggagcatcagagccgtatacgtcccattgacctgttgtgttacccaaatcttctaagtcaaagtagacacttttgtctccatacttagccaccacaccattagccctattacacatgaacacaacaacctcaagctaatttaatcacaaacaagagatgaaattatcagaatttaatcctttttaagctaattaatcatcactatatctatcgtttaaaacacacttcagccagcaaaaatctattaatatattttgaatttatagtgtggttatagtggcattttgatcctaattaatgaataaatgaaaagttttagttaccggatggatttgggtttaaagctcaggcgggaaggcttgatggagagcttagctccggcgagtgagctgccgccgagtccttttatggcggcggatggtttcacagcggcgacggttgcaagagacgccatgagcttcgatcactattcttttgttgtgtgtggtgagtgggaattttgtgtaggaaataatagcctttggtcacaatgagtcgagttttgatcttcttctgacacgtggcaactgatttcctcccggggattttcttacgccacttggaaaatgccacgtggaatctagtaggataaggttatctcaaggttttaactaaaatatttcgtgtcttcttattttgttatagggccccttctttatgattttgttttggaaaaaaccccaatagttttttaggtttactaaaaactccagccagtggcaagttccctgaatcacgttatagatagatttgtgaatcaccaccacttttaatttgagctctgatcttaggagttaggtgtcgacaaaatatataaaaaaatcacaacataaatagttaattttaacccatccaaaaagaaaagttcgattaccgttgtgtctcatttggcttcgactagtgctaatatttacatatgtgaatgtagagaggaaaggcaatagtcatggccaggtgattccatctgtaacatattcacaatttaacataattggcagtgtagtgtgatttttaggataatccaacactaacaattacttgttatatataatcgatccacatattctatactgcgtaattcgttactatcattgacaccttaaatggacaaaatcacactaaaaggttttttgcaaaccatttttgaaagtctaaaaatagtttaaagtatctctagaatttgaaataaaataaaaattcgttttgcagtagttatttagaggttttgaatgatttttctataaaaagtaaattgaagtagtgaattttttttttttttttttttttgagcaacgttttgaagtagtgaatcaagattcattttgtaatgaatctcgtataaaaaagaggagaagtggggtcatcaaaacatgtttgagaggacaagattccacgagagtgtggggatctaattgacgacccctaagaaatgggagaggcaacaaagagagaagaaaatagacgtctttctaattggagtttgtcacgtgacggaatcttattggaatccacaaaccaaagtcactaggctctgtccttttccaacacatgaagagaaaatctcggagattccaaacttgtggagagaaagatgcgactggccaacaataaataaacatatttagacacaaaatcctgcggtaaataattaacaattgctaatgcctaatgcataggatcctgctaactgctagcaaatgcgtgtcgcagctactttacaacttctcttaaaaacatattactatattagaatcgaactatacattgggaatgagtataccactaatccactaacatttgtctaagctatttccaagaaagaggtttctatagactccgatgcatatgaggaaatgtttcggtgcatatgataggaaaaatcataaccgatacatttgagtaaagaaaaatattacgtaagatttactataaaaataggaaaattgtgatatacctgtcgagttggacccaaataatcgacaagatagactttacacataatattgagctatgtgtattgacgtatataatctatcttctaataacgtagattagcacaaaattgacgagataaacataaggaaaacgggaaaagaagagaagttgtttaaacaaaaagggaaattgcaagccaacttgaaacttttaatttatttagttcacaagttgtgagaaacagttatttctcccaaaccacattttatcaatataataagacaaataaaagaatgcataacaattaacaaccaatagttatcgctcccttcatgcatgttatagacctgacgtggaattcaacataaacagctaactgcaagttcccaagactactttgttttgtttcatttgagatagtatgtcatagcaaaaaaaattgcatattacaaaatgtagtgcagatttcttgaaattatgaaaagcattacagtttaataacgtttcatcttggtcgaatcaaatcaaagaaagaaaatggtaaaacaaatcccaaattggttaaatattaacctgaaaagggaaatgttgacaaaataactgaaaagtaaagaaaaatatacggaaagtatattcttccttcatatgaaaaaaaaaactaaacaaaacaaataaaatcagatggggtaattaaaaaatgtttttaaaaattaagaggtaaatcaataaataagaaaatgtgggtctctccttgctcgtaaaaggcctatataatgacctaatgcgactcttctttcttccatcattctcggtttaactgtgaaacacataaataaaacaaagagaaagagagagaat

SEQ ID NO: 1396 - DNA, 3000 bp, Unknown
  misc_feature (1)..( 3000): cDNA_ID_3062099_gDNA_ID_1620396_Annot_ID_155771 3000 nt of promoter + ATG
ctcaaaatggagattgatatggaggaagatattgatgatgaatcaaaagaagataaataagatttttgatcatcgtgttcgttatgatcctttcacttattccctaaacttcgagaatgatggaactatcgcatatcatgaagatcctgatgtgtcttctaagtctttttctgctagatttgttgtgtcttctaaagttttcaaacttaattatagttgagcttctttcttgtactcaattttagattcaagtgtttatacatttcaactagcactatactatgtgtgtaagaaatggaacagtgtagtaatttttcagcttctacttttttttctttttgttattcatattagataaatcaaatcttagaaagatgaaacatcatctttttcatgatccacattgccaacagcgtcaagtatagatgagtaagtgatggcatcatactcaaagcctttatctttcatctctctcatcattcttgcagcctcctcaaacattccagcatgtgcaaagcatccaagaagagtattataagtgacaccatcaggcttaataccagaatgctttatagtttcaaacatttctatagcccgtctcggcacacctgttctagcaaatccattgaggatgatattatgcgagtttatatcggccctgcaaccgttttcttccatctttctaagcaaggaattagcttcgttgatcataccagcctttaccattcctgacatgagggcgttgtaggcataaacatcgggaccacttccttggttcttcatctcattgaagagatctacagcttcgctgagcttcccgcatttcccaaaatgtttgatcatcacagcgtatactcgagaacttacattgccgaagttttcttttagttccttaaatagctcattcgctgcttcatatcttttcgcctttccaagagcgtttatgaggctgcaatacgctgcaggacaaggtggaaaacctttctcatccatctcctcaagcagcaacagagctttctctactctattcgttttacaataaccatctataaggattgagtaagtgaattcactaggggaaacactgtctgctttcatcttatcaaaccaagagcttacttccgaaacatgtgcttttgactcaaacagagctttaatcacggtattgtatgagacaacagtgggtgtacatctccacattcccatctcactgaagacatttgtcaactcctccactcgacccactttgcctaaaatgttcatcagattgtttaagaacacaacatcaggagtcaatccatctctaagcatgtctttatagaagccatatgcttcatctaccctcccagctttgccaagtccctttatcagttccgtgtacgtataaactgttggtgaacaacctgctcgtttcatctcctcgaaaagatctaaagctttctcaactttacccaccttaaagtaaattcccaacaacgtggtgtatattttctctgtaggctgcatacagttatccttcatttcatcaaacaaccttatcgcagaatcattacgacctagtttttcatacgaggatataagcgcagagtaagtaatcgtgtctggaaaacagtcaccttcgttacacatctcagtataaacctcatggactttctcgtgctgtccttcttgcatcaacattagaatcaccgagttgtaagtgctcgaagtgggtttacacttgcgtccttttgcctgataaaaaaccgataaagctttactaaccatcttagctcgccccaatgctttcacaagctcagagagtactgctggactaacgctaacatatgtgttacggaccacttcttgtatcgttctatacatttcaccataaagcctagcttcttcaaggcagcgtattaaggtcatgtaagtggagcaatcatgctgaaagtttcttcttttaccagcccatttgaaaaactgaatcttgacatttatctcaacgtctatctcaagaatcgaacgaactaatcgatgatcaactttcagtttaagcacctcaagagctttctcagcatcaggtccccatttgaagattttcactatcctaatgaatctctcatccaacatccgcactgacggatcctttctagataatttccacttctcttgaggcttctcagattcctcatgattcggaacactaaacatttgaacaatctcattctctgcaaattcatggataaaacaaaatgttcaaatcaaaaccttttctcgttttcttacttcaaaggaatcgactttaaaccttttttgcaaatcccattactcctaaaaccctaaacaatcaagacatttcgcttatcgacgaagagggagaggaaacaaatagtgcagattacctgtttgtttaaatctctgagagagatgaggtagacttgagatgcttcgcttcgcagaaccggatcgagcagatacatacatcatctttataaaacgggattcacatgtaacaattctccggtggcgacaaattccgacgtctatttgaagtcgccgtcggtggttttagacagaacggctgagaaaaacagagagaaattttagggtcagacagacgcacgtgaggttcacgtgttttcttaaaccaggcgaacccagagattgaggataacgaagcaggggaagtctaagctggcgagttttgattggtaagttatgtacacaaagcaccgaactattccaaaattgcagatatgccattgccctcctaaacaaaaaaaagtttcagtctttgatacccaatttcgtaggatttgtagatattttcttcagtaatcgaaggatataactctgagatttgtgtaagcattcttctttgagattttccgaggtcacaagtcagtacacaaaggaagttccttttttgggttttggggtctgctttgtgtcagtgattttaggattgcttcatttgccacacatttccaatctcttaagtagttggcggcgaagatg

SEQ ID NO: 1397 - DNA, 3000 bp, Unknown
  misc_feature (1)..( 3000): cDNA_ID_2134983_gDNA_ID_1620396_Annot_ID_155773 3000 nt of promoter + ATG
tgtcttcagtgagatgggaatgtggagatgtacacccactgttgtctcatacaataccgtgattaaagctctgtttgagtcaaaagcacatgtttcggaagtaagctcttggtttgataagatgaaagcagacagtgtttcccctagtgaattcacttactcaatccttatagatggttattgtaaaacgaatagagtagagaaagctctgttgctgcttgaggagatggatgagaaaggttttccaccttgtcctgcagcgtattgcagcctcataaacgctcttggaaaggcgaaaagatatgaagcagcgaatgagctatttaaggaactaaaagaaaacttcggcaatgtaagttctcgagtatacgctgtgatgatcaaacattttgggaaatgcgggaagctcagcgaagctgtagatctcttcaatgagatgaagaaccaaggaagtggtcccgatgtttatgcctacaacgccctcatgtcaggaatggtaaaggctggtatgatcaacgaagctaattccttgcttagaaagatggaagaaaacggttgcagggccgatataaactcgcataatatcatcctcaatggatttgctagaacaggtgtgccgagacgggctatagaaatgtttgaaactataaagcattctggtattaagcctgatggtgtcacttataatactcttcttggatgctttgcacatgctggaatgtttgaggaggctgcaagaatgatgagagagatgaaagataaaggctttgagtatgatgccatcacttactcatctatacttgacgctgttggcaatgtggatcatgaaaaagatgatgtttcatctttctaagatttgatttatctaatatgaataacaaaaagaaaaaaaagtagaagctgaaaaattactacactgttccatttcttacacacatagtatagtgctagttgaaatgtataaacacttgaatctaaaattgagtacaagaaagaagctcaactataattaagtttgaaaactttagaagacacaacaaatctagcagaaaaagacttagaagacacatcaggatcttcatgatatgcgatagttccatcattctcgaagtttagggaataagtgaaaggatcataacgaacacgatgatcaaaaatcttatttatcttcttttgattcatcatcaatatcttcctccatatcaatctccattttgagatcttcttcaatctcaaaacatcttcagatagatctttgatccgatcgtaactacaagacttggaacaacacattaggtgtttcttgtcgatacctgaactgcatagcaccattagagcagatgaaaatacactttggacaacagaattataaatttaaggatactgattttttgggtgatatgttgtggcttgtattgaatagtggttacgatctttatgataggatgtgaagaatgatttgtttaattgcatataaaagtttaagtatcattcttgttacaacttgcttatcctgcaatgtgatgcatatattttaattacccgtatatcatattattagtagatattttctcttataaagcaatttaaaactagaaatcatttgagatatacaattaatggctatccattgaatttaggggcaatgtgtatgttggcatataaaaaatattgccgttttgtttatacgttacacaaattgttttaattggccagtgagtagattgtctatatcatatgacatataatctactgtaacacagcaatatattaaatgggatgattaaacactgaacaggtaagatcaatacataaagaaaaatttagcagattggatctacaaaccaaattcgcatctgatttgttaagaaacaaatgataatctactgtaattgtttatagtaatcttaatatatgtgattcaataagtgagttttaataatattttttaaaacatcttgcaacatggagaatatttgaacattgaaattttcgtgatttcatgctgtttttttttgaccttttagatataaacatacaaaaataatcaaatctcatatatactcatatagttttggaatgccagtacgggttgacatttggaccctgaatggatgctgatttttgattcagtttttgagtttagattttagtttatagattttagattttagttttaaatttttgttattatatatttttgtttaaaaaatcccaaaaatttgttttttggtttttgagaaaaataacgctgattaataagtaaaaagtagattttctaaattttaacaaaagtaaaaaactaaaatcatgaatgaaaaactacaataaaatagttttactaaattgtaggaaaaccaaaatttttactaaattgtagaaaaaccaaaattttaaaatcttaattattatgaaaataaatttttaaaaaacaaaaaccaaaaactcaaacaaaatctacaaaacattcgaggccttggtttctaaaaaacattttgtaatgaaaatcaccaaacaagtcatcatagcccatatttagagcctggctaggttttgactgtgatgctcattattggcccatcatcacattggttttcactaattccatcgccgatgaagttgtgatctttcccgatcaccggatatctgtaaaagttgctgaggtaaaaggaaagtttttttgaaggtcgcatagtatccatttagaggatcggcgatagtaaaagacagtaaccaaaacccttaatatctattacatcgattcgcgttgaaaagcaatgacgaagctatctgatcttcccggagatttgctggaggagattctttctagggttccggtgacatcatcgagagcattgcgatctacttgcagaaagtggaacactttatctaaaaatgagagctttactaagaatcgcattactcaagtatattcatcagcagttagaagagaagggtgatcttcaggcgattgtcttgttaaagtatagtctttattcg

SEQ ID NO: 1398 - DNA, 3000 bp, Unknown
  misc_feature (1)..( 3000): cDNA_ID_2134991_gDNA_ID_1620396_Annot_ID_155776 3000 nt of promoter + ATG
aatgacctaacgttcttcacagtctctgcaatgttacctgttgcggttaaatctccttggatcctaatcatagcagcaccttctctgattctcctcaaagcttctcctgtatcacggcaaccacaaatgaacggagatcggaaattatgtttgttgatgaaatgatcatcatccgcaacagagataatctcgctctcgtcaatgtaatcaaccgcaagagattccaagatctgagcctcaacaaaatgaccaacgcgagctcgtgccatcacaggtacagacacagctcgttttacctctttgatgagaaccggatccggcatacgacgaacaccgccgcgagatcgaaccggatctgagacgattacagaacatgcgccggcggattcagcgagcttagcttggttaaccgaggaaacttcaacaatggcgccgccacgaagtacctgagctaatccgaccttaacagagaacggatggtttttcttcgcgtcggtaatggctgtgccgctgtagagagtaacagctccttgatcttgatccgtcatagcttgatccgccatttttaggttctgtgagtttttagtaacagagagcttttcgccggagaaacggtgtttgttagtaacacgatctgagacgagaacgagaaagctgcgttgaaggtgaggagaaatatagagagaacggagaagacgaagaagagtgtggtttggtctagaaacttctgagactgttcgtcactgagaaatggttagggtggaatcgcaaaacggcgtcgtatgcagaaaaaggaaactaagtgggcttccatgatgatgattgatgacccaagtagacggactttttctttatttttgtaagagccgttggatgtgaatagaacacgtggcgtaatcgtgtgtaattctcgtccaaagtattttgaaatgattgttttgatggacacgagtcaaagaagaaaacaaagcatgaaatatttacgaaataaagggagtggtacatctaacaactgtcttacttagtggcccaccatgttataaattgtcacgacactagacgacgtcgtttgtagtgctcctcacgtgtttcaggttgttggttctatacatttttacagttttgaagcaattaaataattgagtacgtaaatcttactcttcccaactgtcactaccactgaggatgtttaatcatataaagttctgaatcttgtatgatttgatattatattagatgagacaaaatcagtcggcaaaataaaaagatggaagaaaaaagttcttttttaaaccgtcatcaccgattcaccatatatggatgatggtaaaaatgactacaacggttttggattgtttggcagcttgggaaacaaaaagattgtaggaggatgtagtttactttcatctcttacgtaatgtgagtacgcgggcatgatccagagatttatacggtgcagttggttttatgacatatggtaaagaaaatttgtttaacatcaaaaaatgtggtgatcgtttactgatttgtcttctatcaaatcaggaagcaaggtctatgaagaagggctacgaaagtggtgaatacacacaacgtcaagcaactacggcaaaggatcgaagcattgtctaagagatttaattacgaaacttcaaactcaaagtaacacgtagttgtaaaaacgttttttttggattggtaaaattttacattcattttttttaaaatgtggtgatgttttgcatgtgggtgtagatttgaaaataccaacgatttgttgttgagttttagacacgagtaaataaatggtgggaaatcgattaaacacacatatgaagcgatgtatgaaaacgacatgcgaattttatataaacaaatatcagctcatattgacccatgcgatcccaaaatgaatggagaatgacgacgtctgatctgaccatatcatatgtatggaaaagaccatttatgttcaagcttcgaaataaacttgatgatatgatcttctctatgttttgatttggagttgttcgattgctcattgagagagataattaataaatatggtgacactttctctcttattcgtcttagtcatatcatatattcatatctcatgttgatttgttattttgctatccagggagaccacaacgaataacactcacaaacgacaaagggcgcgacacatttgcttttgcaaaattcaaacttgaaagctagaaaattaataatatatagtcctgctctataatagaatactataaaatagtaaaacaaagccactgaattcagacaatccaaattttaatgctatcatgatcactctaaaaaacaacttttacttatacaagcgtgagaataatttggtcaaaaaagttaccattacttttgaattcaaaaacgttaattatcgaggtttagctaatataacttaatttttagtgatattatcagatatagttgacgtatgtaaatttaacattgtagaagttcatattagtaaatgtaatccgtatgattttctaatgaatttaattgaattttagaaaaaaggtccaaactatttggataaatcgactacatggtattgatatgacaaaaaatctcatactaacaaaaatacataaattagtagtaaaataactctgtatagtaattagtaactataactatcatgtaatccaaaaaatcccataaaataaaataaaataaaataaaagcattaagtagaaaaggtccacaaatctgtgattaataattagaggaattaaaacgacatatagaaatcgagtttaagggagcgtcagagaacgaacagcgaccaattactctctctactctctgcgctttaatttgaacttgtggagagagaaaagggttagatacagagagatagcgaaagagaagaagaagaagaggtctatcgacagagcaaacttcgtcaagagatccgttaaaaggatccatttggagctccgattcgagctagagtcaata

SEQ ID NO: 1399 - DNA, 3000 bp, Unknown
  misc_feature (1)..( 3000): cDNA_ID_1030309_gDNA_ID_1620396_Annot_ID_155780 3000 nt of promoter + ATG
ttgtcttcgaataaaacgtctcgcttttgttttgttgttccttttccatgttataatatctcttttgggatgcagtaccgagataaccgttgtgcaagaatcaaggaaccgtactctttgtcaaaaatcatgtttcatgagtttgaccattggacctacttcatgtattcatctaaaatagctaaatattctatctctcttttctttccaacaacacccaaagatgaatttagaattttataatgattttttgccaatttagagggatcgtattcacttatagatttgtatatttttataaataaactaaattttataagaaattagatttgaactcgtccgatgtaccgactttaaaacttttaaataaaataaatttaacaagaaaatatattaaaattttattgtaaagaaaaactatatttcggaaataaataaaaacatttggagtaaaaaaagagttatttaatggacttggctagtttttaactagcaactcaaaagtgatttagttgaacgaattttgtttaaaccgactttgacaaaaggctatcaaagatgaatgatttgtgttgattatgtgactacaatgccaagcaatggaggtacttattgcttttgagactattgaatagatttataagtttttgtaatgaggttgaaaaatatttgcaagtacaaaatcctcctcaaataataatgcaagccttagattctcttcatgccttaatttcaatcaatcagcatggaattttaacagaaactggagccatgctttctaaattgccagtggagcaaaaattgggtaagatggtaattttctcaaaacgatatggatgttttgaggaagtaataatcgtggcgatacgaatgttctgaggaagtaataatcgtggcaatggtttgaggtacaattatagagaaagggcttgtgattcagatcgtctttcaatgttatttgcctatgagtcatggacagaatctaattattctgaaaattggtgcaagagaaacaatatgaagtattatcaaatgaaacttgtgagggatatgaagagaagattgaaggaaaccctcgagaaacttcaaataaaaatatatttcaagaggaatgatatggatgttgttaagaaatcgattatatcatggttttttctcaactctacaacacttgaaagagatggtttttataaaacacgaaagcatgtgaggatagaagttgatccaacttctgtgcttaacgaggtaagttcttaaatactaacaaagtttgtgaactaaatcaacagtttagttgattaaatttttttcttttgttttacctggttcaaaagcctaagagcatttcaatggagagagttctcattttgttataaattaaaagaatatttatgactctagacatttatggagagaggtttagtttttggtcataatggtcataatgtgttctcgtccctccactttttcctcataccttatggttcaaggccatatttgttttgataataaatgtttagtatgttaaaacgtttttatgactaacattttattaaacactattttctcttaattgaatttattagtagtttcctcacactttatgaatttattattagttttaattttaaattgtcttttaaaattcaatatcgtatatttacgttttttggtggagtagatcaaattagcatggatatacaagcaactctatgagatcacatttacaagcaactctctcaagatgtaattgaagtttgaaggacaatttaatgtatcaaaaactattaaataaaattagtttttactttaaaatagaccaaaaaattgtttggtgataagatttatattaagaaacttttattaataccatcattataaacaaaaattgatatgataataataataataataatcaaaactgctgaaaataggttgcaaaacgtggcttatatataaaacagttcccaaattgaatcgaatttaatagtttattattttttaaaagtgtgtataccctacaagatttggtatcaataaacattgttattatatgtttcaaaaaaattcttaatgtttcaaaaatttgtttaaccttctctaaggccgaagtaagttaacgatttgcaaccaggcccatttatgtcacatataatggcccataaattcacttcaatcctaaaaataaaaatctaaccttcataatgggcaaaataaattacgatcgtattcaggcccacaaatacaaacaaaggcccatgcttttaagtacaaccctagaattagaaaacgttgatataaataagctgtcataaaattgagcttcttcttctctgaagccgtatcctagggttttctttgcacactactcgctccaatggtgatctctcctcttcctctttcgtcgattgaccatgaaaaccatctctgatattattattgtggaactttttgagtattgcagggaaagggaacagggagtttcggtaagaggaggaacaagagtcacacactctgtgtgagatgtggtcgtcgtagtttccacatccagaagagtcgttgctcggcttgtgcttacccagctgctcgcaagaggacttgtaagaactctcttcattgttttaaaaaaacattctctgaagatgcgtttcattttctcgatctagatttgcttttgtgtgttaatattcattctccatgatcgtgcttgagtctgatatgcatttggaccaatttgtatattcgttctctaacagaagaagcttatctatgtagctcgattgacatgtctattagttttgtttattatagcttgaaatgtttaaactttatcagttctttaatgtctttgcttcaattgattggttggaatttgagggattatctatgttcatttctgtctctgagctcaattcttgtctctttggttaacagacaactggagtgtgaaggccatcaggaggaagactactggtaccggaaggatgaggtatctccgta

SEQ ID NO: 1400 - DNA, 3000 bp, Unknown
  misc_feature (1)..( 3000): cDNA_ID_2134973_gDNA_ID_1620396_Annot_ID_155772 3000 nt of promoter + ATG
aatccggttggctcctcatgcgcagtatctcgccctttgcagagcccaagtcctcctcgagcttcttcactttcttctctagcacttccctttcttttcctagactcatcacgaggatatgtgcatcttccacattttccttagcttcttttgatgcattctttgcctctcctagtgatcgttgaagtacttctttctcgtcctccaagtttgaagcatgggtattcaccttctcaagctctcgtgacagtattgatgtgttcttgttcatctcatctaaagactttacagcttcttcgagatctgtttcaagggattttctcgcctccctttccatcaagatctgcttttccattcctttcacctctttgttcaacgacaaaacagtctttttctcctcttccaattccttgttactggtttcaactttcttgtaaatctccacaagttccttctggaggctctggttcttgacagaagactctttgagttcatgagttactccctcaagctcgtctttaactctcctccgaagatctttctccagtgcaagttcgctagcagaaatctcattcttttgtttttcagcatcgaggttcctttcatatctttccttagcttccttccattcttcgtgaactatagcaagctctgattctaactttgaacacaaagctcttgactcatcaagcatcgtttccaggtcagagacccgatctctagatgcctgcagtgttttctttgttccttcaagttcatgtctcaaattttttactgtagtcagttctatatccagcattctcttcgagtcttcgtacttctcagttaagtcagcaactttgtctttacttttattaacatcatctagcgcacgatccagattttcatttagctgctgaatctcctgctctttcctgctgatgagctctgcatctgcagctgcttgcgtctcagaagtcaatttcaaagcactataatcttttgaaatactatcaagcttctggatataactctctttctcagccactaaagttgttattcttgtgtttaactcctcaatcgcagagttcttcgagtccaattcactctgagttcttatgagttcttccttctgctgtttgatctctaacttcgcttcagcaagatctcggctagtttgagtgtaaatagagttgagttccttcaattctgcttccttttttgccaacgatgcattaaaacgttgagctttttcttcactatctttcagctccaaactaagcaagttgatccgatcttgtagtccttcaaccaaatcaagcttttctctgagctttgtttctagtgcctctttgtcttcgccagcctttgacagactattttccagactttcgatttgatctttaagcttctcacataatttcttctcgctacttagctcccggcctaattctgtcaccaagtcctttgcagaattcaactggttgatcaatgacaactgttcctcttttgccttttctacttcctttttccgctcttcctgctcatgctgcagttttgcctcgaaatctttctccttcaaaaccaatgctctttctctgtctttcaactggttctttagctgtatgccacggttatcggtagcttaagtcaaaaaggatcaaatccagcactagcaatatattcacaacctcagaaagttaaagaaacaaaagaagagaagctcgaactaaatgatataagctgctaagacaagaacattcacccacaaattgtaaagcaaaatctttaagtgctagtagcttacagattcgatggtttcctcagcagcttttgtatcttgccgagccagtgcataaagtgcaccaagaacgccagcactaaaaattccaagaccattcaggagagccagaaatggatttggggatgttccttcactaactactgcaacctaatccaccaaaccaatcctgattcagtaaaatctcaagcactactttaaacacattgattctcaattaaaaaaaaatcaaattgagaaggtctaagagagtcttacaacctcagtttctagatcaaccttcgatgtctttatctcattgcctcctggaattaaaaagcagaactggtcacaacaatgaaagaaagataaccaaaagcaacatttgaacaaatctcatctaagcaataaaaaaactcactttcatcagccaaagcgggtgatcgaagctgcaaaaagggaagaacagagatacccacaagaaggaaagccctccttttggcggaagcaacgtcatactcgtacccatcttcctggtttaaagaagccaatgttggtcgtcggcgcttgaacttggcgacattactcgaacacagaagcccaaactgagacgaagaaggagaagaagaagaagaagaagaaggagatgaaaggaatcgagagtgtagaggaacagaagggacgaagcaagagccccctatcaggaaacccatcttcgccgccaactacttaagagattggaaatgtgtggcaaatgaagcaatcctaaaatcactgacacaaagcagaccccaaaacccaaaaaaggaacttcctttgtgtactgacttgtgacctcggaaaatctcaaagaagaatgcttacacaaatctcagagttatatccttcgattactgaagaaaatatctacaaatcctacgaaattgggtatcaaagactgaaacttttttttgtttaggagggcaatggcatatctgcaattttggaatagttcggtgctttgtgtacataacttaccaatcaaaactcgccagcttagacttcccctgcttcgttatcctcaatctctgggttcgcctggtttaagaaaacacgtgaacctcacgtgcgtctgtctgaccctaaaatttctctctgtttttctcagccgttctgtctaaaaccaccgacggcgacttcaaatagacgtcggaatttgtcgccaccggagaattgttacatgtgaatcccgttttataaag

SEQ ID NO: 1401 - DNA, 3000 bp, Unknown
  misc_feature (1)..( 3000): cDNA_ID_3062101_gDNA_ID_1620396_Annot_ID_155770 3000 nt of promoter + ATG
cagtgtttcactctacaaagtgcaatatataagatttgagatccacattttctgaaatgctcactacataaattgactacagcctatctcgaaaaatatataaacctttacgtgaattttgttttgcagacttatattagaaatttaattattgttgtaattattctagctagtctaaaatttctaaaaatataacgttttatcaaatcgattttcaaatttaatatggtctggtctatagattctatgatcttcaaatcaacgtgatgaaaaagtcaagtgtaatttacgatttttgttgcataccgttggaatcatgaccccaaatattaagaagataaaacatgatgggaaggtaccaaacaaattttaaggcctaatatatccttacaagtatttaaaatacgaacaaattgcgatcaatgtttaagtaaaaaaatcaatactgataaaaaggaggcgactagaaacaagagtttccttgataactaatcagatggctttgttcaatggctgcttaatattggggtaaaagaagcttagtgacttattcaaatattgctaaacaccaatacaattaatattctagtcaataacaagatcccatagatatttgtaatatttttttccagcaatttgtatatttgtaatatttacttgtaacgataggattcattttttcttatggacggaagacaatattttggtgatggactgatggtgcatgtatttttttagctagtttaacaaaatacccacacaaaaaaagatgatcggtagcattgaattataaaatcggatataaagatccataagtcagctgaaattaaaattttaatttcagaattaatgcaacaacttttggctaaactaaacaatatatacgtgatgctacacaaattttataaactaaaacgacaatatttaacccaaacatagacaaaatatatgaattgtacgtaagaacttgttttgaatcaaaatatattcaaaaatttgttcactaaatagaagagaaggggaatgggtttgcaactaggagtattatttgaacttaatcgtgttttctaccatctatctgagcaacacattccattattgttcatcatttcatcaacacgtcatattggtaacttgaggaagctgtttgaccaatgaaaaccttgttatttgggggatacttgttttctccatcgctaatgatttgttgattgttcaatggctgcttaatgtcggtaaaataagagaggcttaggtatgctaaacattttcaggtcaataaaataagattccatatatctttgcagggatctgtacgtatatatatatttataagatacgtgaacccttaaatctttagataatgctttttatttatgatggaagataagaattaggtgcgttaaattaataattggagtagtatacatactttagcaggtataaattattgattttgaatcaacttggaatctttgtaacgttttcccctttttcgttgtttagtactcatatctaacgtttgatatcgtgaaaataaaaaaaacgtttgatatcattaactatcaaattttattgtattttgttctggaaacttaaattgaagccattaaaagtggaggccccatcagtctcccaaattcaactgtcctcatgaccccaaaaatcaacgttcaaaattgatccacgcacttcgcaaacattgttgtgtgtaactcttgtttttctttaactcgagattagatagtaataaccctgtaagaaatctacttttttttatatatcttatctaaaaggctgaaaaccacaaatttacattcaaagatattgaccaaaataatacacatccattaactaccccaaattagcgtataaatctgacatgtaaagaacatacattaatgacgacctaaaatctgctttagttaatttgacctgcaaaaccgtgttagtgctgaaaattaaagacaaatagtatcttagtttagcaaatatttatgctatgtaaggaatattttttattacaatctttatagtaacacaaatcccctaaaaacaaatagtatacctcaactataaataaatttccagtaaacaagttttataaatgttgaatttgacccatatagataataatcaaaagaatcttttttttttgttttattttgttgatttgaccaacacaattatgttaatgatgatatatagaaacaaatatgttagtttaggaaaaatatatttaaatgtgctatacaaggaatgattttattagaataacataaaatccaatgtttttaatttaattattaataatataaatcatgtatagtcaatactatagtatcccctaaccataaagaaattgccagtgaacaacaatttttgacttcttttttgtaatcacaagtgtggtggatactcagaacttttgtcgtcgttttctcttgactaatccaagtcacactaaacgattcatctgagttaagtttttatttattatgattttcatcacaatcttatgagttctgttttctttttgaattatagtagttttttgttatatatctcaatgattcatccctcttcaatcttcatcatattcttcttcttcttcttcatatgccatgctctacagaaaatatgatttctttagatttcatctttttttacttgtttttattttagtcacttgaatgtgagggagaaaaaaaaaaaaaaaaagacaagatgtgaaacgacgcatttacccttaggaagccaaacatcgaaaatagaaaccgcttttttctttattttttttcttaaagtcaatcagtaaaacaaaaactgccattacccataataccaactacactttcacagccaagtgtctataaatacagagcataattacaccatctttccttacaacacaatctcacaacaattacacactaaacaaaattcaattttgcatctccatttctcgagaaactttcgttttcgtagacttataaaacc

SEQ ID NO: 1402 - DNA, 3000 bp, Unknown
  misc_feature (1)..( 3000): cDNA_ID_3062164_gDNA_ID_1620397_Annot_ID_155810 3000 nt of promoter + ATG
aaacaaaaataaaataaataaaatggatcataatatattgtggtatatagttatatggtgtaatggatttttgagtcgacattaataaattttataatatcattaatctaccgcttcaatacggattgaatttttattttattattttctaacattaccaaattctaattacggtcttttcttcttcgatgtttatatttcatttgattgtcatccccgaacaaaatttattttatatcattcaccaatttttcaattcgtccccaaatacttgtcttctccctacatattgtattttagctaaaccaaacatgctacaacagctgaaagcaaaaccatctttttatatcacaataccaattaccacattcacaaatgaaaaagaattatgagttatggtaaaaatgacttttttgtgtagaaaatggtaaaattgaccaaatttccttatataaaaatgtccaataatattatattaggaacaactaagggaggttgtaaattccaaggagacataaaagaaatgcactgcttttaaacaaaactcagtatttactctaatcgaaagatcgttcttgtatatgtgacaaagatatgcttccctgcgtaacatgtcgtttcaaagaatcaaatttcagctttcaatggatgaactttcattcaccttcaatgttcaaatcgatctcctttagttcaccaagatctagtcaaaataatgttttcctagttgacaatatcgctatatattaatttctccacaaatcatacccgaataggaagatcaacaagttataatttttaccaaaaaatgaaaaaaaaaaagatcaacaacgttttgtaatataaaaactaattccaaatttagtttatacaaacaattatttgttatttacaagtttttaatacaatgaatcataaaaaatagctcattaagtgtatatatgtatagaaatatatacattcataaatgtacaaatgtatatttatacacacatttttattcgtccatcttattaagtgaaccaatgcatattaaaatatacacattttttattttgtataaatttttattaagagttggcaataacacatctattcaccaattagcacaaattgaaggatttagttcttattgatttgtttcattttatatattactttgctataatttacaagcttttttgatgatatgaaagtatatgtaaaggaacaaaaattagaagagccatacatcatttttctgtgaaatatacaaggcgtatggtatggtacaaaatggagtatttgactactgtagcattttgagtttttttgttttaagttctaatctatgcgaatatatttggttctttcaattaattttggtgttaaagatatttgtttatttagatagtctaaatcatatataaacgatgaatttttagaagtttttttttaaacaaacaacaaatccaatttaaataacaacgtaagatagtgcactagaagtgcagtcttcttgatattacatgactattataattcaactaagcttttatttttgtccattacttagttacatcattgagaataatgaagatgaagtctaattaaggacaacctagaggatgcgcttatctcaaatcatttatttcaaaagaaatgaatatttacttcgtataattagagagccaataaaaaaaacataaagagtttgttgctcataatctcaacaacatcgaagacgaaactgaaccacctcttcacatcaaaaacacattttcttaaaaatctctcgactgtttcgtcaaattcttctgaagtctctgacaatggttttcgtccggttaagctttaactagataagctttatatgacccttgaaaagtcacctaagtcatcttccccttcttttccttgagaatctgaaaaaactttttgaagaattattcgattccttccttcttatctgatcctatccatatccaaactattacttttcaaaaacactctagatttatcgtttttcaaccccttatattcgttgaaatctgagaagttgatctcccaagttttcgcaattcccctctagataatgactttatagccattaatctcggagttttgatagatcatttatcacagatccgagcgtgggctcaatctgatattgtttgtggtgtgtgtgatcttgaaaattgaacttatggatgtagaagaaaaaaaaatatgtaattgtaaaattcccaatttggcgattgtgaaaatgtgcaatttggccataatttaggaaaacgatcaaaatcagtccaaataatttgttaaatacttttttaacccaaattgtggtattttcaaataaccaacttgaaccatataagcgttagccgaattctacatcgacctttgttagtaactatcaaacgatgttgagtcaaatgacaccataacgaacaaagtatagtttgactcatcacaatttaattggtttactaacaccatgaaggtcgatgtagaaatcgactaccgatgatatgattcaggttgctactttaaaacttttacttgttcacgttcataaatacatgctatcatagtttgagttaggaaaagtattatgcaaattgttgggttgattttgaccgttttatacataattctagcattgagaataaatgcctataagtttgtacgaatctctttttctttctctataatgaattttgatttgaagttgaaatcctaacataactacaaaatatcgcaaaactatcatgagttaaaagcaccgttgtaaactttttcctaacacttcacttttaaatctccattgtgagattaagaataagaaaaagaagagacaaatgggccttcaattttccctccataatataagaaatgggcctggcctggtatattcatcttcttcctctaccttcggtagagaactgtagacagaacaagggctagtttcattgtaaacgctaatcttcgctctcagcctccaaacacacatcaaac

SEQ ID NO: 1403 - DNA, 3000 bp, Unknown
  misc_feature (1)..( 3000): cDNA_ID_3062152_gDNA_ID_1620397_Annot_ID_155823 3000 nt of promoter + ATG
aaaatttatcttaccatccaagttcattgaagctcaaattgtaatgatgatatctttattcaaatatatgaattacttgtattttattcctttttttgttatccaaaataaatctataaatctgaaaaacttgaatttcactaactatggtttcatatcgcttatctcattgtgatgatgagatgatctatatacaattccgttggaatctgttggattcctgctctaccaattcttacagttgatcaccaattctttataagctaccattttgttttcaatgttatgcgattctaatgttttcaatcttccactattttactacgattttgtttttcctttattcacctgacatttccagtcgcaaacaataagccttagtgaaacacactgcacaaaactgcagcaaatgttgctctcaagacaaaagacattccgggggaaacaaataaaaaaactcaggagagttatttaagataagcaaaaaaagatacatcttaaactgatgccatttcgtttttcagtttcatgtagacacaaccttcttcaccacttttgtaacctcttccggggccttctctgccggtatgttcaccagattctccttcttcgcataatagtcaattacctgcaacaacaacaacaagaacaaatgtcaaattctctgatagtcctcaagttcatgtactataaggaaacataccggttgcgtctgcttgtggaatgcatctagccttgatctaagaacatccgcattgtcatctttacgttgaatcaatggctctccagtcagctaacaaacaacgaagttgatacagagatcaaatcacaagagagaactcgatttactaagtcaaaatgatgaatcagaatttgatggtttttcttacatcatcgactcctggaactttaggaggtgcgaatttagtatgatagcttcttccacttgaagggtgaatccaccttccagtaattctttcttcgagaaccgaatcatcgatcgcaaaattaagcaccttatctatctgagctccccttctattaagcatctcatcaagctacaagatttataaacaaaaaaagtcagaacatttacaagagcgagcagatacacaaacaactaaccacagaaaagaaccagaaaccttctctgcttgagtcacagtccgcgggaacccatcaagaatgaaacctttctgacatttgggtctgttcattgcttcatccatgataccaacaaccaagtcatcagaaacaagctctcccttatccattgcttcctttgccttcacaccaagaggagtcttagcagcaacagcagctctaagcatgtcaccagtagacaaatgacacaaacaaaactcatcctttatgaccggagactgtgtacctttccctgaaccaggtggacctgcaaattccaaatcatacatgaaccaaaactcaattcttcctttctattgaaccaaaaaacacaaattcacaatcccttcgctatgatcatcagataaagcattaacgataacagcaaaatgcaatttttacacactaaaacagataaaaatcggaactttcgctacacaattttcacagagatcaaacctaaagtaccgattgagtgaaagattcagaggtaacgaaagagatgattgtaccgatgaaaacgagacgtttgtcaggtttagaggcacatttcatacggcgaagaagctcagacatgagatcaacagtctgaatatcttccatatcaacagaagccgcactgctcgttgccatgttcgtcgtcgtcgtctcttacaagagaattagatttggtccggtggagttgtgttctctttttgaagtgcgtgtattggattcgatgcttccaatgttttctttcaccgttttacgattttacccttaactgtgccaacaactacaaaggcctgcccttcgaacaacaacaacctgcctggggttggtgacacacccaactctgaaaacgagtctttcttcttacacatctaatatcgcacatttttcataattacataaaatcaaatatcatataatacttccaacaaaccattatgttttaggtcaagtgaaccaaaaaaagcggactagaaaacatagaataagtagagtctaacacattttttcggttttaaggcacgatggaccggtcatttgtccaattaacactagtgttaagaaacttaatttgatattaagtactgaggttgaagattttgctagtttatggtagacttatgaatatcagtataccactagaccacattcacttttcgtcaataagacaattaaactcttgaaaacccacatttttcttttttttttttgaaagccaaactccatcaatgtttggttattaaagatatgaatgaatactacatcattagtttctttcttgataatttttgtatatttatttattaataagtttttgtatttttctaaattcttaacattaataaaagagttttccaaaaaatgcaaaataatactataaaattcaaaatagtacataatataagcttttttttttccaactttacatatattgtaaacgtttttacgatcacatacatctgctttttgaaaattctaaaaatataaataaactctttacctcaaaagtttcaatttgctatatacatttttttaaaatcaaatttaacaataaaaaataaaattagattacatattattttagaattaaattaacataggcccacttcttatgttgggaaaagggaacaacaaatataacaatttagcaacaaagaagtagaaaaaagaggtgatgtcataataaacggtaaaataataggaacgatgagcgagcggatctagctttcgtcaaaatcatcatcactgagtacatctgccacgtcagcttgattgggatctatttggtcgcccgtacacaaaatctcggctcactcactcacactactcaagtcaacgtttctaagattctccggcggagcgatt

SEQ ID NO: 1404 - DNA, 3000 bp, Unknown
  misc_feature (1)..( 3000): cDNA_ID_2135111_gDNA_ID_1620397_Annot_ID_155826 3000 nt of promoter + ATG
agatatatgatttagtttttgatgatggctgctgatacagggtcaggacacagaatgggtaaatgttgttatctcaaatccggagccttcttcagacgattgggttggagtcttctcaccagcaaaattcgagtattttttttacatccattaaaccctctttatgaatcatgtgtttgcatattgattgatgtgtttaacaacttgtctttgtgtttctcttgttatagctcatcttcttgtgctccaacagatgacaaagagatagctccttttatttgctcagctccagtcaaggtttccattacattttgactgttgatttctcaactttgacattgcatttcatctcatttagttttcctctaatatggcagtatatgtatgccaagtccagtcctgactatatgaagactgggaatgcggttttgaagttcatgcttataaaccagagagctgatttctcctttgccctcttcactgggggactctcaaatgttagttgattagattacacaacctctcaagtttgtgttttatctccaatggactctaattgatctcttttattgctctttacagccaacacttgtctcggtttcaaatcatgtatcgtttatcaatcctaaagctcctgtctatccacgtcttgctttagggaagaaatgggacgaggtaagttttccatagcctgatttatcaaagccttaacaagactctcaaatcgatatatgaactaaaacatgctttgcactatgattttgatagatgaccgtaacatggacaagtggttacaacataggtgaggctgttccgtttgtggaatggagtcgtaagggaactcgaagtagacgatcgccagctggtaccttgacttttaccaggaacagcatgtgtggtatgtatgaaactagaaatctatgcacttttctctttatctgaatttgcattttgattcttactacactgtttgacacaggtgctcctgctcgtactgttggttggcgtgatccaggtttcatccacactgcttcattgaaagatctttggccaaacctcaagtatatacactgtttagaagtatcaatttcctttcttgtttaaacacatcgtttggataacggttttgtaactttctggatcatcaactacctcaaggtacacatacaggatgggtcatgagttgatgaatggatcaatagtttggagcaagaatttcactttcaagtcctctccttatcctggacaagactcgttacaacgggtcataatcttcggggacatggggaaggtacttgcttgttgttttctatataaaaacattgccttgttagtgtttcctctcgggacttatatgtttctgtaatatgtatttgaagggagagcgggatggttcaaacgagtacaatgattatcagcctggttctctcaacaccactgatcaactcatcaaggacttgaagaacattgacattgttttccacattggagatatcacttacgcaaatggttacatctcgcagtgggatcagttcacagctcaagttgaacctattgcttctactgttccatacatggtcgcaaggttagcttgaccggccatataagtcttcgctttaacgatttccagattcttggcactaacttgtgtttctcttcagtggcaaccacgagcgggattggccagactctggatccttctatggtggtaaagactctggaggggagtgtggggttcctgcggaaaccatgtttgattttcctgctgagaacaaagctaagttctggtactctgcggattatggaatgtttcggttctgtgtagcggacactgaacatgattggagagaagggtcagagcaataccaattcatagagcgttgtcttgcctctgtagacagaagggctcagccttggttgatttttattgctcatcgtgttctcggttattcaacaaacgattggtatggtcaagaaggttcctttgaagaacctatgggaagagagagcttgcaaaagctctggcagaagtataaagtagacatcgcgttctacggtcatgttcataactatgaaagaacatgccccatttaccagaaccaatgtatggacaatgagaaaagtcactactcaggagccttcaaaggaactatacacgtggttgttggtggtgcaggaagtcacttgtcttcgttcagctcgctgaaacccaagtggagtatcttcagagactatgattacgggtttgtgaagttgacggcttttgatcactcctctcttctcttcgaatacaagaaaagcagcaatggagctgtacatgactccttcactatctttagagaatacagagatgtcttggcttgtgttcgagatagctgcgagccaaccacattagcttcatgatttcttcgagcgtttgatgttgtgaggtagtaagtaaagaaacagtcctagttttgattccttgtagattatacaattgtttcttgctcatctcttaacaaacaaatgtgatcatcaatgtagttttttttttcttcaaacgtcaaagatattgttaaatataaacatcaaacaatcttcaaaataaaaataaaactatttccatcaaacgtattttgctatgattaatgtcataaaaacctgtttactgcaacaatgcaaatcaataattttcttaaattaaactgtgattagatctgcttatgccaaaaacgacgtagttttcataactacctgcttctctcctcaaagtctaaattccaactgccattagcggagctcccgatgctgtgtgatgctcttctctctctatttcaaaaatcacttcttttccttcttcttctttcagcaacaaaacccatttgcttcagacattgcggagcatcaagtaaacaaatccatctttccacggtgctttctcgggcgattccgatcaatatgatctggatcctctgtttgctcctaatctcttattgaccccattctcttccaatcatg

SEQ ID NO: 1405 - DNA, 3000 bp, Unknown
  misc_feature (1)..( 3000): cDNA_ID_3062148_gDNA_ID_1620397_Annot_ID_155829 3000 nt of promoter + ATG
tacagcggcaatgattaatcctcttcttcacgcttaatttctctactactctatccttacttcttcttcaatgtagtttcatgtccctagaaattttcgttttcttctctttgaatcatctatcgaattgttgttgcggaacttttagattctaagaaattgagttcactcttcggcgatggagcgaaactcgtcggacgacgaagaagaccaccagcatttgattccccaaaacgacactcgaatccgtcaccgggaggattcagtttcctccaacgccaccacaatcggcgggaatcagagatcggcgtttcagatcgacgacattttacatcgagtccaacaccgtgggaagatctcgctcaacaagcgttacgtcattgtcttcgtttctctaattatctcaatcggtcttctcttcttactcactgatcctcgtgaactatttgcggcgaatttctcgagttttaagctggatccattgtcgaatcgtgtcaaagaatctgagcttcgtgctttgtatcttctgagacaacaacagctcgcgcttctatctctttggaatggtacgttggtgaatccttctcttaatcaatctgagaacgctttgggatcgtctgttttgtttgaggatgtgaaatctgctgtttcgaagcagatttcattgaataaggagatccaagaggtgcttctatcaccacaccggagtagcaattactccggtggcaccgatgttgattcggtgaatttctcatataatagatgtagaaaagtggatcagaagttgtcagatcggaaaactgtagagtggaagcctagatctgataagtttctattcgctatttgtctctcaggtcaaatgagtaaccatttgatatgtttagagaaacatatgttctttgctgcattgctggatcgagttttggtgatacctagctctaagtttgattaccagtatgatagagtgatagatatagagcggattaacacttgcttgggaagaaatgttgttgttgcttttgatcagtttaaggaaaaggcgaaaaagaatcattttcggattgatcggttcatatgttacttttcatcaccacagctttgttatgtggatgaggaacatattaaaaagctgaaaggtttggggatttccattgatgggaagcttgaggctccttggagtgaagacataaagaagccgagcaagagaactgtgcaagacgtccagatgaagtttaagtctgatgatgatgtgattgcaatcggggatgtcttctatgctgatatggagcaagattgggtgatgcaacctggtggacctattaaccacaagtgtaagacactaatcgaacctagtaagctgatcttgttgaccgcacagagattcatccagaccttcttgggaaagaatttcatcgcacttcatttccgcagacatgggttcctcaaattttggtatggctttttcatcttgctttctttggtacattaccctgaatttcatagtgcagctcatacttcttaaaatgtgattatctaaacaacattccattcttgtttgtgaatctgtctggttagtactgtaaatcacatccacatcacgtaggcactgcaccgaagtattacaatatcttactgagattgatttcctaaaactagactagggaccaggttagacttgtagttttctgaaaatggagaaccttttttcatggcagcaatgcaaaatcgccaagttgcttctatccaattccacaagctgcagagtgcatcgctcggatagtggaaagatccaatggcgcagtcatctatctttcaacagatgctgcagaaagtgagacaagtctgcttcagtcacttgttgtggtagatggaaaaattgtgcctcttgtcaaacgtccaccgcgtaattcagctgaaaagtgggatgcattgttatatcgacatggtatagaggatgactctcaggtaagaatcttgagccttgataaatctcatgaaaacctgtttgattttcctgggtttgcatttggttgctcttcaacagaaaaaaaaaaaagcttccggatttatgaattttgtaggagaatagaaatcctaaatacttgcattttgaattattattaatagcatggcctgatgtatcaaacatggcatgggctaaattctgtattattgaatgtgtaggtggatgcaatgcttgataaaacgatatgcgccatgtccagcgtattcattggagcctcgggatcaactttcacagaagatatattgaggctaaggaaagattggggaacatcctctacgtgcgatgagtacctctgccgaggggaagagccaaactttatagcagaagatgaataagtaagcacatttttttcttacaaactttgaattgttctcaaattctattgttcctctagttaaattgtatagtgtaattatagaatccagttttggatactttccaattcatttttttgtgacaagagtgtgtgtatcaatagaaagagcctcagtttcttacaacaacacatatctaattccggggacattggtgatttttggagattgtttcttgtttacttcattattaatcctacattattcattgcaatttttattatataaaagtacattactcattgttaatgacagtttatacaacgaagattaaacggattcgttttgatgtagggtaaaaatttccatcattcaattggagtaaaaagtatctaaacccaaaagcttaaatacattatacatgtgatgtataacaaagcttaagtaaatagtaacaactaataaatgacgtttaaaatttggacaaataaatgactgttaactgttaagagttaagaagagttaagacagtaaaacacttgagaatttgttacagtattttatttattacagtattaagatttggttgtgcgaactaaagtactttatttaaagacaacattttggcgactgtgtaaaaacaccaaaaagaagaaaatg

SEQ ID NO: 1406 - DNA, 3000 bp, Unknown
  misc_feature (1)..( 3000): cDNA_ID_2135126_gDNA_ID_1620397_Annot_ID_155831 3000 nt of promoter + ATG
gattatattttctacagtttacaattcgttgttttggttgacaggaactacagtttattggaactccctgaagcatttagatggcagaaaaagcttgtataaagcgtcttcaaaaagaatacagagcgctttgcaaggtattattttcttcttattctgttcccatccttgatttgtctgtcactggtatcattctacccattcgattttcatttttttttttatcaaatgtggtttctttgctctatgctagttttcatggtttttggtctaggataagtttttttcttatgaatgttactttggaagtatctttgacatgttctgttctggattgctaggaaccagtctcgcatgttgttgctcgtccttccccaaatgacattcttgaatggcgtaagtcttatctggctatttaatgttccttttctttattttctgctttctagttattctattgaaggtttggctatggggatactggctttaggtacatatagcgtgttgctatggtgacagagatactattggtatcatgttttcaggattaccagtaatatgtaatggtgaaaacttgctttgtttatagaaaccgaaaagtaaacctaaagtttttcttatctattacctaactgagaatggtcatgctattctgctacaagttagggtatttttatcctcgctactagtgttactgcactatttatataaatgtagtcaattgagtttgaactattgggttttattctacagattatgtgttggaaggcagtgagggaacgccttttgcaggttcaaatcttagatttacatttcaaatgtgatcttctacattccaaagtagtatatgattctgatatccggattctctttgataggtggattttactatggaaagatcaagttccctccagaatatccttacaagccacctggaatcacgtaagctctttcgttcttcagaattctcacttaaaatatcactctcctatgttttattcctggtttccaatcaactaaactactgttgctgcagaatgaccacaccaaatggtcgatttgtgacgcaaaagaaaatctgcttgtctatgagtgactgtaagcacagtcttcattttcattcctttgtttattaatttcaatgaacttgtctgttatctaattagctttatcattccatcattccatgtacagttcatccagaaagctggaatccaatgtggtcagtgtcaaggtataagatctgatgtacattcaaattgtgttcaagttattaaaataaacagagtaatggatccttatttgaccaatttgtttccctgaacgcagcatacttacaggacttctctcatttatggtaagcttatggaacgtttcatcttgcagagcctctcagtttatccttggtcattagatctttactgatttaacatggcaatgtcttttttagtttttactgtgatattttattctccattgcgttcattaaatttctttccgcattacaaccttgtggtccacagatggataacagccccacaacgggaagtgtaaacactagtgtagccgagaaacaacggttggcgaagtcatctcttgctttcaattgtaaaaggtaagttccattcccaccaaaaaaatgtttaggatacatctcagaagttgattagagaacaagatagcttctacatgttatgtttctcatctttttcaaactgttgtggcagtgtaacattccggaaactatttcccgagtatgtcgagaagtacagccagcaacaagtagctgaagaagaagcagccactcaacagacaacaacatctgagaatcaggattttcctcagaaggacaatgcgaaagtcgaatcagagaaaagcgttggtcttaaaaaggaaagtattcaagaagtgggattgaaagagaggagaaggaacaagaaagaagcattaccgggttggatagtattgttgctagtatcgattgtcggtgttgtaatggcgttgcctttgcttcagctgtgatttagatgcaaatgcaacgcaacacaacatgactgcaaatcaatctggtaaaatctgtttatcattgtctctcagtctcagtactaagtagtgtcttttgttcttccccctctcttgaaaagaaaacagatacattgagtttggtatggcatttgaagttacgtataaatataaatgttagcttaatttgattaagaacgaactcgccacctaatgtggtggattcatggactttacgacatcatctttttatgaaatcaaccctaaagttatgaaatacgtccatataaaaaattcgagtatcttgcagcaaccaaaaatgccaagctttaacattgtcattgtcatttggaaatgctgcttgcattttgtattcaaaagaatcgaacatgtaagcatctttgatctgtgaaaaagggattccactgaatcattgtgtgtgactatgtcatgtgtgtgtgtataaaggatctttgatctacatatatatatgaattataatatacttgtctataaaggaatcatttcttgttcttatttttgatatttaaatacatacaaatttatgtgacaaaaaaaaaacatacaaatttgtaaattgaacttatgacaccactaacataaatatcacatacaaatttgaatggattttctgatttatttatattttatactaattgaataaatgtttaagacataggttatttttatctaatgacgaactgattactagatatattaaatacacttctataaataagttatatttgaacaataaatagaatactttcaataaccttcatatataacaaaacgtccactaaagtagtaactcatgtttaacataagtttaaaaaagtatataaatttgaaaccataggaactccatactccaaagtcaaacaattagcaaaatcaacataattgatattccttttttaaaattattttttaatcaaaatcttgaaaatagaaatg

SEQ ID NO: 1407 - DNA, 3000 bp, Unknown
  misc_feature (1)..( 3000): cDNA_ID_2105314_gDNA_ID_1620397_Annot_ID_155827 3000 nt of promoter + ATG
actcattatgtcaagaaatgtcatctcaagattcttaaaaggaaggagaagaaggttagcttccaaagtctactgcttttgtctttatttagtttaatttgcaatgtcaacaacttgttttggcattttgattagggattaatccggctgagcagagctactgcaatggaagttcacaaagagtttggcgagaaacaccatgctacgctttcgggtaacgctatttcctctatatccgagttcattagtaacatagtgtagctagatccccaaatgcaaaagttttttgctcttcatgttgaagatatgtttagttagagttcattctatagtgtaatagacatttagtgacactactctttggatgcaagtcgatcggtgaagttagataacattcgaaagtgtaatatatttggtgacaatctttaaaattattttaagtggatctatcaagttagataacattcatgtgtatttcctttatgattgtctactcttaatgaggtatgttagtgatgtactgttgttcttaattttgggtacaaaatgtgtagctgatcccatgagcaacataccgaaagacagtgacctctaccgcacaaaacagaaagaagctaagcgcagatttgagatgtaagtcagaatttccaaacctcacttatgatatagcagagacttttataattctcattaatcatgtttctttacatcattttcagcttggttgagctcgagaagagactggctccgcattttgcaaagcctcgcataggaaacagatgaagaacttagctaccagaagctggcgtttagatgatctctgtaagtatgttctctgctttggtgctgtagaactgtttgtgaaattgtaaggtcatgtagctgtatccaaatattagatggagtctagtttggtgatgtaatttgtaatcttttccaatatcaacaataatattttatcgaaaaggaaaccaaatccagcattatgtagagagagagacactcttcaacaatatttgcctttcttaccacaatattcagtagagagattaagtggttttgtttgttttcttcgttttacattggatattgcactcagcctaaaaaaatcaaaaagacactctttcattttttttttctttttgagaaggaaataaccttgtattgcggtggattttatatgtttctttttttccaattatttaaagcacatatggttgtctagtcagcttgataaactacatggaaaatgcagtatcagcattatttttttcttttaattattttttttttttcctttcatttcaataagggtgaattgcaaaaatgatggtttttgaaaaagttattaaatatataacaccataatgtgtgtaattcatttgatagcacatgtcagttgtgaaaatacactaaactccttcctacggatccgcttggaaagaaagagaagtcactgacaggaggaaagagaaatatatatgactaatatatattcactcctcttaattttgtttactatattagtttaacaatattacttggttaaagttaataatactattgaaaaaacagatttttttttgtttatctaatatgatttgaattttaaaaatcggaaacgaatttttaaaaaaataaatagtggtatcaaattctataaagatcatcatagaaagatagaatagtatatatttgttcaaatagaaacgtttgttttgatgaatccaaataatcaattaaatactttttgatggaaggatattaaaccctaagatagtatatagggaacccaagacttttaatataaaacactaatcaaatcatttcacatccttaatcaaaacaaacaattcattttaaaacgtatatagtacaaggtatacgtaaatagtatattcacaaaatagaatagtatctctcaaaaatttctcaaaatcaaaatcgatttattggttcaggataaggaaacaacgacgccaaaaaattagagagacccaaaaaaaaaaatcaaatgaaggaaacagagaacaaaaattgatcaaattcagcgtttattagcgagaatctcgactaattcaatttcaaaaaacaaaaccaaagtctcttaaaaaaccaaagactccaacaaaatctgaagtcttgcctctgtaaatcaaaacctctaattcaatttcgagcaaaacctaaatgtcatttctggaaattaactgtcttgcttctgtgcccaatacacttttgttaatcgttggcaaaatcaaaagcttcataaaaggtagactggattttattagaaccaatcccatgttcaaaagttaatagttggtgaaagagaatagttggttttctatggaagggagaagatgaagagcgtgtatttcaaacatggatagtattggcattattacagaaaatacaaacaatattagttacttttttttagagtgttagttacctaattataatatttttgtaggttagaaatgcaaatttctctttcaataaaaagatgaaaagaaaacaaatcaaaacaaagggagaaaattctttactatagaaatataaatgaaaatttcttcaagtaatatgcatcctttttccaattggctatttttatgtaccatttagaacgttaggtaaaagaaaaggataaaaacattgggaatttgataatgacaacaaatgttacgacattatgtgctcactcgattacaattattttattacaagtaaaaaaaaaaagcagacacaagttctctatgctctgtcttcctcctaaaaaaagaaaatttctgttctgaaacgccttcgagggagggagggagagaaagggatgtacttgagaacaaaaaccaagagtcttcaaaattcaaaatatcatgcgattggaaagttttaatctttgaaaggtcaaaagattctttggggggggggggttttagcttctgatttcatctatctgtcacagcaaagaagagaaagttagcactctcgacgatg

SEQ ID NO: 1408 - DNA, 3000 bp, Unknown
  misc_feature (1)..( 3000): cDNA_ID_1582551_gDNA_ID_1620397_Annot_ID_155811 3000 nt of promoter + ATG
aagtatgtggtggattattatgattgaaagtgataagaaaacgtttttttttgtccaatattggaatattcactgtcaacagtttggattactgcagcactaaattccttaagttattgtggctgtgaatgttcagggaaatgggtttacatacagtggccaagtgtgagaatgagcagcaagaacttctgcggttagcacaaacactttttgatacaaagatgcctactggtcagacagttttacaacctttctcagatgactcttcgattaaaaagatagccgttgaggtaagtaaagctccattgatggtcacaaagtaaaaaaaagttgtgtgttctacaggtaataatatataccaaactaacttgaatgtgttctttgtcggtagacatttccagaggaactgttctctgtacttcgcactgtggttctgttaagaggactcagtgttgggatgggagttaattattcgtgtgcagaacaatggagagcaatggccgaagaggctttacttgcatctggaagagtgacaagaggtaagtggttatatcgtatagtactcactacactttttgcataaaaaacaagtgctgatggagttggtaacataacacctgagttttacagatggcaaagaaagatctcgtagacgggcttctctacgaaggctacgcacaggaagttaggaaaaagataggagtatttctcatcacttagactctcccatgagcaggatctgagcttttttcatttattgttctttcttttgtgagaatttgaatgataggagaagttggataacacttgaatgtaattggctgatataaaattatgatggaagatttgtaaatcaagatttaattcccaaaagataggattatatgttttggtactccttctccacaatagttggagaggactattatctccaacagctataagccatcttggctattacgtcggcacatatatatgccattacgattcatggagtcattctcaaagatgactgcctcaaaacccaagttatcactgcacatcattgtctaacacaaaaggctggtgcttcagcttcttaaggagactgaatcttcatatagattttggttccacaccattttatgtcttttctgttgcctcaaaaaaaaaaattgaagcgttgacaaaaaaaaaagttaaacagattaaaacgatgtcgtttaaaggatttcattaacacaaaatctgcgttcaacgagttcgctattttcccgtaattttggtctgaggttttggtgacgatggcgacggcggtagtgatgaacggcgagctgaaaaagcaacctcggccaggtaaaggcggctatcagggccgtggattaactgaagaagaagctcgagttcgcgccatatcggagattgttagcaccatgattgagcgttcacaccgcaacgagaatgttgacctaaacgcaattaaaaccgccgcttgccggaaatacggcctagcacgtgcgcctaagctcgtggagatgattgctgcgcttcctgattcagagagagagactcttctcccgaagctccgtgccaaaccggttcgaacagcttcagggatcgccgttgtggcggttatgtcgaagcctcataggtgcccgcatatagctacgacggggaatatatgcgtttattgtcccggtggacctgactctgactttgagtatagtactcagtcttacactggatatgagcctaccagcatgcgagctattcgagccaggtgaagagtgtcttctgtgttatggaattgaaacttgtattacagcttctggattgatctagtaaagggtttggggtttaggtagttttgggtgaaatttgtgatttctgacccaatctaccaccggagtttgaacttagtttcagttgctgacaataggtggtagatagttttggggactatgttgtgtggatagcttcatgaaaacttcaattgagaactttgcttagggtcatagttagtttgtttgtgctttgatatttaggactcaaaatgattgctagaattcaaacattgtagattacaagaaatgtttatgaaatgagaaaaagatctagattatagatgagaatgtagacttgcttgataacacagctgctaaaaaatccataaggaaaatgctataagctggaaagtttgttcttctttatgagtgaattaaaaagacatagaattcttagattgaaattatggactcagtttgctgttcatgtgatgagaaggatgcacgtttcatgtttaaattgattttgctaaagccctgtttatggtcttaggtacaatccatatgttcaggcaagaagcaggatagatcagctgaagcggttgggtcacagtgtagataaggttagagtttgatatttctagtaacctgtgagtattattttcgttctttttaccagtctcttagcctagaggattactcctgattatatgaatgacaggttgagttcattttgatgggaggtactttcatgtcactgcctgctgagtatcgggatttcttcatacggaatcttcatgatgctttatcaggacacacttctgccaacgttgaagaggcagttgcttactctgaacatagtgcaactaaatgcattgggatgacaattgaaacgtgagttcgatgcagtaatcatgtacaacatctaaatttgaaatctgtcttttttgcctcaatgttttctctaaaagccttcatagtatctatatattgatttcattgtattctttgtggcactttgtggaaatggtcaagctgagtgaaattgtgaaaatatatataaaaatctaacaccaattgtttgtgtgaatcagtccttgttattttcattgatcattcattatggagtctagtctctaatctctgaagattcaaatatcagaatacattctctaatctgttttaaaaattcaccaggaggccagattactgccttggacctcatttacgacaaatg

SEQ ID NO: 1409 - DNA, 3000 bp, Unknown
  misc_feature (1)..( 3000): cDNA_ID_2135073_gDNA_ID_1620397_Annot_ID_155815 3000 nt of promoter + ATG
aaatagctctgaagctgaggaaaagccattgcggacgcgaaaggtgagtattacaactctcagaacagcatatgtttcctcttctggtttattctttgcataaaaagataaaattacattcttttattttgacagaggagcaaggaccggagcaggaggatgtccatgtgtttgacagatgaagcagagcaattcatcgacgaattcatttcaaacatagaagacacagacttttcatcactggaggatgagaggagcgaaagtagttcaagttttggaatgataaaaacacaaagctctcaaagcaccagtgctcttaagagtacttctgttgaaatggacggtgttatgctcccttggttgcaatgggaaactccagacgtgtctgctgcagtggcatgccttatcaagtcgccgcacaccccaaattcaaaatctcttgtctgggagtcggatacaactcaggtaacaatactttttgcactgaccgtactccttacgggtctaaaactatagccggttagatagatgactcgtagaaagtttctctgacatgaatgtatgctgataggatgcatcgagtgggcgagggacgagcattggtaccataagtagcagaggaagctggagcccatatgactcggtcacgaagcctgtgatgcccacaaaaacactaaagatagatgtagcggagtatctgaagcgacctaacagctcagatattctaaatgagacgtggaagctaaggcatagaatcagttcgggaagtcttgtgctatgtagccgctcattgatctaaggcagtgccgtgccaagcttccgagaaagatgatgcaaaagatagtgaaatgtgatgatgatgatgacattgtagtgattcttctcttaattttctttttttgttgtttcatttggtaaggtacgactatatatatggaaattagtatgtaattaaccattgttaatctcataaaacttgttagatttgtttgataatcaatcaaccaaatgtcaactaaattagtgtaaatcctacatataaagaaaaaaacgacaaaacgaaatttgatatttatttgtagttgttattagatcttttgcatgcatgtgtcatttttattaaatgtaataaatttttactttaaaataaacatcctaattatatatttaataacataagaatataaaatatttaatcattgtgtggttgacaaaaaaaaaaaaaaaaatatatatatatatatatatatatatatatgtataaaatttttttacttaataaatatattgtatagttttctgttggccctttttagagtgttgtgattctgtttttgattgaaaaatatcgacagaaaatcaaactaatattcgaaaaaaccaaaaaccgtagaatttcacgttttccttaaccaaccaaaaatttgggaatagtaactgttggagccatatattcatattattcctaatttcttattctgttatagtttaggtatttctaattgttgtaattttgtcgtagacctttagaagttattttgagttacatacgattgtatatatatatatatatatttattggaatcacatattttttttatgataaaagaaagcgaaatagatagctacacgattcatatttattattttaaatcaaaaagacgaaaacaataagatttatgaattctttttttttttcttgaaaagagatttatcaattctttttaaactcatttgcaagttttccatatctatggcagaggtcgcggtgggttaagtctaagacactccttctcgcatacttttatgttctttgaacaaaagtgatacttccctctgcagcaatgacagttcttgaataagctaaagctacaacgttttctaacacacggtgatagatatacaactattttgctggcgttcagattctcttccatgtttccaatttcatctacaaaaaaattatagatattttaacaacaattgtggtatatatgttgatgaataagctatatgtacaaaacatacattgttgaagagcaaacaatgaaacgaggatgatgcaaaagatagcgaaatgtgatgatgagatcatagtaattcttctctcaaagaagtaagaaatgttttgttctttgatttggtaaggcatgactatatatatagtgtgtaaattgatcacatctcgtatagtagtattaataatctcttaaaagcccatagatttttttttaattataaaatagccaaaagtcgagttaattaatgtatcctgtaaaaaaaacaaatgccaacaaaattttgatttttatttggatttgtggttagatcttttacatgtgacattatttctattaaatgtaataaatcattacttttacatgaccatcctatttatctatttattaatataaaaatatatattatattttacacaacatatctttagcattatgcaagaaaatatatttaaattggtattggatagttgttttgagaacaaattgttaagtcagtctcactagaaaacaattctcatctaatttgtggaccttgtggttccatctaacgcaaatgaatccataattacctgtcacaaatctagtgtcgctatatacatatttatatgagttccataataacatgatacaatcagagcggcccgaacaattcatggctggaagcaaaaaacctattaataatatactattgttatttttgtaactagtcaaaactcatatcgtaattattttgaaagtaagatatcattttcttaacatatttttctattaaagtattaagatatcatatcgtaaatgagaggcatatcgtaattactgttgtttgtaagtttgtaactgtaattatacgaggataagatatcatatcgtaaatgagaggcttatcctaaggactggagatcttaaatggtgcttcttctgtccaagaaaaaagttcggcaacaatagtaaggcgagaagatcgactgattgagtcatg

SEQ ID NO: 1410 - DNA, 3000 bp, Unknown
  misc_feature (1)..( 3000): cDNA_ID_3062189_gDNA_ID_1620398_Annot_ID_155853 3000 nt of promoter + ATG
atctttgtttgaattgtttaacaaagaaaaatatttgatatttctcacctaccacaaccacaaccacaaccacaagacaaataatttattttcttataactattgatacaaaaattgattcttttcaaacgagacacgtgtgaacttgtgatttggtagaatttcgtattacaaaaagagaagcatctctcatctctcacctactactctgaaagatgttcattgtgaacatatctccaacacttcgcattgccttcagataacaaacacaaactgttataggaccacaagtcaggtacaactatttattagtttcgactaacaagtacatacggatttttttgcacacaaaaaagaagaagtacatttgcttatttatgtccgttgaaattgataagtttattcactgaagaaattggtgttttatatacaaattttacatataaagtacaacatttatataatatttataatttacatatactgttttactgtccgtcgaaattggtacgttgaactacagaagtaaagatgtaaagtccaacatttgattcaataaagaggatcgtgctatgacaatcctcgaatgttgtatacgagatagcttaattaagagtcatgtgtcatatacaccagtttccagtttatgattggaaatgacttttgcattggaaattttaaaatcaaccaaaataacacatccaaggtttatgaagatcaaaagtaatatataaaaattatagtggaaaaacaaaatactatttttgacaaagttacccgacaagctcatttagagttaaatttaaattatgtagtcaagttatcatccaatgtacttagatcatccaagttagttgacttcgatgattaattttcttaatcatagtaaaaataatataattaaggttttggagtatggcctctattttcaaaagtatagctttaatctgaaaaattctataatagcaattagaaaatagaaaataaaaaataaaaatgggacgagaaacctcaattttcaaagtcttattgagggaaaaaaaaaaaaaaaatcctacctactaccgtgttatacgtcatgatcacagaacgtgccttatattatccataaaagaataagtaaaatagtatttatggatgttacatgttaaccttgacacctaaatgaattaaatcgtaaaataaatagaaaggattggaaatggattgtatccttttggtggttgctcgacatgaaattcacaactaaatgttcggtgttccagtacacttagttttcatgcatatgataatatatgaacaaacataaatatatgattttttatttttattttagactaaagggtggtgatttgaagttttacgcacaagcgtaagtatcagacttcacacctgaatatcacgtcctcgataaatatatatcatcagacgcaaacattagaactagcattttcggaactagcttatgcctttggtgttttttgagaggtgttttcaaatcattgttttgtttgaggatagttttgcaaatttccttgttatcgtaaccaaccaaattctcaatattctaccaagtttctttaggccgaacatacaaaagtctgattttattcaagtttgcactttgtagttttcggccattataagttggcccatattactaaagcattaaggccttactctaattgcaactgtcccttctctcactcgatttttacaagtctagaagttagaaactactctttatgactacaaaaaaaaactaaaacattaagacccttcactagctgcaatgtttggtcttccactctttccttccgacctctacgagttgggaaaaatggggacgaaggcgagaacaacgaaaccatcattggaagaagaagggagtccactcagaggcattttatgtgtgaaaaccagacgagacatgaagagatttgaaaaaacagaggattgcttcatcctcgatttcaatccttttgattcgtttgacgttaaaaggctctcattttcccttgataaagatttggaaatcatccatgagtcaggccaggtttgagttttaaaattaaggctataattagggttttatatatgattttccttctcttttttgggggtcaaatgggtttacacatatttataatcatgacaaaatgtgatgaaatatattgagcaggtggcttgtagagattacccacatccgagacatctttgcttgaactttccctttggatcaacttctaatgcaacccactgtgatctggtaattgttaatcttttcattgaagggtttaagtaaaaaattaagtgaagtatgaaatggactaattttgtagtttaatgttttcctaaaattattctatgaaactgtcttttttctcgcttagatatgtacattgttttaacagtagagatcaacaatattatgcagtgttactgtcacgtgtgtgataagcctgctccttgtgcactgtggatgtcttctcattgcaatgcttcagcggactctgtggatccgaagtcaccaaccaatgagagtgagagctattattactccgattaagattagctttggaggattatgtaatgacaatgcctaactaattatgagattggtaatgtttgaaaccaatttgctagccgaattgttgctggctgaattattccagtatagaccttgcggatagacgggttatatttgccgtgaacatttgtctacgttcagaccgaataacacgatgcggttttatagaaaagacctaactttgaaccaacaacttctttgacaagcaggcttattgattcatatatgctaaagcactcaataataagccaatcacataatgaagtctaattgggctaatagttaggcccatattgctatatataaaaagcctttttaaacgctacgtctgaaggaagagcaacggttcggtgtctctctcactcgtctcttccgtttcgatctctgagacttttgtagcgaaaaaaatg

SEQ ID NO: 1411 - DNA, 165 bp, Unknown
  misc_feature (1)..( 165): cDNA_ID_3062176_gDNA_ID_1620398_Annot_ID_155861 3000 nt of promoter + ATG
ctcctctcttactcaacctccattggcgaacttcgtttttgattctcgtaatccctaattcctcttctcgaacctctcacagtcaaaaatttctccaaccaaagactgtagcagagagagacaaagtcattttcagatgataatacttttgcttcagtcatgatg

SEQ ID NO: 1412 - DNA, 3000 bp, Unknown
  misc_feature (1)..( 3000): cDNA_ID_3062184_gDNA_ID_1620398_Annot_ID_155857 3000 nt of promoter + ATG
tttttcagattaaagctatacttttgaaaatagaggccatactccaaaaccttaattatattatttttactatgattaagaaaattaatcatcgaagtcaactaacttggatgatctaagtacattggatgataacttgactacataatttaaatttaactctaaatgagcttgtcgggtaactttgtcaaaaatagtattttgtttttccactataatttttatatattacttttgatcttcataaaccttggatgtgttattttggttgattttaaaatttccaatgcaaaagtcatttccaatcataaactggaaactggtgtatatgacacatgactcttaattaagctatctcgtatacaacattcgaggattgtcatagcacgatcctctttattgaatcaaatgttggactttacatctttacttctgtagttcaacgtaccaatttcgacggacagtaaaacagtatatgtaaattataaatattatataaatgttgtactttatatgtaaaatttgtatataaaacaccaatttcttcagtgaataaacttatcaatttcaacggacataaataagcaaatgtacttcttcttttttgtgtgcaaaaaaatccgtatgtacttgttagtcgaaactaataaatagttgtacctgacttgtggtcctataacagtttgtgtttgttatctgaaggcaatgcgaagtgttggagatatgttcacaatgaacatctttcagagtagtaggtgagagatgagagatgcttctctttttgtaatacgaaattctaccaaatcacaagttcacacgtgtctcgtttgaaaagaatcaatttttgtatcaatagttataagaaaataaattatttgtcttgtggttgtggttgtggttgtggtaggtgagaaatatcaaatatttttctttgttaaacaattcaaacaaagataaccaactctgatgacttacaatggtagtattttcttctttttttttggacaaaaaatggtagtattttctaatcatggattcttatcatagattactacgaatttatttggattggatttagtttacaaacaaaatttcaccttacttaattcaactgcaaagttatttgaagagtatatacatattttgatgaggatatacatgtgttctttatattgaagggtctttacctactaatttttgtgtatgcatgtattcttaacttaatcttgttgttaaagcatttaagaaaattaaaagtgatctagaaagtgaagtacatcgaatctggtttagtgaattatctttcacaattcaacacaagttgtatagaaaattaagatggtgtaaaagtattcgtcatgctatgacgacgataaatgattttaaaattttcacttaagtattagtgtattacgtatatgtatcttaataaagaaaacaagaataatcttgtgccgaactcaatttcatagttaaaaacttttttttttggacaaccaaatgaatttaattaaagcatttctaggtaaaacttttcaatcctttcttattttctattgaagtagctgacattctatgaaagcaaatgtcaaggaaatgatttagcgttgaaaaaaatgaatgataacgattttaagcagaaactgacaatcaattaggaacaagtgtgtcgtctgggtcctactcaccatactatctgtccgactttgattacacagtcctctcaagtctaatctttttccttttattaatctatttgtttatcgattaagagtttgatcactctatagtttgtataaaaacgtttggtttcatgagaattaaagttaaaatgacgacccaaaaaaatgtttaagattgtcaagtgtaatgaccatccatacattcttagttaacctactttcatttacatatctgctaattccaaattttagtaccgtactttttcatcttagagatacttttctttttccaactttttctagaattattctctctatttaacaaaacgtgtcattctaccactgtttacataagttaagaaaaaatgtgaaaaaaatattttatgtcctttgataataatctataacagtttatctctctagtcaatagactgaaataatagggattaaaaaaaaactgcaaaacgacattctttgttacacaaaattattatattaaaacaacattctttgtgaaaagggagtattattaattagagtaaacggttaaaacattatcctaacactaataatcagttttgaaattattgttgggctttgtatgatttttttgattgttttgttaaagaaatatgatgataaatttagatatcacgtaattaaagaaaatctgttatactagaaaatcttaatagtacaacttttagcgtagtttctgttctttcaaaaatatgacaaacttgcttactgttaccgaatttaatagctttttatttttggtgtgtgcgaaaccgaatttaatacctttatacatagcaagtttaacataaaatttagtagtacataacattgtgatactagctaggtttcctaaaaaaaggcatacttgttgttactgttagcgaatgtaatagctttatagcaagtttaacatatgtaataaattataaaagctactttagttataaatttgtatttttttagaacggatcgtaatatatttggatgtattatctccgaaatatttattttttcatggcctattatttatttttattaaattttctgacattatggcctattattaattgataaaatacaaaagaatggatgtgtctcgattttcaattggaccaaatcattaagccagatcagaaaattgcgttaaaatatgccaatcgtctctaccttctttaatatattttcatataaataaacctctcaacctccacactttctcacccatcacacaatcctcaaaacagagtaacccaaaaaacagagcaatctctaaaaaatctcaagaaacctcactaaa

SEQ ID NO: 1413 - DNA, 3000 bp, Unknown
  misc_feature (1)..( 3000): cDNA_ID_2135963_gDNA_ID_1620398_Annot_ID_155860 3000 nt of promoter + ATG
cttttagccgaaaatcagtgagcttggacaatgttcttgttccagaggcagtctttggtctttcagagaaacccgtgtgttcatttgtagggcatttggatgacgtacttgatctttcgtggtcaaaatctcaggtgggtacgagttcccgatcatctcatttcgctacaaattcttatttaaagcatgaagtttgttttcaaactggtaactttattttgtggagcaaaaattttcatgcgaaccttgctcatcttactagtgctaagtttaggttttctaagtttgttatgtgagaatctgcttcgtctttcttaatcagataaaatcttgaattctcaagactttgcacttcatttttttgtttccagcacctgctttcctcttccatggataagactgttcgtctatgggacttatctagcaagacatgtttgaaagtcttctcacatagtgactacggtgagtggatataccatcctattccccaccagtgatcatgatttacttttcttcttagtctttatgaaactaagcatatattgttagaagaatattaagtcattttaggtgtcaactctgttctggaaagattcatatgtcaatataatgtggtatgaatcaagcttcttccacttgtaaataaatccctgaaacacaagaatttctatgttggttatgtaacataaaattttctctcatctagttttctgtttcctcgatacagtgacttgcatccagtttaatcccgtggatgacaattacttcatcagcggatcattggatgcaaaagttcggatatggagtattcctgatcatcaagttgttgattggaatgatcttcatgagatggtcacagctgcttgctacacaccggatggacaggtatgccattaaaagtttttcttacattgaagtgactttgggtaaaactaaatcacgcagtaccttaataaagctctcttggtttgtaaagggtgcattggttggttcatacaaaggaacatgctgcttatacaacacacatggtacataagctgagaacttactcatctgaaacttgagttgtttctccatctcgtcttttgaacttattatcttttttgtttattcagataacaaactgcagcagagacgcgaaatcaatctgaagaacaggaaaaagaaaacccatcacaagaaaatcactggttttcaggtaaagctaaaacaacttacaccgttctgttctcatcttttcatttatactacaattttgttttggatgctgtactggtttatctgactattctcgtgaaactttcacagtttgtggcaggaagttcatcggaagttctcgtcacatctgcagattcacgtacgcgtgttgttgatggtgttgaccttgttcacaagtttaaaggtaaacaatactaagcttaaaactctcttctccattcttagaactcgggagttaggaataactttattgttcatggaggtgaatttctcgctctatcgtcatctaagatacacatgagtcccacatttcatgaacatgatgttctttcgctttttcttgatctggtgttggagtaaaataagctcaacgttcttgccaagtaatgtgtgtttttctgagttttagaaaattttcgggttcgcaggatttcgcaacacgaatagccaaatctcggcttcacttacatcaaacgggaaattcctagtatcagcaagcgaagactctaatgtgtatgtatggaactacgactcagactctcgagcaggaagaagcaaacgtgtcacagtcacaaactcatacgaaaacttttattgtcgtgacgtctctgtggctgcaccttggcctggcaaaatcagtaacaaccacactaacaacagccccgaacagtcatccttcacagccaataataaccctccgacacctgtcaacgatccaaccaacaacaaaaccgtcaccaacggtatcatttcaagcgccacaaaccgatacttcttcgatagagtctcagcaacatggcctgaagaaaaactcttgctggctgcaaaaaaccgagccagaacaagccctcgtgtgagcgtggacatgtctaacatacaggttaacacaaaaccgagtgcctcggcgtggtctatggtgattgtgactggcagtctacgaggcgaaatcagaatatttcagaattttggatttccagttcgtctatgatgcaaggagaaggttttacaatatcaaaatcctaaggcaaagtgaaattttcccttagtaaaaccatctcctgtcaaaagtgtatagattgagagaaggtttggttcatccactgacttctctcgttttttttttttaccacgcttcttttatttatctgatttgttatctctaaaattcaaatctctagcaaatatatataatgttatttttaagaaagattcaaataggcagaaaaagaaacttcatataccaatatagtttgcttcgatgaaagtctgtgctattcaacttgaagtttgtagaatttgtctctgatattataactcttcaaggagagaatatatggtaaacttttgtatacacattttgtaattgtctttaggtttatctttacatgtaaaataattgggtatttttgtcaattcatcatttcaatgaacagttttatctttagatcagagtgtccataacaagtcagagtataattttgtttcatacctctagggctctagctctctgttaatcctcccatacacaaagagatggagtcccatgaaattatacattaaaatatctactgacagaaaatctaattctcgaattatcattggctttaagaaaagaaactgacaaaaactttccctaaagataatcttatccacacatatcctaggaaacacatatgggaggggaccacctttctcttgtctcaacttctatataaactcacgcaagcacagacatttgcataacattcacattacactctttaagtcttaaacgaaacaatg

SEQ ID NO: 1414 - DNA, 3000 bp, Unknown
  misc_feature (1)..( 3000): cDNA_ID_2993663_gDNA_ID_1620399_Annot_ID_155881 3000 nt of promoter + ATG
tcacaaagcggaggtaaactagtccacgggaacataaaatcctcaaacattttcctcaacgggaaaggatatggctgcatatctggaacaggaatggctacactgatgcattcattaccgcggcatgcagttggctatcgtgcaccagagataacagacacaagaaaagggactcaaccgtctgatgtgtatagtttcgggatattgatattcgaggtactaacaggaaaatcagaagtggcaaacctggtgaggtgggtgaactcggtggttagagaagaatggacaggagaggtgtttgatgaggagcttttgaggtgtacccaagtagaggaagagatggtggagatgcttcaggttggtatggtttgcacagcgagattaccagagaagagaccaaacatgattgaggtagtgagaatggtggaagagataagaccagagaaactagccagcggatacagatcagaggtttccacaggtgcgacaacaactccgattggaagtctatcaggatctccgtatatactataagaaagactattccatctttccttaatgtattgaccattcagaaaaagatttcaatatttctacagacgattatcgtgattgccatttgagaaccgtttccaacaaaactagaatctgtcttctaacaatatttgaaatatacttgtaaccatttgtttcttatattgacactactggtcttgtgttacatgaaagaatccattcacattttcgaaagtcgaaacagaatataataaacaacacataccaccatgatttcagctattagtaaccaacagaaaagacattcgaaagtcgaaacagatcttactagtggtccctccaaagtttatgaacagcgaggaaagttgagatgtagtcacttccacacaaatttggtcttgataccccctgaaaaatagtggtagagcttgatgagcaaataaactaaccacaaacttagattgaatcacaatatccagaatcttattcatacaaaccttcagattcctcaaaagaaacttcctttactaatgaggcagatgcattgtactcaaatctggaatgaacacaaggagaaaccattatcagtataaaacacaaactgcacatataaaccaatagctgagttttacgatatgggagatatacaaaatgtttctacggactattatcgtgattgccatttgagaacagtttcaatcaaaactagaatatgtcatctaacagtatttaaaatatagttgtaaccatttgtatctcaacgtactaatttcagtagttatctcctaaaagtgttaattctttatcttcttccataaatatagatatgattaataggtacaagtggatcctctggtctcaccactaactaatagccaagtcacttaagaaacagagctcactaagtttcagagactaaaaagacccacatcagttctcagtaacacaatacctgtagtgtcaatatcaggaaatgagatgaaaataaacaattctcatgtgcatggtattagcattcaaagaggagacatcaaaaaccaaaaattgcggtcatagttacctgttagagagaagcacttcaagttcatagtcagaagcacttttagtgacatctaccatgacctgaacaagctcagtcttcctagtgctggccatgaagagatcatattccgtgggaataatgatagcgaagaagttatcactcaatttgcttaaacacatcttctctactgatgacaaagcaattctcctggtcatagcttcagtctcgggatcaattagatagatcgcaaaatcagtgaggataaaaatacgccgtttcatcttccccgagccggtgaacttcaaaactttatcagcaaaaagaatcgatgtatcacctataacaacaatgaatcaccttctcaacatcaaacacatgcaattcaaggtgaatccaatcattagcaatccaaacaaccacataagaaactataaatcgatgccacaattctacagctgattcaactattcctccaagttcttcgattcacaaattgcctctcaatctcaaattcatcaaataaaaaccaaaagtttggagaaacctaaccttgtttctccagaattcgcatcaatccaggacgagaagaaacgtgaagatagtcaccacgatgctctctatagcgagacgctttccttctgactttacctccagcgaatggcgtgtgatctcctccgtctacctcacccacacttcgatcttcatcaaaatcaggtggaggtgattcttcgccgtcgaacttcggccccttttgctccttcaaccggttcattcctcccggcgacgaactcgaaatcggaatcggttagcttattctcagattctgcgttagaaaaatctccaaagtgagagagaagacgtggcttcaaatgattcgatcgattaaaagatacaaatctcagccgttagattatatgacttcatcgcaacgcgtttcgatgccacttgatttgaaatttataataaactcgcagccgttagatttcaataccacttgatttaaggataggatatcaaccgttagattagatgactttttaagacgatgtcgtttcaatgcaacttgatgttttaattaagaagcgccgcgtcgtttcaaggtccaccgaataataagagggttaaaagtagagtccactagtcaaagaaagtaaataatccacacggtatttattgtagacgtgagcacagagaataattcgtattcttcgtctttcgtccaccaccatctctattttcttcctttcccctaagtcttggttcttcttctctctaatacgagaagaaaaaggcgaaaacctcgccaatccgattacgcgaaaaatcaaaggtattgtctctgtagcttttggatctattacttatatttctcacggatttatagcttctctgattcgtttagaatctttgtttgatttttgatttttaggtttttggatatg

SEQ ID NO: 1415 - DNA, 3000 bp, Unknown
  misc_feature (1)..( 3000): cDNA_ID_3062222_gDNA_ID_1620399_Annot_ID_155886 3000 nt of promoter + ATG
tatggcttctgaaacgtatggaagtaaattagatatatatctgattccattttatttacattgaaaactaatgacttaaatttaagtacataagcagtagaagctaagtcatatacctgaggaccacgcagaacagcaaaactttccttcatctacatgcttaacatcaagacccacaaaccatgaacccgtgctgacgtcatcatgagcatacgaatgaagaatgtctctgtcacccccccacccccaccccatcatcatacataacagacaacacaaaaactcagtttcaatcttatttctctgtttgaaagatatgtgtcatcatgcgtaactgagaggtgaaactgacctattgatcgatacaaatctagccaatgcgtgcgttataacatacatctccccataagcatgccggaagtatctataagataaatgaaacaaagaacaggtggttcttagtcacatggaagaaatgaatctagtcaatgcgtggttctgattatttataaaacttacgctttcttgtcaccgaatttccaccactctggttcataccatttgtggttcctgccagaaaatcaaaacttggttaagattatatcagactgacaatatcctgacaaccccaatggtcctagtggttttgggtttttaagcttaaaactcacggttctgagaagacttcgcctgatttcatgcaaccgatgtaagcccgtgggttttccagatgtgctgcaagcgtagttcccagagcatctgcataggatcaattacattaataccacataatcatgtcagcaaaatgcatacatggaaactcgttgacctcagaccttttttttttttagtactaacttacctatatttacgtagatattgtcgatggcttttgcataaaactgtgcatcccacctatctgcagcgtaggcaaagaacagttttaccttcttagaagcttcctcgggtgcctcaactacatcatcctgaaaaccagtaaatggccaagctctcaaactaacataggtgagcttataactgaatgattcaaggtaataacttaagaggggagaagcagaaaacacatacgagaataatgaagtcatcggtttgactattttcagtatcaatgctcttgtccatgctgtcccctttatttgcactacatatcacaaaaacaacgtttcaaaacaagattccagtaccgtataatcatctttaaacacatagagaaatcaaagagtgataaacagaatccaaaccttcttccaataacaaatcttgcaatcacacccttttcactttcaagttttttaagtgatgcacctgcaataaaaggaagtgctaagctcataacacattgcaaataacagactggtgtcttactaaaacacgtataaagagaaaccctaccagtccccatccatgcttgacgaactgcatccctcttcttcttgttacccaaacttgtcattatcccgataaccactaacggtcttttcttggtttcagttccatcagcaagtttgggactttttgaaacaaagccttcttgcctagctgaacttaattccatctcaagagctgctagtgtcttcttctgttccctagaaagaaaagtctgttttcaacagtccatgaagaccaaacaaattaaacgaaaaccaaaatcaaacaaagtaccaatcttttacctgcaagctatgatcttcaaagtatcatccactgatatagcagatttcccctaaaccccaataaaagaacatcataaacattcaagtacactaaaccaaagtaagacagtaattgcaaatgtaataactttctgacatgacattactctctgctgtaatgaaagtgacagtactcaaatactaacctgtccggttactctatcgagctcattgattagatgaaccctagtttgagattcttgccataaactatctcaaaaaaatgtagagacgagaccaattaacaaacaaaacaaataagtaattgttagatatggataaatgtagatttaagaactaaccggcctgctacatagaaggaagcaaaagttgcaaacataaagagcaaaagggttgatattctcgagctcgataatcttatactcgaccctttcctcgccattgaaatagatccaaaatcagatctcttagtcaaagcaatcagacgcaaatgcctcttcactgtcgaaattcgatcaaatttcactaattcaaatctccagaaatcggattttctggatccaatgattcgtcgtcactcaaaataaaaccgattaggaatgtatcattggatctgcaattctccggtgatgattcaccagcggaacacaaacggcgagatcactcacttcgctgagaaaaattggaatctggattgagaaataaggagagacaagagaagagagtgccgttgagatttatgatttttatcggattagtttttgggatgtcaattttgtgtgatcttcttaattactttctgatcaattaccaaacctagtctctctgattcttttgattataggttaactctacaatttaattctcatttatttctactgatttgtaaactttttcgaaactgtcaaatattacccaccgtgaaaaaaagggatcaggtgttctttactaaacaacatttgttttttttgttacccggcggttgaaaaggaggaggaggtcaagacgacgacgtttaaaaaaccatgggccgtcaaatactctcgtcaaactcttaccagatgattattgattagatattctctcttccatttttcccctttcgaatttttgcatttcatcatccttttcgtgtgcttcacaacttcatctctctctcgagagaatttgcgtcatcaattcaaatcctttacgcaaagtttcagtttttattcactttcttacataacccatcaaaccaaatcctcgatcggattatgttaatcaattgctaagagctttttcttctacttcttcgcaatccgcc

SEQ ID NO: 1416 - DNA, 3000 bp, Unknown
  misc_feature (1)..( 3000): cDNA_ID_2136122_gDNA_ID_1620399_Annot_ID_155887 3000 nt of promoter + ATG
aacaaggactaagtaactagatagctagacgttattaataatgaaatattttagtatctagattccatcaaaatgcatacattaaggtacgtaattccatttaacaggtttgtcccacgtgagattgcttcatgattatgaatacgtagttaggtagattaacgtacgtagtagatagggtaaatagtttctcttatgtagtttctcgcaatatattcatctattgattccatgtaatacgtgtgttatacggctaactcttccaaacaacaaacatgcccgcaatgaagtacttaatagcttctagcccaaagcccaccaaaactcagaagccataaaagagaagttgttggtatcaattaattagagatgaagatatcttagatcataaagcactatgatgtctagattaaaatcaaacttctaataattatatatataacgttctttggttagttagctatctctaatcaatacaacttttgactttaatttctgctctccaatggttgaattcagtaagattttaacgcattaccaacaagcaatgatcttatgaatgctgctgtcaaattcatctaactgtatgagcattattaagtgtaaatgatgtcatgcaagtgactgaattctttttaatgataattaagatagtggttcatttttcgctaattcgatataaaacataatatatatctctatctaaagaaatggaacttacgaataggctaacgtgagatctgtttgttatcaatcttgtgagttatgataattgagaaaagtctacaaatgataacctgattggtaacccataacgtctaaaaagcagtattcagttttatctatatactgccaataatggatatcaaaacatgcacgtccacgtattgagtggcacatgaatatgtgtctttaatttgtacaaatttacaaaataaatgatttgtggttctaacgtaattaattctttcttagcaatgcttaatttatgtttctgacgtgaaaaaaaaaacataaacgattcaacatgttatcaacggtgtgatgatttcgagttttctttaaaatactaatgtcaaacttaaacagtaaattcatcatatttcataaggtttttcttactagaaaaatgggaaatcagccatcacataattaaaacatttgtaaaaatattttatagtgtccatgtatatcgtatgtaactaaccttgaaactattttacatgataactatataccttaataaattagacggtaatgtgataaacaaatgcgtcaatgaaccacataagacctttttgttaaaggtaattggaacaacaagaatcattcattagtcgtcagaatgttagtggtctcatgaaatagagaactttggtgaaagagacaaagcacaaaatgctaagataagaaaaagaaaaagaggttaagggacagaagaagacttatggtagaggacagctcactctcttattgacattgacttcatacccaacctttaattttgttatcattatggtatagctaaatagctactcatcgtatacagaattctatcatatcaacatctagttctccgcgtgactttatacttttttttttttttttggcaaaaacattgacttaaacatcaaacataccataacaaaaagggtattttttgtgttcttctaccaaattactttaaacaatatccaatatggtaagcatggaaacaagattctgtaggaacctagtagaaaaatatactagtttcactccttaaccagagcattgaaccgagcttttcgggaatatagtgattgaaatttgaaccacagcaaaaaaaccggatagaatccacaactactcacctttgcatatattctacgtatggtaatggaggactatgtgcgtttttttttgtatgtgtgtaatattggtagagaggtctatctcaatgactattccattttaatttatggggctccagttggtgggcgatgtagatttgtcccatcgacgcttttcgaccatatgagcgcttgccttgactcttcctgttctcgttgattttgtatgtatacgcttgtaagtatttagaaatgttttgattcctagcctgtatcgatccaacggtcgagctagccgcatgcaacccgacgtgaattagataatgctcataatccgtagtaggtttgcgggaaattgttgtcaaggactcatgttggtttggtatagaggaacatccatcatataatcatttcgagtgtaattctacatttctacctaatattttaccaaagtcgttaactcaaccagggaatttttggttatccgaaaagaagagttttaaagatcccgaggtcgagtattagtaacgtggaagtgactatgaatttcgatacaaaaacttttgctacttaaaaacaaaaataaaataattaaacaaatcgagattaagaaagaaacaaatatccgtgaaaaaaaaagaaacaccgacaccgttaggtgagtagaaaactctttcaaagcactaagtgttgatataatataatatcacaaaagcatcaatcagttgatcgcaaatagacatttgcgattctataatagaaatgaataaaggtatattagttactatatttgctataatgaacttcttatgaaaactaaaacaaatttttagtgatgcagtcgttatatatgcgcattacacctccaagaatactcaaatacatcgaccatgtacatattatatcgttagagacttagagccatcgacacattttgtttgtttgtggtccttttgaatactacattttcaattaaatatgactataatattacagctatcaggcataatatatattgaaattgacacatacatatatatagttttatacagaactcatgacatttttattcttaaatagctccttctatataataatttatagagccttccacatctcctttgttcccttaacaaactctaaaccaaaaaaaaaaaaaaaaactatg

SEQ ID NO: 1417 - DNA, 3000 bp, Unknown
  misc_feature (1)..( 3000): cDNA_ID_2136112_gDNA_ID_1620399_Annot_ID_155883 3000 nt of promoter + ATG
gttgtctgttatgtatgatgatggggtgggggtgggggggtgacagagacattcttcattcgtatgctcatgatgacgtcagcacgggttcatggtttgtgggtcttgatgttaagcatgtagatgaaggaaagttttgctgttctgcgtggtcctcaggtatatgacttagcttctactgcttatgtacttaaatttaagtcattagttttcaatgtaaataaaatggaatcagatatatatctaatttacttccatacgtttcagaagccatatgcgcaggagtgtagtagaaccaaagacgaatccaaagtgtgaggctcttggctctttggtgcttatagagaaagaagaacaaatgacatttgtctgaagaaagctaattacaccatttcatctatgtattctaaacttgccattttattggcattgcattatacgaagtctaggatttggatgtgggaatagatattcttaccgacaaacgttaaactccaaaaaaaataatcattcatttacagcaagtaaaacccaataatctatactttaccaatctttatgttatcaaacttgatgttcacttgaataaactataggataaagagttgaaagccaaatttaggaagaaccatggagcaaatgtgccaatgccttatcagtgtcgttctcaaacatgaagagagcatctgcaacagcgtttgtcggaaaacccatctcccgtatcgctgtgaacccatttgcaaattcttgaacctgaaaacgcgtaaaaactgtgattagattctcctttgggggaaagaatgaagaagcaagctggtttgtcaattcaaagatccacaaatttaactgatagttgatcacggttttaaatgatggacggactcaaaagtatatatgatcgctataaccactagttagaatccgtataagcttcattagctaatacaagaataaaatctatagtgaagggatgaagataaatcacctttgtgggattatcaccatagtttgcaacagctatgttgacagcttctctgttgagcccagaagcagtatatttcatcactacatgatctacaccctgcatttgaccctgcatttggaatcacttattaacgagaataatgcatatataacgatcatacactgtaatgcacaaatctacaagatcttcacccaattcgcatttttaagttaatacatagatgatccacaacaattcatcctagacatcacaattgatactatagtttagtgccattaatcgtctaactcaacaaagcttccattctgttcccgtgtgatgatccacacttgttcttcctagacctcacattgacactatacattggtgccatctacaaagcttccattctgttccggttaactacgttcatcgatgatgattcacacttgttcttctagagaacacatcgatactatacgatgatgctattaaccacctcagcctaactttaaaatgcttccatagattttaagaagagccataccactgaagaaggtgatggttcatgaaacttagccggtggattctcactcccaaatttactccaatctggattatctttctctgcctccgcgagaactttcctctctaatccgaaatcgaactgaaaactactccgatgaatatctcctactcgaggcaacaactgaggctacaacaatttgcaaatacaatgtaaaactacttcaaatcttcaatcacagagtttaaagatcaaacatacaaaatcttaccggcggagtaatccgatactcaggcttcaaattcactctgattcctattccagctaccaaaatcaaattcaacgatcaaaaccaattactaatcaaattcgcgtaaaaccaaattcgagatcagaacaagacttacatgaaggagaagtgttatgttgaaacgaagagtttctctccggcggagagaaaaactgtgggccgggaccggtttgttgaccgatcttagggtaaccgtacataggatggttagatgacggagaaggagatgttgatggaggtccatacataggtcgagggtaagaaggaccaccagacttgtttctgtaatcgtaatccattgttgtgtgtttgttttctagtttgaagaagaatttgcagaaaagaataagaaggaaattggaagaagaagtcttcaaggagatcagatctgtttggatatgtggattagtgtatccttctccagctttgacttgatcttgtttttgttttcagttttttttctttttgaattgggccattaaggcccatacattatcatccacatgccggaaccagagcaaaaatgagaaccactttgctgtatacttatgtttatatagatcagatcaaaaatactgattttttttttgtcaacaatatgtgtgtgtttttttggaacaatatgtgttaaacgggtgttttgataatagactatgttcccacaaaactatgcaaatcttaggatgaaccatgaaactctctttttctaatttcaactgttacaatacacgacttaaggaaggtgagtggataaggagagagactcgacaattagcatgaaccatgaaactcactttttctaatttcaactgctacaagacactacttaggttatacacaacaaaaatcaaagttcaaatgttgaaaaatattgtccagaaaaaaaaagtaactttgaaaattcaagtagctttcaccgtgattttctcagcaaacaaaaacaaaaacagagttgttatgcatcaagtcaacaactcgccgaacctaacattaacctaaagcaacccactttcgttataatacacactgataaaacaaaattaaacctattgaataattcttacaatatagctccacaaaagtcaataattgtaaacttattatatatctaactaatctcacttcttcatcttcatccattattataaacgccactttactcttaaaaccagttttttctccaccctaattaagaaaatg

SEQ ID NO: 1418 - DNA, 3000 bp, Unknown
  misc_feature (1)..( 3000): cDNA_ID_2105348_gDNA_ID_1620400_Annot_ID_155903 3000 nt of promoter + ATG
tccttgtgccttttcatttgcaagaacttcctgcacaacaaaaatacggaaatgtttttgatccaagaacatcaaactctaattgcaattgtaaccaacaaaaaaacacttaaaattcgctatacactatcaaatttcctgacacgtagacctcatgtcagcacaaatagaatctagcctatctctgttaattgggttaccaaacaacatgagattgattatgtggaaaaccaagcacattatttaccctttgaaaatacgcgaaatcaagatccaagaagaatttatggagaacagcttcgaagtacgaaataaacaatgaagattaaattacctttttataatctctagcagctgccgccaatacattcccgaatgccagattcgagagggtcgacttcaccgtatccggatccatctctttaccaaccaactaatccaactcagaaaattttaaaatctcaatcaaaaatccctctaagatagccagagaagagattgtaaacaaggatttgaaatctggtgcagagaggagaaactccccgacaatgaacaccaacgatctaaacgcggcgtttggtaaaagttgagtaaattttgttagggcttagttttagtccatgggctaattagtaagtgatttacggcccacacatgagcccaaatgtttcagacccagccaagtttcttcaaattcacccaatcaacgacgatgtacgtgtgtatgaaaatcattaacacgacgcatcgctttcgaggaggagcattacgtgtcctgttagctacgataatgttagtaccgccacaaagaaaaggatagatattttgctttccagcaccctgtcatgggattgatatgaacacgtacttggtatcgacatgaaagctcaaaaataaattcaatccgattcctttagtgatatcagaagttcattttaaatacgaacacgtatggcgaaacaccacgccgacattttctgctgctgccacgcgtcactttccaaatattgattcattaaactaatagttgatccatatccgaaaccggactataaaactatcttcaatgcgttaacgaatcttcatcgatcaaactcatcaaagtctaatatcacaaagaaagagtttttttaactagcttagctcaaagtgtttgcttaagacaagaagaacatggcgtcttaccagaaccgtccaggaggtcaggccactgacgagtacggaaacccgatccagcagcagtatgacgagtacggaaatccgatgggaggaggaggatacggaactggtggtggtggaggagctacaggtggccaaggatacggaacaggtggccaagggtacggatcaggtggccaagggtacggaaccggtggccaaggatacggaaccgggaccgggactgaaggctttggaactggcggaggagctaggcaccacggccaagagcaactccacaaggaaagtggtggtggcttgggaggaatgcttcaccgctccggatctggatccagctctagctcggtacgtatcaagtgtataaagaagatttatgatgttttagtttagtatgtgaagcgtaattcgaatgttatatgtataacaggaggatgatggacaaggagggaggaggaagaagggaataacacaaaagatcaaggagaagttgccaggtcatcatgatcagtctggtcaagctcaagcgatgggcggcatgggatccggatatgatgctggtggctacggtggtgagcaccacgagaagaaggggatgatggacaagatcaaggaaaagcttcccggtggtggccgttaagcttcgaacaatcgtgtatacatattaaataaaaataatgagggtttgtaacgcagtcgcattcggtcgttgtattgtgctttttatgtatgtacgtcctgcgatgtgtgttgtttacttacatgagtgtgtaatgagcatctggctctttttatgttctgagatgtttgtgttatgtaatttcacatctatataaatctactttcttctgcttagtttgtgttacacctctcgtccactgtgaactccgttaacgcactacaattagtgtagtagagtgtagacgtacatgttaagatgggattaggcctgttttcgaactcgtattccccattttgctgggtttaaccttgggccgaatcataatttgatgcttgggcctatgaaatggagagattttattagtgatctgtattttctgaacgtaggtaaaagacgtgagaaaatgatcaaaagacattgaaaaagtctcaatacatcgtccggtgatatttctttaaaatgacgacttcttcttctttgccattactgcacgaaaagaaaaggacatagttggtttggttttgtgaaggagagcagttgaagctgtttctcaatgattttgtcattatctagcgtttattatgtctttggcgtactctatcaaccgtatctatttgttaagcacacaatgttaattagtttgcttgcagaataattagcatttttttttgactatttgttcaacggtcaaccaagtaaaaccctatggatgtaattgttttgcgtagcttaatcatcttcaggctgatctctcaatttaataaaacataaatccccatagaaatcttctccgcgttgactattaaaagcaaaattgtgctttaagtgttgctaatgcatggaacaaaaatcccacacaacaactgcgaataatctattgatatgaggtgcataaagtgatcatacatgagaaatatacgaaaagaattctaacaaatcttgtattcataccaattcaaatatcaatgtatccatctaatccaatatatagctaaaattagataccaactccaacgtctttctcaattgtccacaaagtctactctataaatgcaacccttggcatcacacacaatcaccaagtacaagtaaccgagttatatacaacgagtcatcaagagaaagaatccccccaaaaaatg

SEQ ID NO: 1419 - DNA, 3000 bp, Unknown
  misc_feature (1)..( 3000): cDNA_ID_2136231_gDNA_ID_1620400_Annot_ID_155906 3000 nt of promoter + ATG
cctttgactaagcgtatagtctcgtataattgacattgacaactttttacatgcaatatatgtatgatgttaattgttaagcaatttctactttgaaaataaagagcgctaaattcagaaataatcttatatagtagtgacgtacttgataagcacacaaatctagaaatgtctaaccaaatagttcacctttattaattcaagatcattttccaaacagagagatctataatgttatcagttatcacttgtattaatggtcatgtaaagcgtagcccaaagcccacttcatcatgatttgaactgtaggagtaagattctgctacggatatgagacctgtcgtctttagttatatgggccgaagtcagaggttgataacgagcatagaaatatcgtgatactgaaaggccaaaatggcccacattaatccattgttcatcgtatggtcgaagcctaaaaatttcagctaggaaaattgaagtaatatatcaaagaggcaatttcatcattccatctgaatatctgatcttgtcttgtaattagaaaaataacatgtttagagtgtgttttttttctcgggtaaaagaatggacacagtttaataagtcaaaagctagaaattatgttttgtcatctgatacgaatgagcgttaattatttcaaacgttctaaatatggagaaagaaatctcaaaactgttatcgattttttgtctgaaattagacggttagataagataagtttctatatatgaattacgtgttttgcatgccagatattacgtgacatacctggatcaattaggataaaacatgaaagattcaaaatacaagatgcatgcatttgctatattactgaaagttcgagtaaaaatatatggatgcatttgtgtaccttacgtacatcaaattcccacccacctctataaataattgtctgaagtgtcgttagcatccctgaacaacataaattatttctggacacaaaacttaataatgggagaagttgatttcatccacaccattaatccttcctcgaggtttttctctcccaatatggatggcatgcatgcaagcgtgtgtgtgtgagtctatgttgaattgacatcgatgtatatttgtgatgcaggtgtgacgggggtgatgagagaagtagtatgtacagttttgtgaatgctctaaggatgagcggtggagatggagataatagttactccaccaattctcttcttcaggtttctcccatattccatataactgtttgatccattagttatatcccacacagatttgttatatatataagtaaataactaaaagtttctttaatctatttctttttctaatttagaaaaaagtattatcaaaggccaaaccggttttggttaagaacacaaaaggaatgatgataaacttaaattttcctaattacatcaaagtagctgatttgggatgtgctactggagaaaacacgttcttgacgatggctgagatcgtgaacacgatcaatgtgttatgtcaacaatgtaaccaaaagccaccagaaattgattgctgtctgaatgatcttccggataacgatttcaacacgacattcaagttcgtacctttcttcaataaaagggtcaaaagcaaaagattgtgcttcgtgtctggagtccccggttcattctactcgaggctctttcctcgcaaaagtctccattttgtacattcatcttatagcctccattggctctctaaggtctcacctacttacttgcctagtacttgcttaaatatgtagaaagcaaattaaaggttatatataatatataatggaactgtgagatttgtaggttcccaaaggactggagaagaattcctcgtctgtgtacataacgacttcaagtcctccaaatgcatacaaggcttatttaaatcaattccaaagtgactttaagtcatttctagaaatgcgttctgaggagatggtttctaatggacgcatggttctcactttcatcggtagaaagactctcgatgatccattgcatagagattgttgtcacttttggacactattatctacatctctacgcgacctagtctatgaggtaacatataaaagtaccaaatttcgacatttaaaaatttatcggctttaaagattcaaacttttttttgggtcaaacaagaaaagattcaaactttttatgatccacaatatagggtcttgtgagtgcgtcaaaggtggactctttcaacataccgttttatgatccgagcaaagaagaagtgatggagatgattcgaaacgaaggctcattcgagatcaatgacttggagattcatggatttgagcttggcctaagcaaccatgacgaggactacatgttacattcacaaatatctaaagcagggcagagggaagccaactgtataagagcggtcagcgaatcaatgcttgtagctgacttcggagtagacattatggacacattgtttaagaaatttgcataccatgtgtcacaacatgctagctgcacgaacaaaacgactgttactctagtcgtttctttgatacgaaagtaatctgtcaatgtagattttttagatttcatgttgagactaggaaaatgttatatgatatgtgtatttggtacatatgtaataaactgtactctgggggaattaaacataactcaagggcagttttctaatacagaaaattacagggtgtattatgtaataaacaaaatttaaaggtactttcgttaaaaacaaaaaccactgggaatgttttttcacaaaacaaaaacatttaggcaattttgcaataaaacaaatttacacggcgaattattgggaacgtgaccaaccgacaataagaacagctgacttaacaacttactactatttgctactacgtttttttgcttcaaatccaacaaacaacaccgcatagaaatcagacggcagtgttggatcggaggattttgatctgtggagacgaatatg

SEQ ID NO: 1420 - DNA, 3000 bp, Unknown
  misc_feature (1)..( 3000): cDNA_ID_3062300_gDNA_ID_1620400_Annot_ID_155914 3000 nt of promoter + ATG
tgattctgcttctttgtggacaaatccatgtaatttaagtttacagtttgatagtaagaaaaattctcggtttattacttgttatcagtaatcagactgggtttacaaatttacgaataaacacagtggggcccctgatgactacaaaagcctacccgaaacaccaggagatgccacgtcactaaacatacaaaaccccatcaaaacgcagccgttccggtgattccccaaaacccagcgtgatacgcggtcgttgcgaatgaaagccttggtgaagaggtttaaattaagagtttgttgcgactaaagccttggagaagaggtttctcttttttctctcctcctcagtatatatctaatctctgtttgctcttttttcgcaccatgtcatatcaatctaccatcaatcgatcgtctcttcttcctccgtctgcgttgatcttttcgtttcgtcttctccgattgatgctctgtcgcgaggtaactatttctatcgagtgattttgctagctgctgactgttcgatttgatgattaaggtcttggttccgtgataatctctgttaaatttagtttaggctacttgatgttgaatgattagtttgataatctcgcactctatggtttgctccttcccgaaattgaactctcagattgttagcttgtttgtataggttattaattgcttgacattgatttggatttttgtttatccgttatcgactctctcgatgttcattactttattagttgaacaacgctctctcgctgttgtgtatccctattggtggatttctaattgaaatcttcaatgatgcagagtcatgcctacattttctgctgccgctttgggtagatcactaaattcagggacgtccttatctagtaaatttccaagcacactgcagtcaaagccgtctattttgaatgatgaaagtaagcaacctaaagaaaagacattcactcgtcctcagatgtcaccttctctatatgccactactaaagaaatccctcatcccaattcgccttcttcctaccctccatctccctatatcatcaatcacaaagctcgtgggcctgttcttttcaatagggactctgaggtggatgggccttctcacccgataacctctggtgaggaaaagattagtggtaatgtagatgtggaggctactgcctccttgagcaagtccacatccctatcatttcctatcaccgaggctattgcggtggatcacaccaatggtgttcacacccaaggcatccatgaacgtcctgtttgggattgcagtccccctcttgggacatttttgaacgagaagtcgggaagagatatcagcaatggtgggattggaagtaataatgctaccagtaatttagaatggcaaagttacttattggagccggtaagaataaaagcagacaaggagcttgagcctgaaaatttctataacccaggtgaattagtaagcttcacaagtaacacagaggtagaagatttcgagagagctgaaagctcacacagtcttgctacacatgttggagagttttatgatgcttgcgatggtactgtttcttcctactaacttttttaaccacgagatagctagaaaattcttatgatgtctgacatttctagcatcatcactttttgccagttcttggagcctcttctcctttagttttaagtgttatatgcatatatcagtatgtgattttggttgtgaagtggccttttaggcttgggattcctgtgtttatagtcatcttgaattcgtgatagttatgaatcagatttccaaagacatagaaaatctgcatgcatgattcactggtatatctaagaaactggttttaatttattcagttactgtttcttggcttccagaactatcaactgacagtggaatgcagagttcagctaacaacattgaatctgaggtaagggagatgagattgggtttactaatggaaatcgaaaggaggaggcaggcagaggcgactctagagcaaatgcaagttcattggcggaggctccgtgaccagttggccgatgtgggtatgttccttcctcttgatcccaccagaagccaatacagcatgaacctagctgatgagctacgttgtcaacttgaggtcaccaggtttgtctccgacacactaggcagtgacttggccaagacagaggtagagatggagatggaagctgagctcgaagctaagaactttgaaatcacccggttgtctgaccgtcttcattattacgagactgtgaaccaggaaatgtcccagcgcaaccaagaggccataggtagaagaaactcaagttaaatttacaagaatgtcttatcttatttttctttatctcaatgcttcaactctctttgatatcagaggtggcaaggcgagacgggcaaaagagaaagaggaggcagaggtggatttggggatcaatagctgcaaccatcacactcgggagtggagtcttggcctggtcgtaccttcctcccggaatgttatcatcagatgaagctcaacctcagctgtctccaaaagattcataatgaggttgaatcaaagcttcaggccttgtgaataaaaataggaaaatgggttttgttttaaccttttctagagaatgtatagaacattcatgatgacgacataactcagcttcatacgatcaaggtcataccaatttggttctgtttgtgtcgcttattgacttgcaatgttattattagccagaagttccgtgcctgattcttgcttttgttatgttggttcttaaatttaacgaggggggtaactgggtaaagaaaaataaaggcggttgaaatgggaattatatttaacaaggggtgtaagtggaaataacaaattctgaaacggcgtcgtatgaagatcatatttggttccttcgctaatcactaaagaaagcacctgtgaggaaaaaccaaccagtgagagctatcaatttgaaaaaccaagtccaacaatg

SEQ ID NO: 1421 - DNA, 3000 bp, Unknown
  misc_feature (1)..( 3000): cDNA_ID_2992979_gDNA_ID_1620400_Annot_ID_155920 3000 nt of promoter + ATG
ttctctcgaatgatcttttattgttcttgtcgtctagtttgatgcttttgctggtggtgacgacgaagagacagataaattaggaaaagcaaggtatggtttcgatgctctctagtctctatcacacactaattgaactaattagagaatacaccacgctttgcagcgctgtagatttgttctaagatgttttttcttttcaatggtaattaggtatgatgatttctttggtggcaaaaaggagacaaaaatgaagttgaaagatttgagtgaagatgaggaagctgaaatagaaaacaaagtactgtaatacttaactattcatggcattgtgatatgtaatgaattcatttctgatttatgaactaatttatctacctttagggcaatgaaaaactctctacccatgagagagcacgactaaagcttcaatccaagattgaacagatggagaaagcaaacttggacccaaaacattggacaatgcagggagaggtagccagacatgttttccctcacaattaaactgtaaaagaggcatcttgctttctgtagctaaatttatgtctgattttacttgttgtaagataactgcggcaaagaggccaatgaatagtgctctagaagttgatttagattttgagcacaatgccaggcctgctcctgtaatcacagaagaagtcacagcctcacttgaagatttgatcaagagcagaatcattgaggtaactacttgtggcagtaatttgtaacaaaggtctcccttgtttcttcctggttttgcatgactgatctttttactctttaggctcgtttcgatgatgttcaacgagcacctcgtctacccactaaaggaaaaagagaagccaaggaattggtgagttttattgaagaactattacttctatcctcttttcttgctctggtgtaatagttacaattgatttgttacttttgggtatatgcaggacgaaagcaaaagcaagaaaggtcttgccgaagtttacgaggtttgtatcatgtacaatatttgattgtgttattgcattttttgtgagataaccaaacttacatatgtgttttggtccatttggttatttgtaggcagaatactttcagaaggctaatccagcttttgccccaacaactcactctgatgaactaaagaaagaggttccaacttgatttgatacttatttttcctgggtttttgtgtttgcatatttatcttctcctttcattgttagtgtatatatcacattctcttacttataaacgttaaatcaggcaagcatgttgttcaagaaactatgcctgaagttggatgctctctcccacttccacttcacacctaaaccagtatgtttcttgcttagatcctaaatgatgatcacctcaagtgtctagacatagctgttctggactgaaactttttattttctccaaactttcaggtgattgaagaaatgtctataccaaacgtttcagccatagcaatggaagaggtaattctaagccctttccttttttttgtttgtttgtttggtaattgggattggagaccattatacttatcaacttgttccatgtgtactgtgtaggttgcgcccgtggccgtctcagatgcagcaatgcttgccccagaggaaatattttccgggaaaggtgacattaaggatgagtctgagctcacacaggaagatagaaagaggaggagagcgaataagaagagaaagtttaagggtaaggaagtgaataacaaaaagaatatatactcaattggtaaaaaatacaaaatctgagtgcatcatgttgcattttagacgcataataacctctttgcttttcacttgtgaaacagctgaatctgcaaatgaaccgcctaaaaaggcgctggatacaagtaccaagaacccttaaactggtattttctgtgctcttacatgactgactatagattcaaaaagcatcaaaaaattaaacgttgcttacttttgtgaagttacatgttgaagaaaggagagagttacagaggcaaattcaagatgataagatctcggtcaagagcattgctacacagacagcttgaagattagataaaacaacagttttgaatgagagaaatatttaaactttgtctttcacaaatttgaattttattgtatttttttctctttgtatgagtagttccattttccttgtatcgatagaaaaattccaaagaaatcttaaaagaacaaaaatgtgcaaaattcttaacaccaacatgaatcctaatggtaagattgaatttgatatgttagctacaactaatgaggcacacccgtaagataatgaaagagcagcagcagcatacattacctttccgagtccagcatgattcctccttttaagtgtaaccactctatagtctttcgattgggctaaaagcctcaaagaagtgaaatagtaaaaaggtaatagatagaacaaataagctggagtagctcagttggttagagcgtgtggctgttaaccacaaggtcagaggttcgacccctctctctagcgttatgcactaatttttaataagcccattagtaatattggacctggtggaatgtattgaacagcccatacccttctttgtagatattattgataagttagtcggacttaagaaggatattcgtaatccataaacgatattattctcaagttagtggtcaacgttaaactttgggtcccgaccgccatttgaagagccggtttctccatcgtcgtcactcgtcattcgtttgtttgtctcttccggatagatatataaataaaaatgtccgatatttttttaaaaaattacattagttttgctgcgtttagtattcaatttcatcgacccaaatcaaaatctctattcaatccttttccttcttcttgttgccctagtacgagaggaccgggaaggacgcaatatataggatactagatagagagtgactgaaggagagaaaaacaaaaatg

SEQ ID NO: 1422 - DNA, 3000 bp, Unknown
  misc_feature (1)..( 3000): cDNA_ID_2136302_gDNA_ID_1620400_Annot_ID_155925 3000 nt of promoter + ATG
gagactttatacgatgttgatttggtagagagaatcttaggccactttctcgacaccttggaacaatccaacaccgccatagtcgaagttgacggaaaatctccgtcgctgatgctcgtcgggaaattaatcgacggatttctcgcggagatcgcatcggacgctaatctcaaatcggataagttctacaatctagccatctcactcccagatcaagctcgtctctatgatgacggactttacagagccgtcgacgtatatctcaaggtataacaataaaattcaatgtgaagagaagatcggagaatttggatctgatttgttttgaaaatttcgttttcttcaataggcgcatccatgggtatcggaagcagagagagagaaaatatgcggcgtgatggattgtcagaaactgacgttggaagcgtgcacacacgccgcgcaaaacgagcggcttccgctacgagccgtcgtacaagttctcttcttcgagcagttacaactccggcacgcgatcgccgggacgttattagctgctcaatcgccgtctacgtcacagtcaacggagccaagaccgtcagcggcaataaggaatctaacgataacggaagaggacggtgatgaagcggaaggagaaagacaggtggacgctgggaaatggaagaagacggttagagagaatcaggtgcttcgcttggatatggatacgatgaggacgcgtgttcatcggttagagagagagtgctcgaacatgaagaaagtgatcgcgaagattgataaggaaggttcatcaccggcgacgacgactgatcggccgagaagttggtcgattaccaaaaaattcggatgtaaattcaagacacaggtctgcgattcacacgaagcaacgatggttgatcatagatcacgacggtcttgaattgttttcgattgattttactctttttagtacagaatcagaaagcatattgttgtgattcttggattttagtttttgttaatccttcgagattcttgctatgcgactgctctacacaaatgtgcatcgttttgagtcttgtactcgaattagtaaaaccagaaatgacatacggcacaaagcccatcgttaaacgtttcgaattgagcccttttctcgacttcctccgaatgggccgtaacaatgggcttcagttgcccttatctatcgtaaactgggcactgttttggagagaaattgtttcatatttgtggaatgtgcgccgttttaacgtaggaaaagagggacgaactactcgctgttcagaatcggtagtaggacttcatgtcgttttataaaggagagttcctaaaaacctaaaccctactttagttctactatataaatcaaccggctttggctgagaagaagccattagcacaatccgagtaccgaatcaaacctaagtctctgtaaatttcctcgttttccgtagatttagttctttgtcatcccatcttattagggttattcgtttaatttcgtttgaatcagttgatactctctgattttccaatatgtgtttgaatcggcatattaatctttgatcgactcgattttgtgtttttagaaaataatttagatttttttagagaaggaaaaatattctcagtgatgaagaaacaatagatgacgagtccgatgaaatccattcataaaatcgtggggacaaacgaggcatttgtctgagaggattatttttcttcgttttagcattctaaaatatctaggttttaggaacgtgtataaaggggatttctcagtgatgaaggaacaatagatgacgagtccgatgaaatccattcattaaatcatggggacaaacgaggcatttgtctgagaggaatcctttttgttcaattagttttgttttaattagacttagcaggaagaagaaaggcatgatgaggattgttttattgtcatctgattcttattgatgaatctatacctcctactcattctgagtgccttctcttgctcttaattttcagtcacagatatcattgcattagtagtcactaaattcggattcaattatattgactctagggaacactacatttcaagtgaatctacagatactctaataatataacacaatctgctaagaccaagtgataaaccaattgaactaacaaaaaaaataagtttatgaaatcataactatttcttgatattaaaaaataacagcaaagatgccaagttcatataacataaggccttcaaggagaaaccataacttgtaatttcaaactgtatactggaaagcagactgtgctcaatgtggttttggataattccctgcatcctagtcctgaagttgaagcaaaacctctagtattggcattcttacatatgatgagttaatttctgagagggacgtacattctgattcaggctctaaaggatcgattaagatttttaatttatcaggaccaaatcagaaaaaatttatatgatttctatctgtatacttagaacagcatccataaaagaaaaatgttgttgaagatcaattggacattggacaaaaacctagtgggccgggccttctttgcatctactacttgaaagccttaaaaaagaaaattaattgaaaattaaattttacatttaagtgttagcatccaaggcccattagctcagttggttagagcgtcgtgctaataacgcgaaggtcgcaggttcgaaacctgcatgggccacctttaatgtttttacaacataacaatttttgattattttatactattatacaggtcagcacccctgactgagacagtatccatatctccacttcagatttcgacacgtggcaacaaaaaaaaccagacactccgattcccacgaaacaaaccaatcaaaatcgttgccttatcccaatcttatctcagcccttttgattattactctttagtctttactttgctcacagctttggatcaccaaaaaaaaaactcaagagagactttgtggcc

SEQ ID NO: 1423 - DNA, 3000 bp, Unknown
  misc_feature (1)..( 3000): cDNA_ID_3062286_gDNA_ID_1620400_Annot_ID_155932 3000 nt of promoter + ATG
taaaacatattgtaaacatcctccatgatgatttgacaaaaaaaaaaaaaagtcctccatgaggatcactattctcattaatcaataaagaaacctttttaagaaagtgttaaacatattgaacataaaacacctcttaaggacctcatgctatgaacgggatgggatgttgtatccaattagtttacacatatttaaaatttaacacttaaaaaccaaaatattatgtatatattagaaaataaaacattttctgttatgtaaaataatactttaaaaatcttaaaccttataatagtagtataaaaatattaatttaaaaatatttttaaataaaaacacaagtaaaagtttatatgtgtaaaacatattgtgaaaacaatttactttttaaacaaattgtgaaaatcttgtgataatcaaaagtattatgtatatttaaaaataaaatattttatataaattattacttaaaaatcaaaaacaaagtttaaatagtggtataaaatacaaataaaaaattaagtgttaaaaatttatatgtgtaaaatatattaaacctaaaacacctctgaaggacctcatattatggacgggatgatgtatctaatagtttacacatattgaaaatttaacactaaaaaatctattaaaaacaaaaatcaaaacaatttacttaaaaatatatttgtgaaaaccttgtgataatcaaaagtattatgtatattttttaaaaataaaatattttatctaaattgttacttaaaaatcaaaaataaagtttaaatattgatataaaatacaaataaaaaaattaagtgttaaaaatttatatgtgtaaaacatattaaacctaaaacacctctgaaagacctcatattatggacgggatgatgtatccaatagtttacacatattgaaaatttaacactaaaaactctattaaaaacaaaaatcaaaacaatttacttaaaaatatatttgtgaaatctttgtgattagttttaaatcagaaaaataagaagtggaaaacataaaatctttttgttccttttttaaaaatcaaaatcattatctttattaaaaagaaaaagggtagtaaagtaatatacctagaagtctgtgatatcctcaggcggcgactcgtgcttgttctgaaacttgaaaccacaaacgagagcgtcttggtgttttccttcgccatcctcttatttcctcgttgtctccggtgaaagcatctcggtggctagatcattatccggtgaactgaaatcgatcttgttttttactgtagacgacggtggattgatggagattatcattcaatcaatgaaacgatgatatgcttttcggctccgatcagtcttaaatcttacggatgttacagagatcatcatcatcggcttctacttggatcatcgtcgtcggcttctacttggatcatcatcatcgatcggaatccacagagtttatgtataaagagagagttttgatttgtctctaaaagaagaagatgaaaaagggtgaaatagagagagttttgatttgtctctcaaggaagaattagaagaagcgttgttgagactgcgtaattaagagacctagtttttatttataaggaaagaggttcaaaagaaaaaaggaaattggtaatcacaattaacggtcacataagatttgaccccaaaaaaaaataacggtcacatgagatttccttttttccttggatggcttttcatgggtttgttttctttgtttgttacgtgagagaatctgatgactttaagtaaagtgaagaattcactcattgcatgatccgatcataaaaaaacagagatggagttgatgattcgatcctcaaaagtatactaaccacaacactgtcttctttcatcaaaactagagagtagccgaaaaatgaaaactttattgattacaatctgactttctgcctccaattggttaatcctctctactagcaattcatctttctcattctttagcttctctaactcctcaactgcagctaaccgttgcttgtttaagataaggatatctaaaatacacaacaatacattcgggtgagttaactttcacatatgaaaccgaaaccaacctcaaccaaatttctttacttttttgagcttctataaagaggttccatatgtccttatgttttgcttcttttataatagaagattgtgcaagactttcctgtgaactaaaccagttacattctgctagaaaaatcaggaagtagtagtatacttcaaaaccaaagaagagtaacctgagaatcatcaaactcttcatgcccttctgatcttgaatcaaaaataatacagttcaattatagagaagcaaaatcaatctttgcagcacaaatcagcaagattgaaaaaggttcacttgtaacttctgtaaaccaaaattattgttaattgactttaattaagatatacgtcacgtggcaaaaccagctggaccacaagtgtttttttaattgactttcttgtccatgtgcctgcgtttactcctctttctcaaatctttcctcatttgctcactcccattctccagttgtggaaaccccccaaagacatggcatttgaaccttttgagtcatcatcagcgtattcattcacacgacgatttaggtcagcatttatcttctttaattcttactttcacttgatcctttttatctctccgcgtcgttaattgtgaaagtggagagctttacataattccccaaagtaaaaagcttcgaattttaattctcataacaaatttcacaacaggtcagcctctaatttggggaattctagaaaaccctagtggaaaattttaccaatttgattcttttaagtatacaagatgacaagttttgcttcttctgcttggtgctgtaaaaatttctaagtttagatttaactttgtgtaaatgcttggcttgttaagttaatttttgtttttcttctaatcctttggtttcagaga

SEQ ID NO: 1424 - DNA, 3000 bp, Unknown
  misc_feature (1)..( 3000): cDNA_ID_3062282_gDNA_ID_1620400_Annot_ID_155933 3000 nt of promoter + ATG
tctaagattgttgaggagagtttgaaggagaaaggcaaaagtaagcaatttgaagatgatcaagtggaaaatgatgaacagcaagctctgatggttcaggagagtctatacatggtggagctttctgctcaacttgaagaagataaaaacatttcaacaatacctccgctgaatgaagatgcgcagcttcagaaggttatttgggaaagcgcgaagggtaaaggccaaatagagcatttcaaagatccagtggaagaagatggaaatcttccaagggtagatctcaacgttaaccatcctcataggtaagtgtttgtctattactttggcggtttccttgcatgctttattacaagatagaaatgtcctgacctggttaagattatttcacttgtagcatatgtgatggttgcaaatctgcgattgaatatggaagatctgttcatgccttgggtgttaattggcatcctgaatgtttctgttgtcgttattgcgacaaaccaatcgctatgcacgaggtttagaaccgtatatgaaagcttccttttttatagtgattggtactttaatatactaattgagttgctcattatgttttctgatgcaacatctaactcctgagggctacttagttttcaaacacaaaagggaggtgtcatataacctgctacgagcgtagtcacccaaactgccatgtctgcaaaaagaaggtaacttcccattggggtctatgagttgaaagttaaataattggtatcttataacagtttacgacttatgtataatctgttgtacttttcctggcgatgatggatcttaatgtaattgtattcagtttcctggtagaaagtataaagaacatcccttctggaaggaaaagtactgcccttttcatgaagttgatggaactcccaagtgttgcagttgtgaaagattagaggtgggtttactttcacttcaatatgaatattggcaaatgagcatgagataaagaatcaaccgccatttcaaaagaagaagtaaagctttctcatgatttttttttgtttgcagccctggggaacgaagtatgtaatgcttgctgacaatcggtggctatgcgtaaaatgtatggaatgcgcggttatggatacttatgagtgccaaccattgcactttgaaatccgtgaattcttcggaagcttaaacatgaaggttgagaaagaattccctcttcttttggtggagaaagaagcgctgaaaaaagctgaggcgcaagaaaagatcgtgagtacattttttgaactgaaaattccttatctctctatttctctttcactcatatgttttgtgagtttcaaaacaagcaggacaatcagcatggggttgtaaccagaggtatttgcctgtctgaagggcagattgtcaatagtgtaagagcttatagggggtaacacttacttgagactaaaactagattggattcatgactttaactctgctctggtccacatatacaggtctttaaaaagccaaccatggggccaaacggcgagctagtaagcttgggtacagaacctcaaaaggttgttggtggatgtgaggtcactgcaattctcatcctatatggacttcctaggtacaataatcttttttaagctcatctcatccttctaagtaatctcacgcaaatagactaaatcaaatctcttttcggacacaggttactaactggatatatcttggctcatgagatgatgcatgcttggcttagactcaatggtactactagtacccaatttgtatttgccaatcaatatggagagagctctcaactaaaagtgctatttggtttgatcacaggttataggaatcttaagttagagctggaagaaggaatatgccaagtgctaggccacatgtggttggagtcacagacatactccagttctgcagctgcatcatcagcttcttcttcttcgaggactccagctgctaatgcatcaaagaaaggtgctcaatctgattacgagaagaaactggtggaattttgcaaggatcagatagaaacagacgattcaccggtctacggtgttggattcaggaaagttaaccagatggtctcagactccagcctccataaaatcctgaaaagtattcaacactggacgaaaccagattcaaatctttgaagcacctaatataggacaaatcgaaacatacctctctagaacatatatatacaaacgcacacttatgtctggtttttctttctggatccaaaatacaactataacagaaaaatagacatgagcacgtccaattatataactttctattttcagcacaatatcatttcatagtacaattatgacaaattaagacattgcatgtgtgctgctacataagtttcaatatcgaaaaactatgtttcacactttcttaatttaatttccagtagttgcattgtcattttcacaaaattaacccttttacttatatcatattttgaaactttcttatatttttttaatgaatgatagttagtaagtggctaaatgctataaatattttcttttatttatttatcatgattcttattggatgttgttgacaagaaaactagtactatttgattggatacagtatttcgcattaaggagctgaaacggcaacgtttcaagagggagggaaataactaattaaaatcgtctcgaaagggtaaacaattacgaaactgccaccaagaaatgtgcttgcggcacgtgtgcaaaaaaacagctggtctttcgctttggaccacaaaaagtaagtgtgtgtgtgtgtttctctttcttctccacacgccttgcattctactactttctttttcttttcttctctcaaaaagaccaattcaacacagtagctgctcaatggtctttcgaaacttctcgaaattctcgtggaagacctcgcgaactttccacttgaggaaaagaatcggaaaccggtttgggctacaacgagacccaaaaagac

SEQ ID NO: 1425 - DNA, 3000 bp, Unknown
  misc_feature (1)..( 3000): cDNA_ID_2136312_gDNA_ID_1620400_Annot_ID_155928 3000 nt of promoter + ATG
acgttcaagggctacgacgatgaagaaatcttgtcggccaagaaacagaggaagtggttcaagaacaaaaaggtcatgaagatgaagatgaagaagacgagtgagtcatttggaaactcgctcaagtcttgtctcaggctcttgttctcttgcttccatgtctaattctcatctttgttcgataacttttttttttttttttttaatcgtaatttcaatctatcttcactttgcctttggaataatttcgaactccttgtataagttaaaccatatactgaattcgaatacgttcatattttggattcgatcaaatgagtatttctcgtcttttgtttttgcatagacttcgataattgaccgacggaatgtagctgttctgcttcttaagcgttaaattttaaaaatcttgtttatgagtccaacgagaaagttatgaatatataaagtttagttaattatgtgagccggcacagtcgagttcttagaaactttcttcaaaaacaattctttatattgttgtaattctgtattttatttttgagagatttgactcatgtttattttctatatacatacattgccatcgaatattacgacaaaaggagaataacatattataaggatacaatcaatttttactaagattataaaatatgagtagaaaggatagaaagatacgtgtactgactaagttggtccatcgcgatcaatgagtagataaatcgtactgacagtgattcttatgttattacgattttaaatcactaggatcctggattttccacatttgaatttaaattgtgacgatgaaaaatattaatgtaagttttttgggataatagttttcttgttaaaaatgaaatgaacattgcgtaggacgtttaggctttttctgtacagaaatgactaatgaggcttgaattgtgacgatggattctaaagacccaaaaggccccagcaccaaaggcccaagaaccagaggctctgctgatgtcaaaaccccctcattttgtatttcctctggatataaatccacaaaagtaaatgacatcaatccgacaaagtttaaaaacaatcgcatttcttgaatatggctaagataacatatctcggatatcgtgaatatatgtccgacgttattcacaattcgaggtgattagtgataagctccaaaaacaaggtacgtatatgttagtttaccattaccaatactctctttgttaaactcttaccattactcatcaaacttaaaacactcgcaaaatattcatatacatgcagatgcaggcccagttccaaataataataaaaatcaaagatttcaaaaccaaaatcggatcggatacgtaacgttatagtatactactttttttctataacgactagttgaagcgtatgacgacaatatagagaagacctggattgtcccacacctttttttatgcattgatcttcggagaaacactaaagaaaataaaaaaactttatgtttacacatttacaattttataatgggttcgtgtgtggattctttgacaaacgaaagtccacttctcacacaaaaacaaattctccggacatcgcatttgtcaatttttctctccaaaaaaaaaacacattagacaagtcagaagaacccaaaagataccatctttccaaaaatttgatgtttcctttttaacccttttttactttcatttcttttgaggtcagttttttttctgtcgtcttccaccttctttatctctgttgagcgagttacatttggaattttatcactttctttcttttgatggtgtgttggatgcattcgaccatgtccttggtttcgggtggattttatttaatgttattatagcggtgatttttggcttttcagaaaccggagaatatgtgttcacgggtttattgcagactatgtgttcgttgaaatgtctcactgtagacggtagtaccatctcctatgtcctggcttctgctgctgctgttgatgcgtctctttaccattggtaatcttttttatctactcaaccaaatttgactcgaaaagaatttatgattcagttgaagttttgtatactttgaatagaactaaaagtctaaaagtatgaataggattacattaacattaagtaagtaagaatgtagtttcatgccaatggggccatgtgatttaagaactgtggaggagttagagggacggtcaacaactctgacttgcttcccaacaagtaaacttatcaaatcaattccttttttttctactttgtgaatccattttatattcttttttccttagtatctttagttgttaaaacttatgaatattgaatagaccatcagctaatctatgaaagcagggtattattattataatatacattaacataatctatagttttaagaataataaatgttttatctagtttgatgaagataagcaccacagtaacttttatttccaaggcaaatacacttttgtcactttgtctattttgattttgaccatgtatgtagatttctagctctctcctttttttggccgatttggttgagaatttgacgacgactcgtggggtcgtgtacacattggtgactggtcttttgacacgagtcgcctctcttcttctccctacccatttccatgaaaacatgagccatagctaacttttcttcttcaattgaaacccaccacgcttcttttgttcatttttaatatttaaagcttcctcctttattgctaaaagattgaagattcgcaagtttttatagtttccgttggccttttcaggtgaagaagattcacttgccttttcttctaaagtccccaacttttcagtctatctcccattgaagctcaagctttttatgggtttctagcagaagctctgctttggatagtgacataattgtcgctacagtctcttgaaacatttgctgtaactctttagctaaggagaaaaagtcagctcctttgtggtcattctgagacaaatg

SEQ ID NO: 1426 - DNA, 3000 bp, Unknown
  misc_feature (1)..( 3000): cDNA_ID_2136298_gDNA_ID_1620400_Annot_ID_155924 3000 nt of promoter + ATG
ctccattttcatttatcataagttttaactatagctttattatgaaaattttaaataaaatccatcttttccatgtacagttttttactatttttaacaatagtttaacattaccgttacattatagttatatatattttttgtcatctcaccaatcacaaccaaacctttcacatggaattaggctatctagctaattagtcatggaaaattaggttatctagctaaaaaatcttcattcttgcaatgatagtaagaaattggaattctttatattggaatttttgtcttcccgaaaatggtgtttgtgaaaagaaaaatatgtaaagttgatcctccattctttatcacagcctgtaatctgtatgatccaataagaagatgtcacatgtaaatgtaaaataggtattcaaattgtggaaaagaaaaataggtattcaaatggggcatagttatcgaccaaaaaaaaatggggaatagtttacaagccataaaaacaattgggcctatttgtaaggccttacagctatttgaattattttataaattatcaaacattattggtgataaagcaatttacgtttttcaaaggggttgcaattataaatacccttgggcctgtttttgagcttctcgcacatatggaagttattgtgaaaatcgtacaactactaggactattttataaatactaaacactaccggggagaaagtaacagagatagaacaagtgacatagactctgagtgaaggagttgaaacgtgtatgaccagtggaagaaatgggacgcggtggtgatcggcgcccacgttgtgtatcacgaccatctctacgaacaaacatctcctcaaaacgatgtgttttgatgatgacaaggatgcagccagaggggaagaagttaacattcctgatggctcctctaagaagatggcctagaagaaagaatatgtcttcttcaagaaagctcgaaagctcttcgatattgacgttatacttgactctgatgttcctcaagaaggttccagaatcagcgttgtggtttaccgtttcgccacgaaacagccaaatcaaaatggtttgattgtttcgtgtgtgcagttgcaaaaatgtttgtcatgtctattcaagtctattcatggaaattataagcatttaagactattcagagtctacgtaaagtccaaaagaaaaaaatcaaacgaagcagcctctgaacaagggtaacttcctacccatagaattttagattcttaaatgaatgtttgcttcttttggagtttgtggtctaaactttcgttgaccgtttattgtatatcaaatggtttgtttaatttaagcgagctactagactagtagtttgtgatatagtgtatgtcaattaaggataaacacaaatgttacatttatgtgattgatattctgtttttttctaaaaattgacagaagcgttttagttgtgaacaaatttcaacgtatatgttaactaatgtttaatggtgtgaaagtttgaaatggacgagacgatgtgaggagaatatgaaaccacaattgtttagtctttcgtaactttataaagccaacattccatcaaatgatatttctcctaacacgagatcataaggaataagataaagcaaaagagatgaaggaaaaatgaatgacttccaaagttctcttcgcaaaagtctacgcttactttgattgtgtttcttttgttgtcttgtgctattagtagatggagtccaagatattgcatccatgcttaaaaagatcaagaatacaccacatgtttttgggggaaaagtatattaaagcccaaaagaatgttttggaataagtatatatatattttgatacgatttttgtttcataaatggaaagccaaaaaaatgaaactatcatactaagaagttacatattaatagacgtatcttacatcttcataaactcccaaaaaaccctaaacctaagtgaagaaaatgtgtactagtatgagatgatagatgaacatatttagataagcattaaaaacatgaaaggaaatgtttgtaacaatcaattccaaagaggggtctactacaaacatatataataaacacgagcaaccgtaatgtttgcttccacattcaaaatttcaaaaaggtcgaattattagtgtattgtttttgtttgtttggttttagactgtggatgaacaaatcaatgcattgataattgcacatacttttttcttttctcttgctactcactttacatctgtaaatattgcaataaatttcatatatatatatatatataaatttagaaaaacaccaattaatgtctccttgcagtccacatgggcttcctaaacgtcaaattttcccaattttcagaattaggtgaaacgttattatatctaaaaaacagtctagataatatgtctgccacttaaacaaaaagcagcttcctcttttgtttagttttgatgatttatcaaatgaatatcaataaaaaaaatacgaataaaatcaattaatatactttgtaatatcaattgaaacaatgcattacacattaaaaaagaaatagtaacacataaaaagaaacagtggaaagcagaaaacgagaggggtgtgtatatattactaaagaattagtttaaatgattaacaaatgagtgggatttttgcttctcccaaagcgtaatttatctgaaaatgtgtctcgtgttgagagtagttgagattcttgctgttctccaactaaacattaacttttattaaaattaaagaaaataaaaagatggatcaaaaacgagatcccctttttcgatatccgaataatgtttttctttgcttttaatgtgtctctttcttatgatttaggattccaattccttccctttccccttcttgttctctccatattctcctctttagaaagagatagagagagtcttgtttttttcctgtcttgagtgatatttttttcagagccctgagttgttgtctccatta

SEQ ID NO: 1427 - DNA, 3000 bp, Unknown
  misc_feature (1)..( 3000): cDNA_ID_2991424_gDNA_ID_1620400_Annot_ID_155918 3000 nt of promoter + ATG
tatcaactttttcttctaatatttttttttttgggttcatcaggcttcttctgcgggggcctccgtgagaggtctaaagggttgtaaaactctcaataaggatccagaccctaagaacccaatagagggtaaagaagacaggttggtttggtatttgtttttcttcattaactacagatcttatttattttatttcacttgtttcatggttgtaactccttaatttctaacatttcagggatgcagtcacttttcctggatttgtggataccgtctatcttgatgctcccaatgaattgcagtttgataatggcttgggtgataaaataatcatcaaaaacacaaagtacatttactgagacacttatatggctttctacagggtctatgtttcgttctgtgcctcatgagtactacttgtttttgaaaaatgcagttggtcggatgcggtcttgtggaacccgcatactcagatggaggcttgttacagagactttgtgtgcgtggaaaatgcaaaggtatatcagtttacacttaagtctttcctctttacaaaacttatagactcaaaagtttataactcttccttgtcatttttaattctcagcttggggatgtcaagctagagccgggacagtcttggactgcaacacaacttctcagcatcagttgaaaacattgtactttaaacttataatgtccagtggatccattttcttaagcaataaaagttttatttcctctcccaaattttaccagtagtccccacaactgcatttcccatctctgaaatgatggaaccttgtcctatctctcattacaatatccctcttgtatatcttagagatgagcttcgttactttgtgacaatctttgcatactcggagattcttcattatacgaataatggttcctggtttagtcttgattaacccgtatgtaatagccaatttctcgctatgctgatgcacaatagcctctctttcatcatcatcaactagatcaagcagcatctcttctaactctggtacgtacccgttttcctcaagtttccttctcatgattctccatttagattgaattttctctatctctgggtgtgatcggtctcccgctaaaaactcgtgtgtggtcccttccaagctaattgtactacatcctggaacttttgctactccttgttctttcatcaatcttcttgtttcagctgctttgtcccactttttatccatagcatgaatatttgccttatgaacatatcttccgccatgatatggatctattgcaattaagatttctccaatttcctctcccaattcgatgtttttgtgaattcgacaggctttgagcaacgcaccccatatcacagcatttggcttcaatggcatctcctgaatgaaacgttttgcttcatcaagcaatccagctcgaccgagtaaatcaacaatacagccataatgctcgatggtcggtttcaggttgtaatctctctccatgctgtagaatatcaactttccttcttcaactagtcctgtgtagctgcaagccgtgagaaccgcagtgaaagtgatcacatttggcttaattcccatcttttgcatctccatgaatttgctaatagcttctcttccatggccatggtatgcatatcctgaaatcaaagctgtccatgcttgcactgattttttcttaatattcttgaaaacttccaaagcttcttccatttcaccgcactttgcatacatatctataagaacacaacccaaaacagagtccattctgattcttgtcttattaagataggaatggatccatttcccttgctcgagtgctccgagctgagcacaagctgagagagcattagctagggaaacattatcaggctcaacatctgaattctgcatttcatgaaacaattgcagagcttccttgttcatgtctgcttgaacatacccagagatcatcgtagtccatgatatagcattcttttctgccattttcctgaataacgttaatgcaatatccatttttccagcttttacataacctttgatcacagagttccacgagacatcatcaggttcggggattctgtcaaagagaaggtgagctagcttgaaattcccggtcacagcatatgaattaatcagagaattcactgcatagacatcattttcatatccaagtttcgtgatctgtgcgtgaatttgcgttgtttcttcaaatgcagataggttcgaacaagctttgagaagagacggaaaagtatacgcgttatgaggagctgaagaacagagcatacgttgatacaggagaagagacctctcgggttcgtctgagcacgagaaccctctgatcattaggttccacaagaaagtatctggtcgatcaaacccgtcaaacacaatctgggcataaggcaaaaagtcggaagacgttgaagaaatgcagaaagaaagaaactttgtgattgcataagaatcctgcatcaagccagttttcagcatgcgagcgtggatttgcttcagttcttcttgctttgagcatctctggagacaagacattgtctcgtagagattatgttccaatgagaaggagcatgagatcacattcattgtagttcattcgataaaacagagagacctcttgagagataaggttcttctttggttgatgttgatgataactatattctcaattctcagtggacgccaaagtgtgtgccgtttgttcgagacttaaaaggataaagtgacgtggcgaagaattaccataatcaccataaatttacctcctaattttaccaacagcaacctgaaataacatgaaccggataataacggtccgaccgaaaattgagcacaaaaccaacaaatggggatgagtcgtcaaagactgcactctctcctcttcctctggctccggcgaaaaaccccttttcgatttcattgataaaacgcaaatcgatctctcgtgtggaagaagaagaagaacacgatg

SEQ ID NO: 1428 - DNA, 3000 bp, Unknown
  misc_feature (1)..( 3000): cDNA_ID_2136223_gDNA_ID_1620400_Annot_ID_155904 3000 nt of promoter + ATG
cccagacattatcgtcctctgccacggaggtatagtaacttctaaaatccatcattcactgtttgatatagaagttttgttgtagtaagctttttgtttttaggtccgatatcgggtccagaagaggcagagtttgtgttgaagagaacacagggttgtgtccatggcttctacggagcatcaagcatggaaaggctacctgtagaacaagcaataacaaacactgttcaaaaatacaagtccatatcgatcaagtgaagtcaaaataataagttcacttagaaacctttatctttggtgtttctagtatatttgcatgtgttgtggcctatgggtgtggatgtttccttttgttgcatggttttttttttctggtcatctttgattgcctctgcaggatcttatatgatctctagttctgtattacacgtttttgtattttaataaagttcatagtgctcaactcttatcatttcttttcaaatcttgtcattcacctaatgacttttgtttatatggttagacaccataatttgcagttttcaaataaacaaaaacattgtggaacgaaatttcccactataaagacttatagaagcataagattcatagaccaaacaattcaaacagagcagcggtgaaaacaaaatacaaaaaggctcggaggtctactatgagaaaagcttcgagatcaatctgaatcagagtcgacattcgctgaagacctaacggaccgacgtatgctttcttgatactcgtaatcttcctcatcttcctcttttctcttttcactaagcattcctgtgaaaaaaccttaattcaacgaccaaagctgtaaactataagtaccaaaagcccagaatgtgagacattgatgctacctttcttgaccagaagattctccagcttcgtcgtggagaaatcgtccttggcacctagatcttgaaacccgacaagcctatccatcgcgattcccttgctgaagaataatgatttcaacattcgtgttttcgttagtttaaacacataaagacctaactgcgctaagaaataatgagtgaaaaatgtaggagtgacctaaaaaggataacacacggcaaagtcttgattgcaagcttggtgacgaagaagggagcgttctacatgaagtgtctcccaagtattagaagatggcaaaatggagtttcaaagaagagttaaggaagtggattactgacctcagcgtccatcttaatgaactttgtgtccacatgtctaggagcaagggtcttcaaatgcttgtccattatcctagaatgttcaaacgcataagcttcaaattctgaatattcacatatcaaaaaagtgatgcgagggagagaagggtatttcatcttacttgcagcgatagaactccttgtggtagaagtgacatataactttttcactccttgtgacttctcccaagaagtcgccttcgctaacttctcggtattcaccatgtccttgtcttttgaatgcttctctcttttccacttctctctgtccagacacatcttgggattagatcatagtccatactaatgaagacaaaagtgttaaccaaatatagataatgagagaatgtggggggtgaagttgaaccctgagtgctgcaatcctatctgcgtgcaacttttctagctctggatcctacagaacaagagcaagtcagtctcccatagagacagaagagaaacataacatttcattgtacagattataaaagaacaattcaaagagagcccccattgaacttacatccatcaattcgtcaagatcaacttcctcgttgacaggtcttgatccttgtgccttttcatttgcaagaacttcctgcacaacaaaaatacggaaatgtttttgatccaagaacatcaaactctaattgcaattgtaaccaacaaaaaaacacttaaaattcgctatacactatcaaatttcctgacacgtagacctcatgtcagcacaaatagaatctagcctatctctgttaattgggttaccaaacaacatgagattgattatgtggaaaaccaagcacattatttaccctttgaaaatacgcgaaatcaagatccaagaagaatttatggagaacagcttcgaagtacgaaataaacaatgaagattaaattacctttttataatctctagcagctgccgccaatacattcccgaatgccagattcgagagggtcgacttcaccgtatccggatccatctctttaccaaccaactaatccaactcagaaaattttaaaatctcaatcaaaaatccctctaagatagccagagaagagattgtaaacaaggatttgaaatctggtgcagagaggagaaactccccgacaatgaacaccaacgatctaaacgcggcgtttggtaaaagttgagtaaattttgttagggcttagttttagtccatgggctaattagtaagtgatttacggcccacacatgagcccaaatgtttcagacccagccaagtttcttcaaattcacccaatcaacgacgatgtacgtgtgtatgaaaatcattaacacgacgcatcgctttcgaggaggagcattacgtgtcctgttagctacgataatgttagtaccgccacaaagaaaaggatagatattttgctttccagcaccctgtcatgggattgatatgaacacgtacttggtatcgacatgaaagctcaaaaataaattcaatccgattcctttagtgatatcagaagttcattttaaatacgaacacgtatggcgaaacaccacgccgacattttctgctgctgccacgcgtcactttccaaatattgattcattaaactaatagttgatccatatccgaaaccggactataaaactatcttcaatgcgttaacgaatcttcatcgatcaaactcatcaaagtctaatatcacaaagaaagagtttttttaactagcttagctcaaagtgtttgcttaagacaagaagaacatg

SEQ ID NO: 1429 - DNA, 3000 bp, Unknown
  misc_feature (1)..( 3000): cDNA_ID_2136227_gDNA_ID_1620400_Annot_ID_155905 3000 nt of promoter + ATG
gaaaccacgggctgagtttctgttagggtttgatcgtttctcgctgattatggttccactgctgtccaatagtatggaagcatcacatccctgcagcacaaatatatatcacaaggataaaaatatattaagattggaaaatttccgtatgtttttaaacgttacgaaattttgctaagcttgagaccttgacgaaacagtcgtggaaatggagtctgagcaaggaggcaggcatgcgaggatcatgttcgaatgctttagcgacaatggactgaacaatctcttgagctttaggacacgattggtcataaaactgaggaaagagatagccgccacttccataggctttggaacacaaacaaaaaggagaaaatgcaatgagcgagagagctgcaataaggatgttcaatgacttggccattttttggggggattctttctcttgatgactcgttgtatataactcggttacttgtacttggtgattgtgtgtgatgccaagggttgcatttatagagtagactttgtggacaattgagaaagacgttggagttggtatctaattttagctatatattggattagatggatacattgatatttgaattggtatgaatacaagatttgttagaattcttttcgtatatttctcatgtatgatcactttatgcacctcatatcaatagattattcgcagttgttgtgtgggatttttgttccatgcattagcaacacttaaagcacaattttgcttttaatagtcaacgcggagaagatttctatggggatttatgttttattaaattgagagatcagcctgaagatgattaagctacgcaaaacaattacatccatagggttttacttggttgaccgttgaacaaatagtcaaaaaaaaatgctaattattctgcaagcaaactaattaacattgtgtgcttaacaaatagatacggttgatagagtacgccaaagacataataaacgctagataatgacaaaatcattgagaaacagcttcaactgctctccttcacaaaaccaaaccaactatgtccttttcttttcgtgcagtaatggcaaagaagaagaagtcgtcattttaaagaaatatcaccggacgatgtattgagactttttcaatgtcttttgatcattttctcacgtcttttacctacgttcagaaaatacagatcactaataaaatctctccatttcataggcccaagcatcaaattatgattcggcccaaggttaaacccagcaaaatggggaatacgagttcgaaaacaggcctaatcccatcttaacatgtacgtctacactctactacactaattgtagtgcgttaacggagttcacagtggacgagaggtgtaacacaaactaagcagaagaaagtagatttatatagatgtgaaattacataacacaaacatctcagaacataaaaagagccagatgctcattacacactcatgtaagtaaacaacacacatcgcaggacgtacatacataaaaagcacaatacaacgaccgaatgcgactgcgttacaaaccctcattatttttatttaatatgtatacacgattgttcgaagcttaacggccaccaccgggaagcttttccttgatcttgtccatcatccccttcttctcgtggtgctcaccaccgtagccaccagcatcatatccggatcccatgccgcccatcgcttgagcttgaccagactgatcatgatgacctggcaacttctccttgatcttttgtgttattcccttcttcctcctccctccttgtccatcatcctcctgttatacatataacattcgaattacgcttcacatactaaactaaaacatcataaatcttctttatacacttgatacgtaccgagctagagctggatccagatccggagcggtgaagcattcctcccaagccaccaccactttccttgtggagttgctcttggccgtggtgcctagctcctccgccagttccaaagccttcagtcccggtcccggttccgtatccttggccaccggttccgtacccttggccacctgatccgtacccttggccacctgttccgtatccttggccacctgtagctcctccaccaccaccagttccgtatcctcctcctcccatcggatttccgtactcgtcatactgctgctggatcgggtttccgtactcgtcagtggcctgacctcctggacggttctggtaagacgccatgttcttcttgtcttaagcaaacactttgagctaagctagttaaaaaaactctttctttgtgatattagactttgatgagtttgatcgatgaagattcgttaacgcattgaagatagttttatagtccggtttcggatatggatcaactattagtttaatgaatcaatatttggaaagtgacgcgtggcagcagcagaaaatgtcggcgtggtgtttcgccatacgtgttcgtatttaaaatgaacttctgatatcactaaaggaatcggattgaatttatttttgagctttcatgtcgataccaagtacgtgttcatatcaatcccatgacagggtgctggaaagcaaaatatctatccttttctttgtggcggtactaacattatcgtagctaacaggacacgtaatgctcctcctcgaaagcgatgcgtcgtgttaatgattttcatacacacgtacatcgtcgttgattgggtgaatttgaagaaacttggctgggtctgaaacatttgggctcatgtgtgggccgtaaatcacttactaattagcccatggactaaaactaagccctaacaaaatttactcaacttttaccaaacgccgcgtttagatcgttggtgttcattgtcggggagtttctcctctctgcaccagatttcaaatccttgtttacaatctcttctctggctatcttagagggatttttgattgagattttaaaattttctgagttggattagttggttggtaaagag

SEQ ID NO: 1430 - DNA, 3000 bp, Unknown
  misc_feature (1)..( 3000): cDNA_ID_2136144_gDNA_ID_1620401_Annot_ID_155953 3000 nt of promoter + ATG
ttgtggaccctcgacaacgttagaaaacatcttctgctagatgtttgatggcctttaatagctaagtgatttatagagaacgacatataatgggctttagtttgggccttttaaaagccatagtatgggcttatttgctttgtccaagttcagtattgggtttataaggaaactttttatcgtgaaaaatagagtaatttatattcacaagcagatttccatttcgagttattttatttaaaaaggctgtgattactgataagactgatattattgagtgaaggaagtggtgtgggattctaaaattgctttgaacgttttgaataatcctgtcataatgattatgacaacactagctttatcatgattaccacctcaatcaatgtttaattaaccagataataaacgaaaaaattaacgaataagaagatggcagtgtattaaaatccaagcattgacccatccgacccatgatcttctcggatttgtcggtatcattacatgctgctaaatagtcttctctaacgttgattttgtctagccacatcaagaaagaaaaaactatattcaaaagtttaaatgttagggaaaccatcacataacatgcatttttaccaaaaaaatagttttgaaaaatgaaatattagttgaagttgcagagattcgaattaaaaccgcgagcctcttgttaaaaaataaatccctcaacttcaaaactgtagtcataccataattctggcttgtgatctcaatagaaatagtatcaaagagtgacaataatgagtaatgacagaaaatgagtacaaaagtgttgaagaaaaaaaaaaaagtgttgaagaatattatttatcttgagctttaagtatatttataacacaagcgttgcagatttatgtttacgtggaatagaagaaaacttttttccctcaagatttttaattttttgcgtagaggaatatttgtttcttcttcttatatattgacaataatgtacatgctatttctaaccaagagaaatacagctagaagttaaaaataaacaaaatataccaacttgaaaaataagaatgaaaattattatttaggttttagattgaacctcttgattttgtatagtcactaatgtttctgcattattttgttagtaaaaggataagatattaaataatatgaggaaaagaaatggacatccccggcaaatgaaaatggaaaaaggtataataaagatgaaaaaaagacaatgataaagctattttggtttaaaacaaattaaaagaaaaaagcaaaacgctagagagcgtgtggttgaccccttcgttctacacttgtcgattaccatcaccattaccattaccattaatctcttaccattaataaacataaacacgcacaatgagagtcggtggatgaatagatcaatttatttttcttttgcataatttaaaaaaaaaaaactaaaacaatagaaagaataaaagacaaaaaaagaaagaaagaaagataaaagatagagatgtaacgttaagcccgttgtgtcactttattccaaagttgcatgtatgggttgggtcttcttctttttttcttccttttgtattcactactaaatatatttttaatagattcgctataaacttgatttatacttattacctatttcatgtaaaatatttcttcttgtctaccaaaattcgttgttagaatagtaaactaaatctttcaagttttaaatatcaagcagtatcaagcagagcagtacaatggagacactttcttatattaataatatacttgcttgtgacatagctaaaaacaaccgacacttttacattttgttttcaactcgagttattgtttgttagtattaaaaaacaaactttaaatagtcttttgaagtttggaattgttggcccatattatgttgtaggtaatatggaatcagccggtacactggaccacagaggattgtctttccgtctacagtctacagaatcagccggactagttttgtaacttttgtttaaaagagctatttattatttgtaatcttagtttttaagttttaactaaaagaatgaagaaaatgtagacaaaatcgaaaagtcgatggtggaggtatgtacgtgtctttttcctttgtccgtcttgaaaccaacgaaacaaaatcggaaattgtctacgttaaaggacaatcacattcttagttaattaatactccataccaagggacatttacgtctttaagcaccaaaaccatagtattggattggcgaaaatttccaaatttccaaagcaacaagaccatgagagtccatccataatcatttttattataaacttaatagtcaatttccatgaagctggacttgaatagttaggctgtctattcttcgtttttatgtcttttacgtgaacaactcgtaattctttatctgtttttctgaacatatgtttgttgtcgcacacgtataatacaattatacaaatacatttgtttttagtctaaaaccatctacattgggatattttataagagttttttacaattaaaaaaataaaaataataaaaatgaaagaaagaaagtgaataattaaattataatataatattaatattttttttgtttgaaaaactttgtgggtttctgtcctaaattatttttttaatcattttattaagtactggtaattactaattaacggatagtttaaaataagcagattaaacgatcccggaatgctgacgtcagcatcataaatctcagatctcgatacgaaacgaatttctcactgcagcagctattactttccctttttcaccttttttttcctttctttttctttcttttttccatttcttaattttttcttcccattgaagattactctacgatctgacgaacaaggcaaccaaaaaaagggcaaagaacagagagagagcaaaaagcagaagaagatgaatttagacgagaattgtaaaatagtttatcacgattcgcc

SEQ ID NO: 1431 - DNA, 3000 bp, Unknown
  misc_feature (1)..( 3000): cDNA_ID_3062357_gDNA_ID_1620401_Annot_ID_155967 3000 nt of promoter + ATG
gatctttttgaggagcatcaagactggcttactcaagataatcttcataagctctcggatcatctcattgagtgtgattatgtaagtgaaccaacggtctcaaacctctcaaagtcattgaaatctcgatgtgggtcttcttcttcttcagcacaaccattgttagccgtagatgtaacaactcaaagtcagggcgaaaaaccggaggaagatttgcttctgcaagatacaacaatggaagatgataatagtgctaatggtgaagcttgggaatttacagagactgaactcgaaacgttgggtctagaagaactcgagattgatgatgatgaagaatctagcgactctgattcactttcagtttatgacattctgaaagaatgggaagagagtagtaagaaagaatgaaaatgcttgtaaatttcctcaaaatctttagtagaacaaaatctcaatttttttgcttactcatctcacttcaaaatagtttcaaggttactaaacagatcatccacatacaataaaagatcagttatacagaatctcagattcggagaaagaacatacatatgatcaaactgcggatttacactgttactaaccaaaaaaagagagcagataggtttggaaacttaaaaaactctgcaggtgatgagatatcgcctgattcaagatcggcactcttaagaaaccagtaaacccactaagtatatatattttatggcttgctttgttacagaacttccccatgatggctatttctttctgtttcaccaaggatgattacggatcctgaacttcaaagctttcatggctgcctttgcaaatatctgagcagcttcagcttctgcttctgctctttctgcctcttttgctgcttgttcagcctctgtgatagcaaattctgcctctgcaactgctcttgctgcagcctctgcagcttcttgagctgtcatgccttttatcatatataattcaccgtctactcggaatttagtgagactgttggcaccgttctcctcgggttttgttgggtctttcttgttgtttccttccagaaagagttgaggagccttctgtcttgcacctgcgggaataaaattagaagaaaacctgtacttgtgctttatctgaaagtgagaaatcaccaagtaagtatttttgaaaattctgagagtaatgaagtgttagtgatcatgaatcttgaatcaaaagttgtgtgtttaccttaactaatgttccattcgatgataaatgctttaatcgtactgcgacatgccttttcatattcggtggagtcttgaaattctcctgaaatttaacagctactaagtaagtatgcaacaaaccccaaccaaacatgtaatcccaatggtagaaatacctctatatacagaaagattgatgttctgtcagaaccgcgtagttccctcaagttggtaattgcctcaaagatgatcttatccaaactacaaaaacagacaatagcgcaagatcaaatctttatgaactcaagaaaatcgttatgtggtgcataagtcagggaaccaaaccttgtaattgatctcttagaagcacaagtgcgtggtgatccaccaccagaacctccgggggaagttggttttgcacgttcatcatcattagtcaaagccacaatggtaagagctgtgttgttatcatcctgtttagtacctggtggagtcctcttaagcgcaagtttagccttcttccttgaaccccataaagctgtcacgcttatatttctccatttgtcctgttatgccttgaactatcaagattagtccgaaacacgcgatcacaacctccaaaaagcatattatattgtattaccttaagatcaacattagagcgagacttaaggattaaactaaactcagtatccgagagtatggtacgccacttcccagtcccatgcttaagaactccagctttaagagctgcttcttcttccggtgtccacttctgctttggtgcacccatccacagttatcaatatttgaatttcttcttttctctgccaatagatgtgaacgctaacattagaatctgttaaatcgtacgaaacttaaccacatcaaagccattgttgaacatttcttatccaatacaaaattttggtcatctaaatccagcagatacacaaagccacaacataaaaatgtaactacacaaatccaaagaaattagatacgccccaaagctcaattcaacaaaaaaatgagtgattcgagcaatctcgaaccaaaaaaagaggatcaaagcccattaacaacgtcgcaaatcaacaggaatttggaaatacagccatcaatctaaagcgatagctaaattatcaaccaaattcaaatggggcgatcgtagaaaattaaaaacaaaaatggaaaattcagagaaggaagcagaaaggaggaaggaggagaagaagcatgccagatcaaacgaaaccaaaggagagttttcgagagagagacttgatgatgaaagctaattccttgtatagatgtgtcatagatcaaatgtgattcgctgaaacgaacgaagaagaagaagaccagagaggctagcataaggaagaagaatatccatagaaacgagaaacaaacttgagcttttcttttgtattcaagctaaggaagatgtaaccctatatttctccacattcacaaatttgcctcaagtttatcaaattacacaataaaacctaccaactaaatgaataggatcaagctgaataaaatatactagtactattttttaaaaataatgtatctataaaatttatcgttgttaaatctcacagatagtttaggggctattaaagatttttcatataatagtaagaccgaaagcgtaatttataaaattttgatggctagattgaaatatgtgttttttttttctttctaaaatctacagaagtagaagaaaccaaagcgaaatcaaaaagctcagcaattttccagatttctctaattgacg

SEQ ID NO: 1432 - DNA, 478 bp, Unknown
  misc_feature (1)..( 478): cDNA_ID_2136202_gDNA_ID_1620401_Annot_ID_155973 3000 nt of promoter + ATG
cttgtaaaagaagaaaagtatttcagttgttggatgcgcgggaggggaaaatagtgtactgctgatgggctctacgcttgggcttttatcttcttggcccagtattgttgagttgttgtttgtcttgttgtgggccttattgtggcccaaatagtgggccgagtaacatgtgcaactttatctttgatcacataaagatagagttggtgtttagtagctgctactcccaccaccattgacattgttttatgtttctccgcatagccaagttgtgaggttatctcttctcgcaagataaaaggctaaagaagtttttgcttatcaatacacactctacggacagtttacggtgtaagcgacaacaaaccagtttcatgagcatcgtcttccccatatgaagctagttcttcttcatcctcacttctttcggcaagctataaataagtctaaagatgttgtactaatctgtggagccatg

SEQ ID NO: 1433 - DNA, 3000 bp, Unknown
  misc_feature (1)..( 3000): cDNA_ID_2136195_gDNA_ID_1620401_Annot_ID_155971 3000 nt of promoter + ATG
ccccatatgaagctagttcttcttcatcctcacttctttcggcaagctataaataagtctaaagatgttgtactaatctgtggagccatgccggatatgacgaagttacaccatcaccgcctacttgatctctccattctagaaaatctttttgtgaacagagggaatcataagaacagagtgaagtgtgttttctcgtccatgttttgatgtcttatatgggcgtttcaatggactttggtgaagtgcagatagtgagagtctaaaatgctttttgttttgtctattttgctcaacatctggtgcctccatttgaatctttattggaaagtggctttgttggctgggagacttctacatttttttggctgctgtgggatactttttcatttgtggcttctaaaaagagaagagaagatgtgtttatcaaacacttggggttctacgttggggtcgcaacatgtcttaggtggaaggataatgtgttgaattgtaacgagatcaacacttgtggacttttcggaaatcatactattcacgagaacagtcgctttttggttgtaatgagttctttcgacgccgtaccttttgtcggtgacttgtcaaaggtccacattttgcaccaccaccaggatcttgtcaacatcaagtcagcattgagtggagcttctaaatgggtaaacagaactgttcgtaacccacaatcggatttctgttacatgtccacaatatttatgtgttggagtgacgttgcttacacaacaagcaagctcttgacatgtgaacatgaatgcagtcaatgttgtgttcatgtgaaagttacttgatttcagcttggatatgcaggcaacaattaaatggagaggaaagatctgcgaggtgatgagtttatccaaaaagacagaggatatcttggtcacatgtgttcaaggaatcttggaattcatttaacaaagtttttatatggaggaagctttagcaagtcgctcttgaggctgaaaaggaaacgccataaagttcttaagagaaagtattatgaattggtggacaaaggatgtcttcaaagatttcagatttgggtcgaatctttctaacccagaagggctgatgcagcgtatctcaaagacgaacgtgttgttcgtcccgtttgggctggctcgttgtttgggttttgtttctcatgggcttcatgtttatttagccttttagtacttgtattcgtttgcttctcttttatgttagtttttttttttatctttctcttatttgaaaagacgtaatttagtattgtaattagttttgattattgattaaagagttttaaagagtgttttgtgtaaagcctataaaaaaggactcctaaccctaagagcttgtgttcaagccctgtaaggaggacttgcaaaaccttgtcgatatcgatcccttagaatcgatctcgatcttatcatttattgcttcttcgtcaagttttgacgttttagcaagatctattcgtgaatccgacttttcctgcaatcatggaataagaatgtgtttttttttaaaatgtgtttattaaagaaagaaggaaaaaaaaagttttagttacatttgacgtgaactctttgacttgtgtgggtgcaatactatatcaaaaaaattgggagtagtaatacagttaccactaaagtttagggacataatgaacaaaaaaaaaaaaaaaagttacacatcttatgaattagacggagatttcgctgccaagtgccgacgatgcgacggcgagaagaaaagcgtcgagaatttcacgaagctcttcttcaaacactgtatcctccttcatcgccaccttcttctccttcctattctccgcctccggtattttctcaatctctatttgtgtcaatttgttagttctcgattgggttatgaatcgataaatgttcccgccattgtttcaggtggaggttgttgataacgaaccattcgatgtgtcactcataaacccaggtacgattaatgtaatcttaacaagttatttacactttggaagtcacattcaaatttgtttattattcagaggattacttgaaaatcgattcatctaatcacggagaagacaaagaaatcggagacgaattggggattgcagagaaacagagtcgagcgcagagaaagaggttaaggaagaagatgctcaaagaggaagcagctcgacggaagaaagtcatcggacctttacttccgactgaaatgcttcagacccatgatgaaagaagtgtcggagatgcttgtgggagcaatgttgaagaagaagattctgacggtggcgaagaagaggttgatgggagcattagcaacatatgctcacaacttgttcgaccaaatgcccaagagaagaaagaaggtacacacagcttttgacttttttgacgatatccttagtttcaaatcttttgggaaaaattcgtactttatctaactagatttcataacacatgtacgtattcagatcaagggtttgactttaatcaaaatctactagctcatcaagttgttgtctcattgttggtcctgtgcaaattactcaaacgttctcttttgtgtattaattacattacgcgtctgactctttattttttgtttggtaggactaatcggtgacaatgataagacgagaaaagtcaagaagagaagaaatgctaagaaactggccaaagagagttctaagaatatccaggatggatccaatgcaatccctgaaattcctaattagggttcaaattatcacagacctttatctaagagttaattacttcatctttaataattcaagggtatattactaaatttataattctcgtctataagatttgtgagttccttttatgcccttgttaagaggatttaactcttacatcgtcattgccattgtgtagcttttctctaaaccctaaaaccttaactttttgctcttctccctccgcctcaatcgcacgaagacgataatcgaatatg

SEQ ID NO: 1434 - DNA, 3000 bp, Unknown
  misc_feature (1)..( 3000): cDNA_ID_1023572_gDNA_ID_1620401_Annot_ID_155965 3000 nt of promoter + ATG
cctccggccggttatcctccagccggttatccaccgccaggatatgctcagggataccctgcacaaggttatcctccgccgcagtactctcaagctccgcagcagaagcaaaacgccggtatgcttgaaggatggtacgttcttgatcccatcttttctactttatattaactttattttggtttcttgttttgctttgtatttaggttttagtggaataatactgtattagttaatatatgtctttgctctgttcataaatacgtcacagtttggctgcgctctgttgttgctgtctcttggatgcatgtttctgatcggaggataattatatacgttgcctcagtcaacttttatttcctcatatatgttatgtaatgttcaacaatctttcttctgttgttatcttctttcaattcgaattttggtatcttatgttttattgactccgaccataattatctctctctttcataatccaatcacacgaattcgaaataaaccagtaaagaagtgatcagaaatcttgatgaaatatcaaaggagtgtgtttcatcatcatcatcatattattgtaataagtaaacatagccatggataatggttcttttcaaccaaaaagctcacagatgctaaaataacaaagaaacatgagaattaatatcaaatgaggtttcttcttttgctcgagaagaattggaagaaggtgtaacatcagttttctggttgaggattgcctttccacttgaagttgtccgagtaagacttgacctgcagttagatgttagatgatgaacaatcatggggttaggttaaaacttcaatctaaagaatgttctaccaaataaatcaaaggaatgaaagagactatcgctcgtcaaactagtagctaaatcttaaactagaggcaccaaaccatttctgatgaagcaatatgagttaagttaaagaatatcctatctatttaacacaacattcaagggtcgttccagtgaatctccagctttagggttaaacacctcatatgagtagagctcgtaagtcataatgcggcattagcaaaaagatagttactaaccttcaataatggtgtgttgggcttcttgacctgcaatgatttagatgtaagtttttcagtactctgaattctatattaagggatcttaaaacagaaccatcacaatggtgatcgaaaaaaaaaaaaaacagaaccatcacattctcataaaatgtgagtgaatgcgaccagaaaaaaaaatgagctaaaaacgaagaaggaaacaacgtaccttataatcccaaccatgacgctcagcaaaagacttagcagcttcttcagaatcaaaagcaagagcagagtcaccaacattagcataggggtcacctgtagaagtccatcccatcaacggattctcccacctagaaacatatgaatgccatagataagtgatgtcaatcgaaatctaatcaacaagtgatggactagtactagtcacaagcagaagacttaagttttgaaaagataggaattttaaggataagaatcatattaggacataaaatgtgaggaaaagaggattatcttaatcaaaaagtagcatactttaaggtggagacgaagttaatcttccattttccgagttttccagatcctgactgggtagctgttctagcaggtgagtatattatcacctgttaatttccaaattcaatactcttagcactattcgattgaccaaaatcaaatcaagaacacgatgtagctcaattaagacgattctctgatcacgaaccctaattttctaaactgaattcgtaagaaatcgaatgcttatttaccttgcgagaaagatgctcctctgggattccggagaccttaccgatctcaccacgcttgtaatccgactcaaccaccgcgtcagtagcgaaaggtcgagcaacacgccggagcgtcgccgctatacggatagtcctttgagtagtagcacaaagcgccatcgtcaattagagaaatctggaaaattgctgagctttttgatttcgctttggtttcttctacttctgtagattttagaaagaaaaaaaaaacacatatttcaatctagccatcaaaattttataaattacgctttcggtcttactattatatgaaaaatctttaatagcccctaaactatctgtgagatttaacaacgataaattttatagatacattatttttaaaaaatagtactagtatattttattcagcttgatcctattcatttagttggtaggttttattgtgtaatttgataaacttgaggcaaatttgtgaatgtggagaaatatagggttacatcttccttagcttgaatacaaaagaaaagctcaagtttgtttctcgtttctatggatattcttcttccttatgctagcctctctggtcttcttcttcttcgttcgtttcagcgaatcacatttgatctatgacacatctatacaaggaattagctttcatcatcaagtctctctctcgaaaactctcctttggtttcgtttgatctggcatgcttcttctcctccttcctcctttctgcttccttctctgaattttccatttttgtttttaattttctacgatcgccccatttgaatttggttgataatttagctatcgctttagattgatggctgtatttccaaattcctgttgatttgcgacgttgttaatgggctttgatcctctttttttggttcgagattgctcgaatcactcatttttttgttgaattgagctttggggcgtatctaatttctttggatttgtgtagttacatttttatgttgtggctttgtgtatctgctggatttagatgaccaaaattttgtattggataagaaatgttcaacaatggctttgatgtggttaagtttcgtacgatttaacagattctaatgttagcgttcacatctattggcagagaaaagaagaaattcaaatattgataactgtggatg

SEQ ID NO: 1435 - DNA, 3000 bp, Unknown
  misc_feature (1)..( 3000): cDNA_ID_2136159_gDNA_ID_1620401_Annot_ID_155960 3000 nt of promoter + ATG
tacgaatcggcatggatctgacgttgtgtttgttacggagatccttggataacggcgagctcatgagaacgcgcctcacgcttgaaggagctgtgaagtgagccttcctgttcttccggcgagaagagctcacacgcggattgaacttcatcgccgctgaatttgtgaagaaattagggtttttttgtgctgaagaggtggagcgttgtgtgcatgagtttatatatgagatattaaaagttacttaaacgctgccgtttctcacagtgagaattagggttttgaaggtttctgggtcagatgggctttgataagttttatatgggctttcaaaccattaaaatggaccaatctaaccttgagaaatataatgggcttattagattgttgtcaacttctaagttaagtgttgtactcaattctaaaaccaaacgcattaaagagtttgtattctttttaattttgttctctccaaaacaatgtgttgggttcttgagaagactgactgttattgattattttttttgtataattaaaaaataaggctgcttgaaatagtaatggttacaatcttgaatatttggttatttggttacaatcttgaataaggctttttgtatatttggttacaatcttgaatataaaatatatctttcaatgaaaaaaaaaataaaaaaaatagtaatggttactgactaagttggagataaggaaatcatcaaatcataaaagatccatttaggttagaaataaatacacacttattgaatatcatttgataaggcttatctcaaactaataaaacaagaatcgagattcgagaatctcactaaacaaatagattaggtgaatccgacaaaagccaatgatgccgtcacgctcataaaactcggattccacaagcccaaaatagacaacatgttttattttattatttgtttaccgacttaaaatattaatttaagatcgttaaaaaacaaactctacaagtttttgatttcagagtccaccgttgagcctgttcaattaaatcgttgaatctcgcggtgcgttttactttgattctttcgaattttttttatatggatgttgccgcgatggcgagatgtgtgggaaggtgctacgtttcgccggcgttcggtgagtctgaatcgcaccggttatcggagcggcggtttctgaaattgtctagctccacgaattcggatcccgccggtagtaaaagtttgaagcttcgcgggaaaattcatcggagaatgagctacttccgtccgatcatggcaaaagatgaatccatttcatcgcggtccggtaataatcacgtaattccgttctggttcatctctaatcctagtttgggttcctatgattcgtttttaacatttgggttcctgagaccagaaatttccatagttttagcataaagtttggaccttagtagacagatcaatgatgtatatctgaatagatctaatctcagataatctaaccaggtgaaacgaagcaaatcaatggaaagcaaaagaacattgtctggcatgattgtcccgttactaaatccgacaggcaagaattaattaagcaaaagggatgtgtgatttggattactggcttaagtggttcaggtttggtcctttgtttctgaattgatctctaactacatcttgttatgtttctactggattctttcaaatattctcgtattttttcaggtaaaagtagtctggcatgtgctcttagtcgagctttgcacaatcgtggaaagctttcgtatatacttgatggtgacaatgttcgacatggtttaaacagcgatcttagtttcgaagcagatgatcgagctgaaaacattcgaagagttggtgaagtggctaaactgtttgcagattctggtattatctgtattgcaagtttaatatctccttaccggatagaacgagctgcctgccgtgcattattaccacaaggagatttcattgaggtttctccaagttcatgaatttgaatcccagtctcaacatcaatctgactttctcttggttctcttgataggtatttatggatgtgccactccatgtttgtgaagctagagatccaaagggcttatacaaacgtgcacgcgctggtaaaatcaaaggtaactttgctttttctctgcatctgttttcaacttaacccatgttctactgattttcattaattatataaccttcttgatctatccatttgattatatgtaaatatattgttccccaaaacatttcttctccaggttttacaggagtagatgatccatatgaagcgcctttggattgcgaggttcatataatatccaatttttgttatataagttggaatctagctcatctccgaacttgaatctaatgttgtgtttccgactactctttgcagattgtaatacaaaacagtagagacaaggggctttcttcttcatcttcatcttcatcttcaccttcatcttcgtcttcttctctgtgtgaaatggcagatattgttgtgtcgtacttggaccaaaatggatacctgaagaaacactccacaaaatcacgtaattgtatgtaaatgtaatattaatatcattgttgtaacgtttcttaaacctattttacctatggacgattaaattgtgaaaacataaatgtaattcacaatctgcaaagagttggtaagaaaaacttgtttgattgattgagagaatgagattattatatggccgccaagttggcgccaactctccggctttttaagtaatcgagcatttgggcctaaaaatatacggcccagtgttaacaaaacaggcctttttaatatccgggtcggactctattaaggccggatctggttctacggcggcgactcctcctcctgactataacaaaaacaaaacgcggtggggagggcggtagtatcagacagatcgaaaatcgcaacggttaagattccagctactgaaatctatcaacgtcgaagaagtgaacg

SEQ ID NO: 1436 - DNA, 3000 bp, Unknown
  misc_feature (1)..( 3000): cDNA_ID_2136163_gDNA_ID_1620401_Annot_ID_155961 3000 nt of promoter + ATG
gagaacacagccacatacgcagaagaaagacagataaagaatcagacagagaacatagacaaatcttgtttttcacaggataaaagaaaaaagctgtgtcttcttccacaatcaccatcatcatcatcaaatgaccaaaaacacaagaaagatcgacaactgcagagagttgacttctctccttttggggtaaagtttaattcgatgatttggagtgctttacaagccaatcaatgacttgatcgatgttggtagagttcttgcaagatatcatgaagcaacagacttctctatctgtcagtgacttgagacccctgtggcaaacaatggaaaataaaacattattagaatcaaagtaaaaaatgccaagtccattgtcgtgttttaggttttaggcttacatttcatcggttagggcttctttggacaaagctccaggcttgtcgattttgttcccaaggactaggagagggataccattaagcgacgtcttgctcaacaaatcatggagttcactcttcgagacactgaggttatcaggatcagcagcatcaactacatacctgaaagcagaatcagagtcagagagttttaatcatctgaaacctaaataaagatagtacgaaaactaatttcaagagagatttacacaatcgcggaaacagaacggcagtaacgttcccacatgctgcggaacctaggttgaccaccgagatcccaaagcttgatcgtgacacttccttttgtcactttcctcatgttgaaaccaacctaagaaagagtaaacatcctttttacgattagtccaagagcaagcaaatacttcgccacctaaaagtagtataacacaccgtagggatcatgtcttcactgtatccaccggtctggacaaggaaatgcaaaaggaagccatcaacgagtcatttagagaaaaaaagagggaacgatttttggggaagcatactacttactgcaacaacgttaacaagtgatgtctttcctgcattttgaagtcctatcaatgaaagctccatttcttgcttgaagaagaggctgcaataaggcattgtgagactatgcatatcgggcaaatgcgaagcaagcaacttttttttgggaaactaagttcttgctctcacaatcttcatctactgattaaccatctatatccaacatggaatctcacaattgtattgtctaaacttaaaacttgataatcaaaactaaagggtagatttgatgatcaatcaatagctgaaaaagagagagagttgttgctttctttagccagagacttatgtgatcgtatatgcattaatacatcaggaatcaaaattagctaaaatccctaattttgttgtaaacaaaaccaaattcggcggaaatagttggatttccccaatcattgaactcaaaataccaagagaaacaatccaaatcaaaatcccacgaacccagacaaaaaatttgaagtagaagacatagaaactgacctgcgaagccaattgagaagagcatcccacaaacccataatttacgatttccgacaaacacagagattcgtagaaacagagacaacagacagagatcggtctgctacaaattctcctccaaggatctatatcggcttattaaaagggaaaggttccttttctcaatccttgttccgctgctgatattattgttatctcattgaagatttttttttcgtttgtcaaaatcgaaaacacggcaagagagccggcgaattaaagttacaaaatggctcagtaaatctgaaccgtctatatttatgtaggtcgtgagattaacggtctagatctgattataattcgttttgtagggaaactgaagctgtgtctgacagagcgaaaataatggagctttgctatgtattgtagttattattaaagaaaaaacaaaaaactagccactcagaaaaaagattcgatgggacagagagaagttcggaagaaagaatttagatttgataagaaaacaaaagaatgtgtttggaaggcgcgtgatgaccactgaccaatgattcgctgattggaaactgtactaatacgagctgtttgggtcaataatggagaatcattaggatgtgtttgattatgggcttcttaagcccagatctgaaccgtcaatgtttatgtaggtccgtaaatatattgcctttgtggattattagttggtttttcgattttttttatctctatagatacttaataatttttttagactgaatagttggcgggttgagccaagaccgtgcagtagtgcaacgcatggtcgactcgtgaaagcccagatagcaagctatcataatgggctttctcccttaaaaaatagagttaatatcgtgtgggccgatggcccacatatcagatattatactgataagaacagatactacacttgatcttagccaaaaggccgagaaaggtatgaattgttacgatccatggccgcgttttttatactactcctcttctctttcacgcttcttttgttagcgatgtgggactctatgtatgagtgaacaagactaaacaaaagaaaccctcttccgcttttagcgggttttgacacacggcatgattgatgatagtcttaaatcggttaacatactttgatcttttcccacttcttttaaccttttctggaaaaaaaatataacccagtgaaaagaagagctgagtcaaataaaaatccagagaaaacggctcaagatacgttactctaatcactctcctttcttctatttaacaaaaagaaaaaaagaaaaaactgagagaacaaaaaagaaaactttttaagaacaatgtagccacaagctatccttaccttagtaagtaagccaaacactcgaagaagaaagacaattatttaaataaattatactcttcacaaatctccattttttatccaaagaatcccacaaaagaagtcaataaacaaggaacatgattttcgatcatcaacttgttcaacatg

SEQ ID NO: 1437 - DNA, 3000 bp, Unknown
  misc_feature (1)..( 3000): cDNA_ID_2136173_gDNA_ID_1620401_Annot_ID_155964 3000 nt of promoter + ATG
ggagagtgattagagtaacgtatcttgagccgttttctctggatttttatttgactcagctcttcttttcactgggttatattttttttccagaaaaggttaaaagaagtgggaaaagatcaaagtatgttaaccgatttaagactatcatcaatcatgccgtgtgtcaaaacccgctaaaagcggaagagggtttcttttgtttagtcttgttcactcatacatagagtcccacatcgctaacaaaagaagcgtgaaagagaagaggagtagtataaaaaacgcggccatggatcgtaacaattcatacctttctcggccttttggctaagatcaagtgtagtatctgttcttatcagtataatatctgatatgtgggccatcggcccacacgatattaactctattttttaagggagaaagcccattatgatagcttgctatctgggctttcacgagtcgaccatgcgttgcactactgcacggtcttggctcaacccgccaactattcagtctaaaaaaattattaagtatctatagagataaaaaaaatcgaaaaaccaactaataatccacaaaggcaatatatttacggacctacataaacattgacggttcagatctgggcttaagaagcccataatcaaacacatcctaatgattctccattattgacccaaacagctcgtattagtacagtttccaatcagcgaatcattggtcagtggtcatcacgcgccttccaaacacattcttttgttttcttatcaaatctaaattctttcttccgaacttctctctgtcccatcgaatcttttttctgagtggctagttttttgttttttctttaataataactacaatacatagcaaagctccattattttcgctctgtcagacacagcttcagtttccctacaaaacgaattataatcagatctagaccgttaatctcacgacctacataaatatagacggttcagatttactgagccattttgtaactttaattcgccggctctcttgccgtgttttcgattttgacaaacgaaaaaaaaatcttcaatgagataacaataatatcagcagcggaacaaggattgagaaaaggaacctttcccttttaataagccgatatagatccttggaggagaatttgtagcagaccgatctctgtctgttgtctctgtttctacgaatctctgtgtttgtcggaaatcgtaaattatgggtttgtgggatgctcttctcaattggcttcgcaggtcagtttctatgtcttctacttcaaattttttgtctgggttcgtgggattttgatttggattgtttctcttggtattttgagttcaatgattggggaaatccaactatttccgccgaatttggttttgtttacaacaaaattagggattttagctaattttgattcctgatgtattaatgcatatacgatcacataagtctctggctaaagaaagcaacaactctctctctttttcagctattgattgatcatcaaatctaccctttagttttgattatcaagttttaagtttagacaatacaattgtgagattccatgttggatatagatggttaatcagtagatgaagattgtgagagcaagaacttagtttcccaaaaaaaagttgcttgcttcgcatttgcccgatatgcatagtctcacaatgccttattgcagcctcttcttcaagcaagaaatggagctttcattgataggacttcaaaatgcaggaaagacatcacttgttaacgttgttgcagtaagtagtatgcttccccaaaaatcgttccctctttttttctctaaatgactcgttgatggcttccttttgcatttccttgtccagaccggtggatacagtgaagacatgatccctacggtgtgttatactacttttaggtggcgaagtatttgcttgctcttggactaatcgtaaaaaggatgtttactctttcttaggttggtttcaacatgaggaaagtgacaaaaggaagtgtcacgatcaagctttgggatctcggtggtcaacctaggttccgcagcatgtgggaacgttactgccgttctgtttccgcgattgtgtaaatctctcttgaaattagttttcgtactatctttatttaggtttcagatgattaaaactctctgactctgattctgctttcaggtatgtagttgatgctgctgatcctgataacctcagtgtctcgaagagtgaactccatgatttgttgagcaagacgtcgcttaatggtatccctctcctagtccttgggaacaaaatcgacaagcctggagctttgtccaaagaagccctaaccgatgaaatgtaagcctaaaacctaaaacacgacaatggacttggcattttttactttgattctaataatgttttattttccattgtttgccacaggggtctcaagtcactgacagatagagaagtctgttgcttcatgatatcttgcaagaactctaccaacatcgatcaagtcattgattggcttgtaaagcactccaaatcatcgaattaaactttaccccaaaaggagagaagtcaactctctgcagttgtcgatctttcttgtgtttttggtcatttgatgatgatgatggtgattgtggaagaagacacagcttttttcttttatcctgtgaaaaacaagatttgtctatgttctctgtctgattctttatctgtctttcttctgcgtatgtggctgtgttctctgtatattagatttgattggtgttccctcttcttaaagccatgatgagatcacttccttcggggtcagctttttcaattttacgagttcattgcatgttttgaaagaacaacaaaatatgttgcgtttttcgtaattttgaaaaacttgaggccaaaaacggatattttcgaaaaaagcaacaagataaaataaaagatttttccttttactctcacttgcactatcctcctcttcgcaaca

SEQ ID NO: 1438 - DNA, 3000 bp, Unknown
  misc_feature (1)..( 3000): cDNA_ID_2992105_gDNA_ID_1620401_Annot_ID_155957 3000 nt of promoter + ATG
gataattatggtcaaaggagttataaggagagcttacaaggatgttggcatgagcatagatgatactgccattatctgtatagatgactacatcagctttgtatccgtcattgaaaagacgatcccacatatctcttgtggctgtcgaaacgctgctatgcccaagttttttcttgagtccatcagattttgatggaagaggaggaggaattggcacagaagatgaatctgcagatttgaaagattgatgaagatcaacacaacctgtcaccattctcttgtttagcttatcttctcttccctgcatcaatcaaatgaaaatatatattgtcgattctttagccacagataaacttcattgtcatttctacacgaaatatgtgactcagacaacaattttcacagcattatgtaaccagatctcatttacgattacaaatcgaataggataagaacaaatctctacatatatattcacacgaaaatatcaatcagaaataacaagaattcttgaaacagatcgatagaaaatgtaagaacaagaatcaatcaatgctctaatttgttccgacatatataccttgaaaagattcagaccacagaatcaggttgcttcgaagaggcaagtcaaacaaaattaacgagaaaatcttctccttggtagaaagagcatgagaagaaactctctctatagagaagcttgagagatcagagatctcttaccattatataaacacacacactcacaaaaacaatagaagacgacaaaaaaaatcccaccgaaaggataatttattgttttaatttccttattatctcacttttttcttacttttgtgttcaataatttgaagatattttcttggttcatatcatcaacagagacacccacctgcgaaaattacccgagaggcgcgtggagtctacggttacgaaacggacggctgagaatccacgcgccttaacggccttttttcctcgttcttgaaaaagctttcgtcaagttggttttattatcggctttatcaattgaaacacgactctgcatgttttttttttataaatgatttaatttaagagccgtacaaaaacagatcagtgtgtcctttgttttttttgttcttgttcggcgttacacagctcataattagctgttcgttttttcaaacttttatccgtattattatcctttcttcttcaaagataaatttagattagtcttaattttaaccacatgatcagatactctcttcaaaaatgttaactaatcgtgaattatgttgaggtccgcaaaattgcgtcataaatattttactggtctctcttcatatttcttagcttcgcttgaattgattgttacccttttttccctttttttctgtgtttactataatgccacgtttcttctatcgaataatctaaaacagaagaagaagaagtcaaaatgctttttatatgatcattttcttgtatttttttttagtttttgatcggagtaaagttataagaacttcaaaaaaaaaaaaaaaaaaaaaatgcatgatgatgccaatctttttctaacttttaaagagtattggaacataatacatatatcatgtaaactgatatttttaattgtaattttatatcatatacggatttaattgtaatttgagcatcacccagttgtgcaattgtagttatcacagaagtgcacattgcaatgttgttgaacaacagaaataccttgacatcatctcactgacccatgcagccatgcctaaacttggaccagaactcatgtaaccaccgggtaatgtcaaacctgaactctgaactctcaggttagttaaactcatctcttgttgtttccttaattctaaatcatcactaaacctgtattaaagtgtcccaaattttttagatagagatgtatagatgcacatttaacccacctgaggaagaacttattaactattactggaataacaagatcaccagagaatgatgatccaaataaaggcaacgaatttgaagttctactacattttcttccattttctccattattttgcaaatacataaacacataaaacgaatttatttccatttttcccagaaatatataagaacaagctaaaacacagggatacatgaatcctctcagaaatcagagcatcgaccacgttgttcccaatcgccgtaccgagtcggttcaggacctctaggccctccaatctcaccagtatcttcgttcacaaactctccacctccaccaccttctccttcctcttcttcttccttctgcatctgcagattctgttgaagattctgatctggcttcacgtcccggttcagatcctgattcggagatggagcttgcggcggaggaggtgtaccggagcttagaaaccgtgacactggctcgaggaatctagaggagacggatcggcttggagcgatcaaacgtacgatgttgttcgtcgccattgttagatcagatgtgtcggccaaatcaagaaagagatccgaccttcacggtttgtgatagtatagggttcgatagtcatttaggttgggccataattggataataagcccagtagtatctaggcccaatcatttacatgtttataaataaattaagagaattagagagtaaatttggcccagtataattatgtttaacaagcccatcaggagctaggcctaacatgtttataaaacaaataggagagaattagagggtaaagttgacgtgggctgatttcgaacccgtaacctttttatatattagacctcattaccaaaaagcgattcgattatctcataaagcgtcatgtgtttttttgtgccacatcaacggctgtgagtggttagtcactaaagaaaagtcacaggctgttatatagtattggcttcgctatttattttcgtctaccacgagaaaaacaagtcgtaattcttctatcttgatatcttcaccgcctgccgatctctctcaatctccgatcaacc

SEQ ID NO: 1439 - DNA, 3000 bp, Unknown
  misc_feature (1)..( 3000): cDNA_ID_3062384_gDNA_ID_1620402_Annot_ID_155995 3000 nt of promoter + ATG
agttatattgtggtctcggtttcctagctgtgcaaactataggctttatgcgtcttaccttttgggaactaagctgggacgtaatggaacccatctgcttctttgtcacaaccattcatttcatcctcggttacatcttttttcttcggacatcgacggaaccatcattcgaaggactttttcgacagcggtttaagaccaaacagaagaagcttatggagaggcatggatttgattttctgaggtacaatgagctcaactctttgttcacaacatttccgtgtaaatttcattatccggtttagttagccgcatcctctccttggctactctatgatttgtaattttgtatagcttgtgtagacttaatattgggccttaacttgttgtatctatatatgataaagttggattcctactttttgtgcaccctcatatcatatatatctttgcttagttttatgagcttaggcctgtgttacggaaaaagaaccataactattgttttatctaacccaaatcgtttcaagagtttctttcgtgaagtaatttaggtaattttcaagaaatgaagatgtaatcaagaaaataataattatatgttattatggtttattgccatcaagactggattttttttccatgaacatgtttcatttcattatgtagacgtttaacgtaacatccaatgatgtcatacgaaaccaaactctagtaaaaaatctaacctttaacccccatttagtaaattagccagctgtgtaaaaaatgttaggacagaaagtcattcttttttcttaaaaaaatatttaaatcactttattgttattttttaaatgattttgtgcaaaaaatatttttaagttgtacatttttgcaattttaccttacactttcaaaaaatacaaattaattatacgaaatcaaaaataatacgcaatgtaattttttcgcttttttcaaatgaaaaatattgataaatgatatgtcaaatcaaagtcataacgacgaagaattcaaatctactttcaaaaatgtaaagatttaatgtatgtgaccatgaaaatgtttacaatatacataaaaatgtcatattgcgtattattttagactttataaaattaattatatttttgaaataaaaggtaaaattgtaaaaattgacaagtttgaaagcttttttgcttaaaccccttatttttattcattgttattttcaaatattacatttcccttgattaagtaacataaaaaatagccgacaaaaaagtaatagaaaaataagaaaatcatccacaaataacatgtataataaacaccttgttgaatgttattaacattatatttcacttcatataaaatatagctttcactttatcaacaaaaaaagaaaaaaaagaatatagctatcattcaattgtttcctcaaataattattaatatgtcaagaaaagttgatccatagtcctcttgtaattggtaaggatttgtaaaccattaacaaaaagaaaagagagacgtcgatatctattaatagtcgaaaaagttaagttggtggaactttaatctaccaactataatcatagtgcgaattcgtttgtgatttggaacacgtaaatagctggaggcattactacattcttgaccaaaaacgcaacaaaagcaaccaccaattgcattactataatcttgacgcaacaatgcactcattttagtaactatttacactattttttccttacattttctgctaaacaattacaaaataatcaatattacatacacaaattgttgaattattttctacgctccgatttaatacaaaatcatgatatctaaagggtcggatgaggatatcaagattttaaggtttatatatatggatttagatccgtatccgttaaaaaaaaattaaaaatctttgataaaaaaattttgaaaaaaatttattaaattatatttctacataaattctatgatctttttatataataaaaagtaaattgaatttatttattttttatataatttaccaaatttatttaatatcttattatatcaagtttcattttaaaaattaataacttatatgatcataatacgtatcaagtcgattagactgatactatcaaatcttgcaaattacactctaaggcacatcttcatgtgcattagaatctgatgtcaatttaactgtcatagtccaaaaatattcattatgatttgtccggattcaaccatcgcattaccaaactcatatacgattcaaatcaatcaaaaatttcaaaaatttcggatatctaaacgtataagatttagtctgtttttaatccacaaaaccaaataccacaaaaaggttatatttatgttactacttaaatagtttaatatagaaacttgaaacagatttaaaatcttaagataaggatgatgatgtggatcaaagacagcgaatgtcccaacagttttcttctattcaaaaatcatttagactgcaacaaatgtaaaatgtgtatttaataccaaatctgtaaccacaaaaatttcaaattagattatacaaacaaaattgacaccaaatattgattctcactttaaatgtattacagtaacaattatacattataccctaccaccaactcctacccaatccatttgtctctctctctctcatcctttagtgtcacttgtttttgtacaaagagagaaagagattggaaaaaaaaaaaaaaaaaaaaagatttttgtttgttgaggttgctgaaatctagatcacctgttttgaatcagtcatacctcaaaaaccctaactcttattatcctctcccaattgaatttttcaaagcttgaagaaactagtagtagtaatcttcgctctgtcgtctgatccatttttttatcaaaatctcgagctaaaaactcttgtgtttaagcaaatgaaatgcactgtgtttgattttgagatttgatggaagtgaagctgtttcttcgaagaatttc

SEQ ID NO: 1440 - DNA, 3000 bp, Unknown
  misc_feature (1)..( 3000): cDNA_ID_3062382_gDNA_ID_1620402_Annot_ID_155997 3000 nt of promoter + ATG
aaaacccgacgttctgaaggaagtcaaggtcgctattggccttacgtaacaaagctaccgatcaagaccaaagatcatatcttcttttatatattaaaatttaaatatgcagtccatgagcatgatataatattctctttgagaaaaaaaaattgatataatattctaccacacatctcgcaatatatgtgttgacccattattcaatataagcaaataatttactaaaactatagattttacttttatgtaacaagcaaaaaaaaaagaattgaccacgttacaaaaaaactctccatatataaccagagtgggagcagtggagcataccaaaagaggaaagaggcagcagaaactttttagttaccagagaatcttttccaatttatattaaagtgtgataatggaagattgagatgtttttttgaagactgaaacaaaaacaagttatctctacttgaacttgtactcccttctcatcgcactacaacaatacttactacttcaaacgattctcttgattatacatatcaaaaaactcatagaacattcttggaaagaagttcatatatgatgataatatgattcttccgaagctcatatgatcaaaacaagttaaaattatgttaaaactggtaacctaagctgacttatttgttgtagcttaaggcaattagcacttgagaagggttaaatcactggagggttccgcatattccatcccccaactaggccgccccaatgtgaaatccaaattgagatgaatgttggtatcctctttctcttcattgtcctattttcaaaatattacacattataagtacataagtaaaagtgtaccattgttaccattgtcagcatgcaattaatgagagataagggataaataatgtaccttagtgtgatgagttgttcccaagtgagaatatgcttgtgtagatatgctcctagatacttcctttgtcgatgaccatgaagctctgttcaaattttaataataaaacacattttagaaatctgtttataactcctattgctggacaaaattgttgtatttggacctacttctatattatcatcaattaatgtacatatacaaattaacaaagaaaattcaaatatcttatatttctaattagactaaaaccaaaaacaacccttaacgaatttaatgagagatggaaaagtacattcacataagccctaggagagggtcatattcatcaaatttcacacagaactaaggcaaaaagagattaaatgcaaaattttacaaaaataaatatataaataaaaagtaacctttgggtcttttgcacagatgatgagtttggcgaatttgtgtcagttccttcatcagcttcttcattattattattgtcctctatcctctgctctgcctctttctctacctttccttctcctgtttattcccaagaacaaaaatacaaattttcttttaaaaattaataaataatgaaattttatttacatttatatctaataagaatgtaaaaatcagtgaactagtttgaatgcatacctggtgatcctttatcagtgcatttcactgttctatacatctgcattaacaatcacacattcttgaaaaatcaaaaacaaattaaaggacgaaaaaaaataaaagaaatgtttggctaagttcatttcaactatgcaatcatgcgttagatagtggcccaattatatacatttcatacatatttacatatacctatatatctatctacatttatgtgtttgaattcgtatgagattccattaatttatatataaaaaatgaagaaaaaataatgaacctgcaagtgactcttgacatgagctagggttagatccttcacattcatgagctccaacactgatttaggcgttgctcctgagacaaaccaatacatgacaaatcttaatactttggtttcaaaacgttacactaacataccaatctcgattggttatgtctttcttttaaaattttttttgattagtataggaaaatgtaagaggacaatacatactttcatggccgccaagaagttgaacagcatggacgaagtgagcatgaagagtagaagtccatctcattcttggagcacgaatgcttcgtttaagaccaaccattgatgatgagcttctcttgaaatctcgaccgtagatttgaggttggaacatgtttgagcgcctttgatgatgatggtcaaatcctaagctcaagagaggtttgttgaagaagttgttctcatggctcaggtcactgaggctgcttccagaatcactgcttgtggagctccggtcaccgccgtgaagaggttttccggcgtgatagttaggaagactgatctgaagagacagatctgggactgagtttgaagctctcatactgtttcttgactctaacatcatcatctcactattttctttatgattcttgtctacttaaatagtggagatcaaagaatgtgtggaaagagaacgagagagagagagagagctctgcagaaacaacacttttattgagggagaaaaaaaagaggtaaaatattatatttctccatcgttgtcattatctcattaatgtattaaacaaaattctattgtctttttcttattattaaatggtttttttttccaacaaaacaattctctacaataccttattattctgaaaacgcttattgcactcttttcctagtactaccaaatgttagtcccaatgtaataaccaaaaaaaaaaaaaaactagaagtgaggaaatatttatagggtgaattgcaaaactaactgtttttgataatttatttaagaaactaacactataatatacaaaatgtagaaattaacactagagggtagtaaaattactaaattagtctttttgattggagatggtagtggtggtgatggttgtggccggtggtggccggcggtggtggatggagttgatggtggtcggaagtgttggtgatcggtgtggtggttgct

SEQ ID NO: 1441 - DNA, 3000 bp, Unknown
  misc_feature (1)..( 3000): cDNA_ID_2046039_gDNA_ID_1620403_Annot_ID_156008 3000 nt of promoter + ATG
gatcacaagactgtggttacacaattgatatcagacaagttttcagatagaatgtctgtacaacgattccactgcaggaagaaagacaaaatcgttagacggtgtcacaatttctagaccaaactattcaggaacaaattttgctttttcttgctattgctacatttctttcagatttcggttacagtgcctgtgaattcatagtttgcaaactgaagaacaacgagatcatgagacagagtttcaaaatccattggagtagttcgtttccacgtggagttgaagcagaggaggtcaatgcagttgcattcgtcgccttggttttgttcctgcagaaagattttaacaaaacagtaagaatatgtatttactgttcttcaatttgcatatgaatcaactatctttatgacataccctcctgcagtaatgtatatgcatttgtcataacctgtaacaacgacattgaatcagattaaggtaaagatcaagactgttgatttgtgattttggagaagcaaaagctggagattttgtttacttactagggtccttgttgactttaacaccagctcctccaaagctgcaagcaacgtctgttgctctgttctgttggaaatagctattgaacacgaaagaagcatgagaaaccaaagtatctggttgaaaacaaggctggcttggctgaatagctgtgcaatcaacatttccaggaccacaagcccaatccaaagcacctttcagatctctctctgaagctttagaagaagcaatgcaccagctattactactcccacttgagtttgtaccactcgaattagagtgaaacccgttgctctttcccgtgaaatccaactgataaacacttgtctggtcagggtagaacaatccccagtttctctctgaatccaaacccgctttccgattctcgttgaacaatgagaatatataaacgttcattgcctctcctggctttgcaggtgtgccttggttggtaactacatgacggattatgtttgaattgtatgtctccgcgttgtcagaagacgcagcagctttctccttcggtgaacctttggttggccatccagtctcagtaaccataatcttgattgtcctgaagtttaaagccgtgagagcgtaataaagagcatcaacttgagcatcaaacatgttcttgtaaagcaaacccgtgtttgggtcaatcacttcagaggaagactcaaacaacacataatccaaagacacattgttcggagagtctctgtaagcgtagtacggataaagatcgatcatgaaaggagacttattctctgcaagaaactctaacattggtctcaagaaataagcatagctgctgttgaatgctccagcagaaggagggaaagatctagagagaattccgagggaaagagtagtcgaaaccttgattcttctactcaaaccgacttttctcagagcggttaagacattctgcatcgcggggacaacgaaagacgaagcattgatgtgtggatcatcagtagattcagctccaacggtaatgtaagtgatcttggtcgttggatagtatggtaagacgctgttcttaagccaggtgtccacatttgattgggattgagagaaagcgttaagatcagagtttggaactccaatcattagctcaatgcttgtgtttccaaatgctttgaggacttgagaattgtaatcgtagattctaacgtatttgatgttgtgctgttgaatcaattgaacaacttttgacggtgttggaagatcgtcggcgcttcttccgtaacaaactccgaccttgccaccgtaacaacagtctacaaaatttggggaaaaaagacagaatcaattgactttttttctgacgaaattttcttttgatagctctacagtaaattagaagaaggtaatggagtctattcaacaagaattgaaattggaaaccattgaatgttcttaattttgctgctctatttcagaacaaagtctcagacagctcttgaagtgagtagtagagacagagagagacaaacctagaagcagaagcagaattgaaatggagaagataagcttgaagtctctcgccattgctgagtaactacacactttgcttttgcttcctttactcgaaagaaggaagctttattatcttctggcagctcttcttcttcttcgagttaattctctcttttagtgaaaaaagtttgaagctttttctctctctacaaaaaacaaaagcttcgttaaagctctctctctctctctctacagcgagagtgggaaactaatttagtttttttttcttggctattgtttttttcttgtcagaagttgaacactggtcggaaacaaaccgggcctcaggcagtacaataaattcgatttgatagacttgtctggattccgctaagctttgtgaccatttccaactttttcattactcccccgttatttatgcctattctcgaaaactaccccaatataatttaaattaaactggtcccattgaattgaatttgtgagctttatacgctcttaataaattcgatatcaaatacattaatttgcttatacatttaaagtgtgggaaaaatattaatttcaaaccgacaaatcgaaaaaaaaaagtaatataattcgtttatccaatttacacaaaacgttttccgataccaaaaaaagagaaaatcaattaagacttttcttagcgccagctgtcaaatataccagagataagcaatgggccgtaccatcttatatttatcaattcaagcccatttaaatcttacagcccaaatgatttaattcttgtttttcttaatgtataattttttcttttcccggtcttacgcgttcaaaataaattagtccgttattgattgcttcgtcgtcttctctccacttcctaacactttcttgaaattgcttatttagatagaaaccctagaaagagagcgataatcccaaggaagaaaccaaagaaaaaaaatg

SEQ ID NO: 1442 - DNA, 3000 bp, Unknown
  misc_feature (1)..( 3000): cDNA_ID_2045934_gDNA_ID_1620403_Annot_ID_156036 3000 nt of promoter + ATG
catgtcagcttgtacttcaacagttcattgaaattaaatattcaatgtagtttaacatgaatgtaaatcattattaggttgaatgtgttattagcataagcctattgaagttttattttactctgcatctgaaacagaggaatctctttgatgacaagaaataaacatagaagttaacttgatagatgtgtttgtaatagtagacgacgtaccttgctactcaagttttgttagttttagggtatgtgaaatccaagaaaatcaatatagaaataataaagagaacgagcaacaaaagtaaagtgatattttaaaatatcttttgttttattgggatatattttaaaataaagtgctaattataagtttaatattcattcttcttaaaatacgtaaaccaatcaaaacaaaatatatttctatgtataaatattattaggattaggataagaaccgttgcagctaccttcatcgacattttacttattcgatggaataagttatgatgcatcatctgctgcggccgcagaaaactatttgatatgggagaaacaatggctcgaatggaaagatgtgaatggctttctctaatccaaagtggattaagcactgagattttttcatggatagcttatgctacatcatcaaaagaagcatgggaaattttgatggtgagatcagtaggtggtcctatatttcaagctagaaagcttcttgatctcaagaaagagtacaacaacacgacaatgagcgatgcggaaacggttcatgagtttactggaaaattattggagctagtgtttcgtatgaagtcttgcgggtggaaggtcgaagaaaaaatattggtgaagaagattctttcctctttgcctccaagattcgataaagtcttagtggaggttgcagaaaaactttctgttaatgtcattatcgattgcttgttggttcatgaatacaatatgagaccggatcaagagtcttttcaagaatctgtcattcagagtgttaatgtggaagaaagttttgaagcagaagctgaaatattatactctttgaatgacattactcagagccaagtggcaatgatggagagacaaagtgaagtgttgtcgttggtgcaaaagaatcaaaagatgctaatgcagatgcaaaaacaaatgatgatgttaatgcagcagaaagatcatgtgttagcacactccgaatcttatgaggaggagatgacaaaagtgatcgagtctatggagaaacactacttgaagaaaaagtagttttgtttatttttgtttggttttggttttttctttgtttggtgttcctgaaagttgattaattactgatcatggattcattcataaaattcgtctttgcataaattgtggacttcaacttttggtaattgtgagacttcttactcgaaacagagacttattatattttgtcacctcttaaaacagagaaaaacagagaagtatcgatttagagatcaaaagaatgtgatgtgtgctgttattgtggatgaagagcatttgcataatgttctaatttggtagtttttttccttcaataatatatgatatagtgagcaacatctttagaatatgtttagtaaatttttgtaaaacaaattgacctacctcaccaaaaacaaacttcattggaccagaattaagtagccattaggatcaaatcaacaataatatactatttatgtgatgaaatatgaatccccatcattgtcctatatgaatcaacatttaatatattttaattagtcgaatcttaaaaatgaatcccagtcatattatctttatgtatgtagaagaagatataatcaacattaaatagattattatagtacatcaacatgaataccccatcttgtcatattatatgtatgtgggatagaatcaacatgaatccacattcagtattcaaattagaaatgatcgtaggctatgactctaaagttaattttaatttatatgatgaatgcgagtacccccattatagattcatactatacattattttatatgatcaaatatgaatcatcatcattgttctcctatacttgctcttcattccgaatgtagcaatagaatctccatattgctttttaccaattctaaccataaacaattcatagataaatgcatgttgggtagtgctttgtctactagtaattaataacattatcgattacaatatttgagcaaatcaggcaatctttaaataaaaatatgtatacgatgactcttccgtccaactaatatattgaaaatattataagatccaaattatttcattatttatatcaaacaaaaacaagaaataaataagacttgtctttgttcatgtaaacaagaccactttgttgtttgtttctctattttacaaatttgtaaattatatttttgttatgtttctttccacatttttattaggtcatccaactacccacctccccaaaactattggaggatccaagtcctctctctctcaaccatatatcttatatttcctttgcaaaaggatagcctttattatttaatacacatagattccattattgttatggctacctcattctattctataaagcatacatatgagaagaagaagcaaaatatagactatgtgaaagataaatgaatatttcatatttgtgagacaaattaattagattagaattaacattttgtagctagtccatattagtgataaatttccacttataaagacatattttcctcttttgttttttatacgtaagcttgtcttcttattggctaaaagtagaaaacaccaacttggacaacatcatttaaattataaaaccctccaataaataaaacttggtttatccaatcatcttatttctctgtgctctccaccattttacataaaccccaaaatctctcttcatcatcatcattcatcaacatcatctctctttctctatctcgctgtccctccttctctttctcattcattgca

SEQ ID NO: 1443 - DNA, 3000 bp, Unknown
  misc_feature (1)..( 3000): cDNA_ID_3062455_gDNA_ID_1620403_Annot_ID_156034 3000 nt of promoter + ATG
gctagtacacaaggagaccgagaattctgctctgaagttgaagtcttgagctgtgcacagcatcgaaatgttgttatgcttattgggctatgtgttgaggatgggaaaagattgcttgtttatgagtatatctgcaatggatcattgcattctcatctttatggtaaagtttctactaatggtatacaaagaagaacattcttgttttttgttgaaaaaatgttatagatataaaagtttccataggtatggggagagagccattgggatggtcagcacgacaaaagattgcggtaggagcagctcgtgggttgagataccttcatgaagaatgcagagtcggttgcatcgtgcatagggatatgcgtcctaacaatattctcctcactcatgattttgagcctttggtaaaaagaatgttaaatctttgctcaagctctctctctgtctttccggtttgtgctaagcttgaaacttttgaacattctaggttggagatttcggactagcgagatggcaaccagaaggagataaaggagtggaaacccgagtgattggaactttcgggtaatcttacgccatgatcttgagagatatattcttcttgatttacatgtagaacacaataaccaatttctgtttaacttcaggtacttggcacctgaatacgcacaaagcggacagattacagagaaagcagatgtttactcatttggggtagtcttagttgagcttatcacaggaagaaaagctatggacataaaacgtcctaaaggtcaacaatgtctcaccgaatgggtaaaaccaaaaccaactacagtataacaaagttttagtctttaaagctctgaatgctttactaagaagaaacatttttctgcaggcaagaccattgttgcagaaacaagccattaacgaacttcttgatccgcgtctaatgaattgctactgtgagcaagaagtttattgtatggcactatgtgcttacctctgcattcgccgtgaccctaactcaaggccacgaatgtctcaggtttgctcacatctcaaaaacacttacaagttaataacttacaatcgaaattttctgagtgttaatatttctttttgtctatggaatctgtgtcttctcattgaaggtgttgcggatgttagaaggagacgttgtcatgaatccaatatagaagaagcttcacaaggaaaattcttcttagggagtttgtacactatttagggttactattacagctttttaaatgagttttgcttttgtatatgtaaaaatttgttaatgagacaaagattcaactaaagtttgttgagatttttacatttcatagattcatggccggttaaagtctgaataattgaggttattggttgaaccgattggttgactggtcaaaattcaaacctttcagcggggcaagagggtttcagacagcattttgccccatccaccaaaaaatcttagaaaatatactatactatagagatgtcatgtctgttattttacaaatattatccctatctttgaaagaaatagaattggtaaacgcaagagctgatgggtctggttaatgggccagtttgagaaaaccagttcgtaattagggtttatatcaattctcaaatgacgaattggtgagagtgggacttgttcgaatgtgaagagacgttacaagggtatgtatgcctcagctttgatacaaagctgggaaaagtcaaaagcttaagagagttgatacgcaacacaacggtcacgtctttattccaacaacacacacatctcttagcataaaacacatattttccccaatttttctgccatatatatgattttagaccataataatttcatcaaaagttacagtttgacccacagctacagttgtcgcactccttgttgtagttcttctcgcaactataccacacacaaattaatcaaacaaacaaaaaaattagtaattaatatgatgagattaaagattagtcaaccacatgcatctgattctgatcagcatatatgcagaacaggccaaaatgtttttgtgtctactcactaacacaattgtaaacgtaagtcataagaagagtttattgaattttgtaccatgaagccattaaaggtaaagacgagagagaggatcaagggggttacctgcaagagtcaccacatttgcaggaggagccacatccacaattagaatcatcctggttagaatcagtcccatttctcttacttgtctttgattgattaacttctgtagtttcttcttcttcttatgatgcttttgtgatttcaaccaatgggaatggccactatttatagaagaagagagagattcggatcactttatacataatccaaataaatttacgaataacatcaacttgcccatcattttctttttatgttagatttgttccagcttcattcaagaaagtaatttaatgttagagttttagcaagacaacagagtatcaaacaaactaatagaaaacgtcaaattattggcgaatatgtaaaaaacaaaaaaagtcgtacacgcaagaagataactatcgcaattgccaatagtaaacggcagccgacccaaaaaagaggcaggaaaacttatttaatgagaaatattttcctctgttttgaaatcttcttgtggtcatttggacgacgacccaggacatggtctacgctcttctactacttattaatattatatatgagtttcttacgatccatatattacatcagatatccgttttaagatttttttaaaaatgttgacacaaaaaaaaagttttggacgactaagtgccgtcatcaatccattggattacatcatcaatccattggataacccttggtttgatctctctgaggtgagtatcgagtcgtgttatggatcccaaacattgccgcgtagcttgcgtagtaggcattggaatctcaaaacattgaaacttaaaaaactaagtttcgtggatactgatgcttat

SEQ ID NO: 1444 - DNA, 3000 bp, Unknown
  misc_feature (1)..( 3000): cDNA_ID_2045947_gDNA_ID_1620403_Annot_ID_156032 3000 nt of promoter + ATG
tagacctaacactttcagcttgtcctagatatgaagcaagaacaatatctggttcaagctttcgacattgttcttgaccgatgaccgctacaccgagctcatacagacccggacaagatttacgaggtaagttctggactctgtatctacctacaccatcttttccgtttttgaaatcttcccaatcgttggatcctataagtacctgtgcagcatcaaactttacacaatcagataaaactaagatctaaaaccaaccacttcaagtagcaaatgaaacagaattaggctaattagatatacatatagttagcgaccaattctaacagaaatccagagaaaatgcatttgggacaaagcagacacactaggcattcaaaatgggatctttacactgaaatcctggaaatggaagatcagatttttcgattcaactgaaaatctgagaattccgaaatgggtttcagagaaaacacaagatcgagcgaaaattctcaatctacaaatcgagaaagagaaagacagaggacctgccacttggagaagacggtgtcgtgtttagttcgtttgtagtcttctcttttgaagacagtggggacgacggcgaaggaaacgccgtcgccgaattccatttcgataaaaccgatgatatagtgtgaccgttaaattaaagcggacttggtcttttttctcagtgctcgttaatttagagacaccaccgttaaaaatgagaaaagtttttctcccctccaaaaatggatgtttatccttccaaaatggatgatttttgttttattctgtccgaaggaaaagtttcaagttaccgttggaacggtgaagcttcttctgtacggtttattagttaccgttggattttttttttttaatctacattagtcaatgttgacaaccgtaattagcataagggagggaatctacattctttaatgagaatacttaacttttcaattggtcaaattttcttctatctttgggatttttttattacacttttacttgatttggcaaatgttattaccaaatatattgatgagaaccagaaattggtcatgtgatattcgttttcaaccaatcttgtctatcctttgttaatcattagtattttagaataaattgaatatttacaaaatatgcgtaaaataactcttttttaaaaaagtaatgtcaaagacacaaatacttatcaaattaatatttgtcatgttttataagaaaacacatttaatttatgttgttgaatatgtaaatctgttcatcgggtatttctacccaccggattgtggcatttggttgtcgacgatccgcgtcaaatttcactttggaagttctccaaccgttatatatagggagaactaatgttccacaacatctcacaaatgtggtcattatcttaacacttaactcatgagatatacttgttttaatttgatggcttgccctaaggatgctaaccgcgttgaagctataagccaatcaatgtgtctatggaatgtcgacaagcggctcacctatcccctaccatctaaggaccccgtttccgaagccgaaaaaaaaagtaaaacttaaagataacaattctgataccactttattaaaaaaagaaaaaaaaaaactgattagtgtcactttccatgctgccattaagtccaaaatgttgttttcacccttttcacttaagtaacagtatatatttactaaatcataagatctcaaaattgtttaatttctaagataacataagatatattcgattgcatcactagactttgatttattgaagcaccttttatgctttaataaagtacaaatcatcttttctcaacttttgtttttcactttctccactgaaatatataaaaagcaacatgaaaagcatgcaagtgcaacgttcaactccttcattataaccattctaagctaatttttactctttttcttttgaaatgaattatgagaaccaattctataatggttcttttgttataaaagaagaaagttggccataacttgtccatgaagaaagaaaacagtcttattctttcactaattctaaaaaattaaaatcaacaaatttgaaccaaaaaaagaatcaagtatcatcctttgacacaactctcttggtttctttttgctctctttagaataaagcagagtactttgtgaatatttctttattctttttattattcttggaatttatttaaaatacaaaaaaaaatacagagacaaatagagagaaagaagaagaagaaagaaactccaccaatcatataataataataacacaccattgtctcttccttcaaacagagctacaaatccaaaatacttcttatttgtcatctttctctgtttatattttaattgtttggatatttgcttttatcttctaccaaattcctctgattttgtcgaagaaattagtagctgaaaatccaaaaatcggacttacttcatcagctttttggccccactttacaaagtatgagcaagtttttcttgttttctacagcaaagcaatgctcacaccattttcgtggagcttaaagtcttcaaacccaaactaaaagctttgaaatttctctgcaagaaacagagagagagatctagggattggctattaagagagagagagtagagtactacactattggttcctgtgctgttgtgttttgtgcatctgttcttgtgtttctcagataaaatattagtttcagtctttcaaagacattgaatctcacacacttactaacacacactcacacacgcgttaatttctcaactttttttctatttatttcttttagcttctagggtcacttgagaaagcatcttggattgcgtgatacttccactttctcatttcagaagaaaaatgggtttagattgagtgaagtgttaaaagtatatgtaagcaagggttgaagaagaagttctttcaatttctgtatttgtgatttccttaatcttagctagaga

SEQ ID NO: 1445 - DNA, 3000 bp, Unknown
  misc_feature (1)..( 3000): cDNA_ID_2045954_gDNA_ID_1620403_Annot_ID_156031 3000 nt of promoter + ATG
tagcttcagcagcaataactccatcaagtgaagcaaaaacaattttgattctgacatttatctgcattattatcaaagcaaacaaaactctttataatctcattaaccaaaaaagctgtttctttttaaatctacatgaataaaagtgagtttctctaccttctctgcatcataaacattgtgtaactgaaacatcatctgagaacatgactcatgaatatcatctttcctatccgaattcgttccagcaagaaatcttccataacctgatgcacagtcactagtgaacctcgaaaatccccaaatctttttacctgaaagaaaccaaagacataaagattaaatctttacaccattctaactaaatcattcagcaccaaagagaccaaatttatcaccactcaacaccaataagtagccaaatcgaaaaagaagagaagaggaaaaagatgtgtacttgtgtaattagaaggaacaacaacaagaagtctaattcgatctccaggttgaacaacatgagttaaagtccataaaagagctgcttttgggatctcctttgaagctctaacagcaaccattactttcttccccactacaacacctctctctttaaaacccttctgcttcattctctagctaagattaaggaaatcacaaatacagaaattgaaagaacttcttcttcaacccttgcttacatatacttttaacacttcactcaatctaaacccatttttcttctgaaatgagaaagtggaagtatcacgcaatccaagatgctttctcaagtgaccctagaagctaaaagaaataaatagaaaaaaagttgagaaattaacgcgtgtgtgagtgtgtgttagtaagtgtgtgagattcaatgtctttgaaagactgaaactaatattttatctgagaaacacaagaacagatgcacaaaacacaacagcacaggaaccaatagtgtagtactctactctctctctcttaatagccaatccctagatctctctctctgtttcttgcagagaaatttcaaagcttttagtttgggtttgaagactttaagctccacgaaaatggtgtgagcattgctttgctgtagaaaacaagaaaaacttgctcatactttgtaaagtggggccaaaaagctgatgaagtaagtccgatttttggattttcagctactaatttcttcgacaaaatcagaggaatttggtagaagataaaagcaaatatccaaacaattaaaatataaacagagaaagatgacaaataagaagtattttggatttgtagctctgtttgaaggaagagacaatggtgtgttattattattatatgattggtggagtttctttcttcttcttctttctctctatttgtctctgtatttttttttgtattttaaataaattccaagaataataaaaagaataaagaaatattcacaaagtactctgctttattctaaagagagcaaaaagaaaccaagagagttgtgtcaaaggatgatacttgattctttttttggttcaaatttgttgattttaattttttagaattagtgaaagaataagactgttttctttcttcatggacaagttatggccaactttcttcttttataacaaaagaaccattatagaattggttctcataattcatttcaaaagaaaaagagtaaaaattagcttagaatggttataatgaaggagttgaacgttgcacttgcatgcttttcatgttgctttttatatatttcagtggagaaagtgaaaaacaaaagttgagaaaagatgatttgtactttattaaagcataaaaggtgcttcaataaatcaaagtctagtgatgcaatcgaatatatcttatgttatcttagaaattaaacaattttgagatcttatgatttagtaaatatatactgttacttaagtgaaaagggtgaaaacaacattttggacttaatggcagcatggaaagtgacactaatcagtttttttttttctttttttaataaagtggtatcagaattgttatctttaagttttactttttttttcggcttcggaaacggggtccttagatggtaggggataggtgagccgcttgtcgacattccatagacacattgattggcttatagcttcaacgcggttagcatccttagggcaagccatcaaattaaaacaagtatatctcatgagttaagtgttaagataatgaccacatttgtgagatgttgtggaacattagttctccctatatataacggttggagaacttccaaagtgaaatttgacgcggatcgtcgacaaccaaatgccacaatccggtgggtagaaatacccgatgaacagatttacatattcaacaacataaattaaatgtgttttcttataaaacatgacaaatattaatttgataagtatttgtgtctttgacattacttttttaaaaaagagttattttacgcatattttgtaaatattcaatttattctaaaatactaatgattaacaaaggatagacaagattggttgaaaacgaatatcacatgaccaatttctggttctcatcaatatatttggtaataacatttgccaaatcaagtaaaagtgtaataaaaaaatcccaaagatagaagaaaatttgaccaattgaaaagttaagtattctcattaaagaatgtagattccctcccttatgctaattacggttgtcaacattgactaatgtagattaaaaaaaaaaaatccaacggtaactaataaaccgtacagaagaagcttcaccgttccaacggtaacttgaaacttttccttcggacagaataaaacaaaaatcatccattttggaaggataaacatccatttttggaggggagaaaaacttttctcatttttaacggtggtgtctctaaattaacgagcactgagaaaaaagaccaagtccgctttaatttaacggtcacactatatcatcggttttatcgaaatg

SEQ ID NO: 1446 - DNA, 3000 bp, Unknown
  misc_feature (1)..( 3000): cDNA_ID_2045968_gDNA_ID_1620403_Annot_ID_156027 3000 nt of promoter + ATG
gagaaatggcctaattctaatcattgtggtttttttttaataaaaagggaatgacagtttaaaaaagatgagctaatatgagtcttaatgagataataaagaagcattagtcttattaaacaaaaggttaatggtagacaaaaacagctggcattttcttttcttttttctataagataaaaaaatcaaaaggcaataagacaaagaataaggaatacaaaataataataagaagaagatatctttgaatagagagaagaagaagatcccaagaataatcccatctggaaatgaatcataataataaaagaagtttcacaaatccacaagcaaagaatttctccaagaacatttgattcaaacaaaagatgagtcttttttttacaaaaacaaatgaatctaacaatgcccacatgtctgttcttccccaaatcaacagaaagattagatttaagcaagtttaagataaacccagaaacaaaaatcaaagctttattcggatccgagttcaaaggttaaagaatgaaaccttgccaccaagatagattgttccaacgtcgacggagacggcgccgtaagagtccgtcattggcaacaaaagctcttccgcttagccgtcaccgtcgccgtcgttgttttaagaacgccgggataacaagagcttcttctcttttcttcttcttcttctcccaacctctagattgttttttggcttttctttagcttatatacaaagcgatgccttttctctctcctctctcttaagacctctctggaaaaagaaacgtttttttttcgttttcctttttttcttctctttcgttttactctctctataaattttgcggtgatttctccatagacgccggtagtcgtaacatgacacgcgaacggtcaaaaaacttaaaataagaaacatttttaatttgatttatttatagaaacttatttttgataaatattattaaccagctcgaatttcaccaataacagtcgaatactaattcggaaaaattgctgtaaataaattggataattgtataaatgtaaacaaatattaaatgttgataattggataagtaagggaggtgcgaagttttggttaacaacaaaattaacattaagcaaaccgaatataaatttttagagactgtttagttttattattaaaaaaaaaaagagaaaccaaattttctaaaaatactattacatataaaaaattatttttatgtaataatattaagaacatcaatatttaataaacaattgtatatttatactattcgcaattttttcactttgagttggaaaaaatatatcttagtagaaaattagaaatggactaatcttaaaccatcagataggctttcaaacatattcctatcataagaaacatgatgagtaacaccactatctatgatccatgtattttgtgataacacttgtctagaggacgttagagaacatagtaaccataaagtcgaaggtgagaaagagatatcattgaaagcaaaactttgaagtgaccaaatctgctgagttagctgataagaccttggcaaattcgtaatgtgaaatctagtatccaagtctttccagatctctgcagcatcattgaaacgaagtatactcttatagatctgctttgtaacagaattaaggatcctagatttaaccatactgttgcatcgtgaccacactctaaagctaggatcagattcaggaggtcttggtaaagttccatcaacaaaagcaatcttattcttaacgttcaaagaaacaaacatcgcaatcttccaagaagagaaattagatccatcaagtacctcagaaacaagtgtattcccaggactcaccatttgagagcgcgaatggcgaataatgagcatccgagaagtcgaactgtggtaaaggatagatcgatggttttgaattgaaattttgttgaaacggattcgaaattggtggaatcggtggaatcggtgaagcttgaacacgatctggagttttctcagctgaagttttgctcgatcttctagtacgacgccgcaatttctctacggaaaccatcgcaagatcaacgaagctctaaacaactgaaattttccagaaaacgtagaaaattgaagaaacaaagaatcaacgagtttggaagatccaagagctcgaagatactcagagtttaggttgaatcggatgaatcttcgagatccatcactctgataccataatagttgatgaacgaattcagagaaatgaagaagatgagaaaaatttgttattcttcttaattgttctgttacatgaaacactctttatatgtagagtgttccggtttagtaaccggtttacattgtaccaaacaacaatacaataaccgaatttatggttaatatcttaagttagacctatttcaaaacaagcctaattttcacaatagtcaattttttgttgttgaatatttggccgagaactagacttcaataatggggaagaataactaaaatcggttctttctcctctcccaaagtcaactagattcaccaagaataactaactttggttaatgattacatgttcttaaagttatggatcttttgggaaaaatggactatttggcaaaaagagtggcaaaaagagtgtgaacataaaaaatacaaatggggcgttccgagaatcgaactcgggacctctcgcacccaaagcgagaatcataccactagaccaaacgccctcatttgatatttcgttaattagataaataatacctaataatacaaacttgaattggtcttgcatttgggccgttaacaggccttgctaagtcatatgtggtgtgtatttctccatctgctattgatctcagtaaaaattacataaagagagccacaagcttactgactctcttgtgtatcgctctctccgcatttccattaaccctccaattttcccgcctttgtctcactctcttcccgccttgcactcgccggggactccatg

SEQ ID NO: 1447 - DNA, 3000 bp, Unknown
  misc_feature (1)..( 3000): cDNA_ID_3062410_gDNA_ID_1620403_Annot_ID_156026 3000 nt of promoter + ATG
ttcagaagcagcaagcctccgccggtccgggtaccgagcctaagaagcgtcgccgtgtcggattttctcccgccggtgagtcatttcttcttcttgtttgttttcctttactcgcgattaccactttcccagctccgatttcgtatttttctttaatccgttgatttttcttatgtgcagatactggtgtcgaggctaacgagtgcatcaaaatttatctcggtgcgtatttgatttaaatcatttgaagttgattttggggatatagtttcgtacgaaaattagggttacgtttcctgctttcgacctttttggtgaaattagttggccttacttcaatttttctagtttttggcttttccggcgaactttattgctttcaaaaggtagttttcagttattgaacatgtagagcagatctgtatactgagtttctgttgatttatgtgttttatctttcttccaattgatatttgttcaatgagttgtaaaagtattttctgtgtgaagtgtcttaggttgctgtgacataattttgttttctgttttggtaatcgtgatgggtgatgttctagtttcaagcaaagaggaagttgattcctctgatatttccagcgtgaagccagttgacttgaatgatttctttgatggagatggcaagatttatggttaccaaggtttgaaggtaatgtggcctcctaccattagattattttgctctttcttaaatttctggtttcgcattgttgtggttctgttctgacatattcttgtccacaatttattgatgtcagataaatgtatggatcaatagcatctcattacattcatatgctgatatcacataccagagcaccattaacgtaagtgttgattgtatttgctattcgttggattggttttatacggcttttaaagggactaatcatcactatcctgttactttctgttgtgtgtttgaagggagacaaaggcatcacggacctcaaatctgctttacaggtaccaatcaacttggacacatgcttcttttgctctcattatattattctgattgtctgtttcatttcacccacccagaacatatttgctgagaccattgttgataccaaggatgagtttctgcaaaccttttcgacacagagagattttatcaggtgcataactgcataccttctggttgctttcataccatctcaaatttgttcccaacttaattacgatagatctctttgtagtctctgaatataatgttgaactttgtcattgattgttgttctagaaatatggtctcgaatggagaggtaatgcatgctggagcaacagatggaagcagcaagaatgctgaagtggttccttctgatccccaggtagtttttgcttaatatgattcatgtatcctatagtcttaataagtttgagcaaattagtttgagatgttttcagcttcaaatagaacttataaaggttgattatcctcaggttatacggatggaaattggttctccaaatgctggactcctctatagccgattggtaccccttgttcttctttttgtcgatggtaataacccacctaccctttaagtcatcttgaatattttatttctcttgttagtaacttagtactaacgagatgccggctcattcttttgatcaggcagcaatccgattgatgtcactgatcctgactggcatttatatctcttaatccagaagaaagaggaaaaagaagatcctttgtatcgaattgtgggctttaccgcaatttataagttctatcgttatcctgacaggctgcggatgcgactcagccaggtattaaatatattcctcagagatctcaatcctacttacaatctttttgatctgactgtttttgctgattcgttgttttgatttcagatcttggtcttaccatccttccaaggaaaaggactcggaagctatcttatggaggtagtaaacaacgtggccataacagaaaacgtttacgatttgacagttgaggagccatctgaaaagttccaacacatccgcacttgcatagacataaaccgcttgcgcagtttcgatccaatcaaaccagacattgattcagctgttcagactctcacaaaaggaaagctatcaaagaaagctcagatacctcgattcaccccgcctctgaacgccattgagaaagtccgcgaatctctgaagatcaacaagaaacagttcctcaaatgctgggagattttgatataccttgctcttgatcctattgacaagtacatggaagattacacatcagtcatcacgaaccatgtgagaaccgacattctgggaaaagatatagaaactccaaagaaacaagtcgttgatgttccaagctctttcgagccagaagcatcgtttgtggttttcaagtctgtaaacggagaagaggctaataccaatgttcaagttgatgaaaacaaaccggatcaagagcagcagctgaagcaacttgttgaggaaaggattcgtgagatcaagttggttgctgagaaagtctccaagagtggtcaaacgctaaaagtctgattggaatcaaaactttgtgagtcttttatcggaagttttttgttgaatgatcaaactagaaatctcaaactttgttgatcttctgtaaggagtaaggacaaatctgtttgtagcgctatgttatggaagttgagtaaactaatgtagttccggttatgatgtttgttgtcacatccagaaccataaattggaatattccgattgaattttagcaaaaacttgatataaaccgacgctggttgaaccaaatataccgggcaaaccgagaaagatactagtcaaggcaaaaaaacaaacataagaagaacaaatctcgaagggtgggacttttgtgccgtctctatagggagaagaatttgttttcgtgttctattgataaacgaatttgattttgacagagtgaggcagagagagagagagagagagtgagagatg

SEQ ID NO: 1448 - DNA, 3000 bp, Unknown
  misc_feature (1)..( 3000): cDNA_ID_3062414_gDNA_ID_1620403_Annot_ID_156024 3000 nt of promoter + ATG
tcagtgttaatttttcatgtgatccagaaatctcctctaaactggtatgtccatcttctaacactatctgacgggtttctctatatctttggctgcctgttggtcaccaaagccacctctgtgtccttcaggttgatttagctttagaagaaattgtacggcttcaaaaggaaggcccttcacaggaagacatttcagctatccttgaaatcgaacaaagagctcatgaaaatggcatgcaggtattttttattgccataatcatcacaaatccatcacagccaaaaaaccataatttgctgcagaaacaaaactgatttaattttgttcttgtcaggaaaactattactggttagacaggattatacgtggatatcaatcaagggtttacgctggcgatttgggcgcctcttgcaaggtcagtttagaaaacattttttgtcaatactttgatcattttttataaacacagtcttacgaaaagggaagaaacttctctgtggtttttagattttagaagaagggcgtttgcgaatgagagagtcacttgcaccacaaacagcacaagctgcattacagcgaatccttcctcacccgtgcaagaaacagtacactgctgttattctcatgccgcagagatctcgttttggatttctttcatctatctttagttcacgatccgagggcccttatatccgtgataccaaggtcagtgttcatctgttctttgtcttgtctccgtaaatgtaacattgcaatcactaagatatgaatttggatctttggttactagattttggctggcattgcgggattgggtgttgttgtttttggcatctggagatactctcgcaagtagaagtatgaactctctttctttcaattttctgattatttaaccccaagatttcagagtttttaaatgtatctgtgaacctcagcgtttattatgtaagttcccattatttttcatgaatatagaaacacaaacttatttgtttgctacattgtttgtgccatgactatcatagttttcaacttttggtctatacattgagacaggaataagctaaatccttctcttcagctagctctcgtgcagagtcatccattttctccctcgaaaactcgtctatactgagtccttgtacgatcttccaactccctttctcacagataaccggaaacgagtaaaccaaaccaggtggtataccatatgagccgtcagaacaaacacccatagaaacccaagttcctttaggggttccaagaaaccaatcacggatatggtcacaagctgcaccagcagcggaaaaagcactcgactgtttccgtgctcttaaaacagctgcaccgcgttgctgaacttccacgataaactcgttcttcagccagttgtgatctgtgactagttcttttaacggtctgtctccagtttttgtagagactgttgcgtgattggtgtcgggatattgagttgaagaatggttaccccaaacgatcacgttctttacactgctcacgggaacacttagcttatctgcaagctgagctagagctcgattatggtcgagtcgtgtcaggcaagtgatattttcttccgggattgatggcgcaaactcttttaagatcagagcattagtgtttgcagggtttgcgacaacaagaaccttgcaatcatctgatgcataacgctctaaagccgaagcttgagctttatatatcacaacatttttcgacatcacatcttttctttccatgcctgctatccttgggaatccgccgatcattatcacgatattcacatctttacatgcttcaacaacatttgttgtcgcgataacgcctttgagaagagggaaagctgaatcttgaagctccattttcacagcttctagtgaacttgaagctggctctatatcaagtaaatgcagaatcatgggttgatctggacctagcataatacctcttgcaatcattggagcaattgcatatcctatgtttcctgttcaatagaaagttctcaattaaattaagaacaaacgaccataaaggtagggagtagtagataaaagactccaataaaaaaacactgaaccaaaccaaataaattgatagaattataaatcaaaacataaaccggatcgttttttgtttgagttcttacctgctgcaccggtaatcaaaacccttataggatctttctcaatgtttaacaaattacacatgtatattatcattttccatgacaaaccaacacaaaacagtagaaccaaaactttctgaatcacaaaagtataattaatttcttctccaacgaactccattgttttccaagtaaaaaagataataaagcaacgaatgaatgtcatgcattccaaagttcaatttataaaaccaaaaaaaataatcaagaagacataaggaatctatgaaaagcttctaagaggacataacctgatacttaacaaaacttcgtcttacaaaaaatctaagtcatgcaacaaaaacaaggaatctataaaaagaaatgtagccaaataaagatcctcaaacttttatttttgttggttaacatgggtgattaattaatcgaaccaatcagtttaaattcgagtaaaacatttacttcatatgtatttgggccgtaaatgggctactaaaataagaaagcgtaagagggaaatgccaagcataatagcacaaaaaataggcccattaaagcccaatcatttatttattttagggttaactcaaagtgccgcatatatatgcttagttctcttccttcgtcccctttctgtctctcggcgttcttcaatcgaaaggtactactctctctctctctttctcaatctagctcaattctgtgtccttgacctagctttgaacagatctgtttgatttccggtgaaaagaatcgattttgaagtggttttttgtaatgggtaatcgcaggtaaagagtttgaagaagtaagtcacagagaaagagaagatg

SEQ ID NO: 1449 - DNA, 3000 bp, Unknown
  misc_feature (1)..( 3000): cDNA_ID_2045994_gDNA_ID_1620403_Annot_ID_156021 3000 nt of promoter + ATG
aattcacataattctcatcgattagagacatttaggtattttttgtatgaaacttgatcataggtttaattatacataggccaatacaaatgtctcttaggtaatgacgataatggaattaaggattagaacataatttgactgattctaaaattcaggaaggtgttgagtgggagcacaagagcaaaatcgctggtaaaatgcatgcttgcggacatgatggtcatgttactatgcttcttggggctgcaaagatacttcatgaacatcgccaccatttgcaggtctatgcatttttcccttttgaactactttcatcagtaacatttggcctaacacattttgttttgttttgtttagggaactgtggtgcttatctttcaaccagctgaggaaggtttgagtggagcaaagaagatgagagaagaaggagcgttgaagaacgtcgaagctattttcgggatacatctttctgcccggattccctttgggaaagccgcttcacgtgcaggttcatttttggctggagctggagtcttcgaggctgtaatcactgggaaaggaggtcatgctgccatccctcagcatactatagatcctgttgttgcagcctcaagcatcgtcctcagtcttcaacaattggtttcacgtgaaactgaccctttggattcaaaggtttcgttttttactctttgatgatcttcacacctggtctatacattatagaacagaactcattgaggtttcttctgcaggtggtcacagtttctaaggttaatggaggcaatgcttttaatgtcatccctgattcaatcaccataggaggaactcttcgagcctttaccggatttactcagcttcaacagagagtcaaagaggtgatgcgacccaagattgcgcctataatatttcccggtattgttgctttacccatagaaccaatctccggtttcaacttttgattctaggtgattaccaagcaagcagccgttcaccgatgcaatgcgtccgttaatctaacaccaaacggtagagaaccaatgccaccaacagtgaacaacaaggacttgtacaagcaattcaagaaggtggttagagatttgttgggtcaagaagcttttgtggaagcagcacctgtaatgggatccgaagacttctcatactttgcagaaacaatcccgggccatttctctctactgggaatgcaagatgagaccaacgggtatgcatcgtctcattcaccactctatagaatcaacgaggatgtgcttccgtacggtgctgcaatccatgcatcgatggcagtacagtacctcaaagagaaggcttctaaaggttctgtctcaggctttcatgaagaactctaaaccttggttgtagacaggttgttcatcggttattggttcagattcagaagcacaaacctaacactccattgaattaatcaagtgttatcgtacaagatccttgcaagtgttatagaatgatgaaaatgtatttaatagctaattttcaattggcaaattatcaacttttaatagtctgtgtaaaagtattgacagaaacttagaacacgaattatgatcattggtcttgttgtaatgtattggcaaaaatcatatcttatgtttaattgaccaaaatcataagtgaaaaaacagtatttcatagcatagaatcaaaacataatagttcggtgccaaagaaaacaaaaagttacaaatgaccttgagaagtttcacgacaacatctttctctctaacttcttctatttctcagaagagttgggtcctctcttctttccgaaaccaacaactgcacaaatcaatgaaccattactaaccaataatagatacgcaacgtaataagcatttgagtcaaaaccaaatgataaattcagaagctctagtctaaaacatcgaaccacaagtgttccaatataacacatttctcgagtattcacaattcttattcaaattcacaatattattaaccacattcaacaatgcagtagtatcgctttataaaaatcgaattcaacaatgaacactaacacactgtaaaggaatcaacaaagaaactagatcggaaaaattacctgcggtgacaaaacgacggttgtgctgcagacgcttgtgagcacgacctctgggcttctttttcttatcttgcttcgcaacctttggagtttgtcctctaaccttaccggcacgagccaaagatccgtgaacctttcctgaaatcgttaaaacacacttaacgtcaacagatccacatcagaagaaaaatcaaaagctaatctataaatttcaagaagtttccaaggattttacccatgattgattagcttctctgctttttgttcctccgttccgccggctgcaagaagctgaaatgagttcgtgcgaaatctcagaattagggttttcgagatgatgatacgtatttaaacccgataccgaaatatattgggctttatgggcccatactaactacttaattactattgggctttattagctcgaatatggacatctgtaaaactggacctataagcaacacaagtttgacaatataggaatacaaaataattcgaattcagagaaaaattatctctactttaataggtctataacgtttgcataatctaaaacccaagatattttggaaacatatttctattttaataccattttccactaatacttttcaataacagtagttgtttccataaataacgtctccactaattgaataaaatgaaatatttaacgaattattaattgcgataattagatacgaatcaaaaagattccaccggcttcgttggaaactttaagatatttccgattttaccccatataaagggaagatccaacggttattcttacatctctcaatacgcagccaaatacactctctctgaaacctctcctcttttagggtttaatatcaacgcctccaaaatttccgtgcttttgttttcgtagataacgaaca

SEQ ID NO: 1450 - DNA, 3000 bp, Unknown
  misc_feature (1)..( 3000): cDNA_ID_3062427_gDNA_ID_1620403_Annot_ID_156012 3000 nt of promoter + ATG
agttttccccattattattggttttgggtcagaaaccaaatagttttcatctaaaagctttgaatgtgaaaagtgctccaccacagcacgcagagatgaaccctcaaaggaggataagaatacatgttggatatgaatgataactaagccatcctagaaggatttatataccgctcgttttgaaaactatcatattatatagtcagctattccaacataagggggagaatgtatacagctggtgaaaaagataaatagaaatgaattatcaatgatcctcggaggaaagaatgtatattaagagtccaaaaaataattcaattacagaatttagcgttgtaattgccagacgcatttgctgacctaaataaagtgatgaagtcacctataccagttataaattaaatgctccagaatagaatgaatgtcctgtaaggaccaatttcaaactgctattgagtcttaagatcacattaaacataatagaccttggttccaaatagaaatatcctcgtaaaagagaaggagcacaaaattaaaaatgaccaaattgaggaaataaatattttgatgatctctcgaagagagtgaatgatctctagaagacacataaacatgacaaatgaaacattcaagtacttgacaatgaagagatctagctagctatgtcatgtcaaaatataatggaatcaaaagcaaatcgacgtcgtaatgtatttgcatgctatgagcagttgatattatggacaaaaaggaggatcatgaaagaaagtctattgaaaagtgtacacaaagtagtgattagccaaaaatggaaaagaagaaatagacatataattataatctctagtagagatatttggactagtagactatgcacatgatgtgtaaaaacagtggaagataaatgagtctttatgtgaaagaatagtgaaattaatgagattttcagaaacataagaaatgtattatgaagagatatattctcttgtggtggatgtaatatttttaagtatctaaagtctggcaataagagacggaacactggatatgacatttatatgaaattcttgaaagatataatctctgaaggattaattatatgagaattatgttctctagaactctactcgatcgaataaaaagaaatatgtaacatgacatataatcatataaatgtatatttacgttgagtttgtcaaaatatattgatcaaactaatatttattttgaaaatcattaaaactcctacagagttatcataagtaatacgatgccaataatctatgataaaatatcactagataatgatatttataagtctatatgaaacccatataattttgatcattaagattatggttattaattccaacgagatattgtatttgattgaaaatcatctcctgaagaagatgtttccgagggggagattgaatgatatgcgtggatgtaccctttttccttatcatagtttttatcccacacgatttttctatgacaaggtttttaacgagacattaaagaacacacaaataatacacttgatgaatattaagaaattctatcaatcatccaaatgaatattatacactaatgatatttagagaaataaataagatggtcaagatgaatcatctaaaagattcatgagcagaagaatgacgttgtactttatccagaaatttgttcaagagaagatttggcagacttattttcaaatactgtttattctctgccacatcttctaatcatgcagagattttactaattcatgaagctagccgcgagtgtgtatggctaagatccatagttcaccatatacaagaagactgtggtatgtatgcagggaaaaagactccaacaattatgtacgaagaaaatgcagcatacatcgcacaactcaaagacggatacatcaaaggcgatagaacaaagcacatcctaccaaaattcttctacacacacgatctacaaaagagcggcgatgtacgagttctacagatccgtttgaatgataatctggctgacttattcaccaaggcgctacctactgctactttcaagaagttagtctatcgtatcggattacgctgtctcaaaaatctcgacgaatatactcataagggagagtaattgtatgttgcactctttttctcttaaccatggtttttcccattgggttttcctggtaggatttttaatgaggcagcatttcaaatattttacgagttatggtactataatggtcatcagggggagtgttatgaataaagatggatgcccattataaggcccatcatctaagtccatcatctagatgtttatagggttttaccctttccttgtactcctatataaaatagcatttatctcaatggaataacacactcatttcttctatctctttctttgattataacaattttgtaattttgttgatttttttttactcttaacattaaataaatttgtataaatttaaacaataaaatgaatggatgttaataaatagttaagaaccatcaatctttctatattaattgaaagactgtttttactatgataatttttacaacataagtgtgaaagcacattattacatgaaatcttgggggatgtaggtgtaagaatctaaaaataacaacaatatccaaagttattgaataaaagttcatactaaatgtcattttagtacttaatttatttatttacaaagaaaacttcacactttttgtgaaacacaaatatgaagttgtttaatgagatttattatgaaatgatgaatattttagaaagaaaatgaaaaaagagaagattttgaaggtagaaaagaagaacacaaagatcttagtaggccttatgtaatgggccttaatatgtttttcctgtaatggagggtaattttgtaaatatgtctaatattgttgaagaaaacgttttttggtgaaattcgttgaccaacaactctcactctttgaagttgttttcttcccggcg

SEQ ID NO: 1451 - DNA, 3000 bp, Unknown
  misc_feature (1)..( 3000): cDNA_ID_2046013_gDNA_ID_1620403_Annot_ID_156016 3000 nt of promoter + ATG
gacaatacgagatctaccaaaattaataaaaggtaaaagaatgaaattgataagatgagttgatgtcattaatatgcatatatgcgtgataaaagaacacatagacaatttcaaaacatgacaataataaagaagaagtacaaacaaatatcaagattaccagatctgcgtgagatcgattggatagggaaaatgtaagaggaagaagaatttgataaagacgggagtgatctcaatatatatagtagagaaaaataataacttgtgatttatgctttttaagtattataattattgttattaatatctctctttgtttccagaagagacacagaaacacatgtagatacgactttaagtactgaaaaatctatgtcaagtagataaagaaatgaagaagaaatgaggaagacgaagagtaaaggaaataaaaggagttgagactgaaaaggttaaaaaccctaattttactctctcttgtcttgtgcgactcatcttcagtctatcgaccaaaccttttatttatttcctttttgttttatctatctattttatttattattattagtgtattcgtattctaaggtggtatgtattaatattataataggctttgtacatacaaaattagtattactcagctaaatgagacatatcagaccatgtcaactttttttgagcaatataaggaaattacgaattgtgagatatttataagttttagttggagtcaagctgtaaaaaatgtaaggctttctttttatcaaaaagataaaaatctaattttaaagattttatttaataatcttgtgctttaattaactgttgaatctcgctcttttgtttgaaataaatatttgtttgtacatccattttaatagtataaaacctggtaccttctctgaccttctgaatgtttttgaacataattacggattaatttaggagaagattatcaatatttttaaaataaagaacgcaggaaaagaacataggaaacaaagcatttaaggataatctctttggattatagggcaaacacatgtttttaagaatctttttcttttttgctttctttcacattatttgaaatatgtaacatattcttgtgggatttgaacccaatggtcctacactggtgtgggtccaatgatgatgtcgggagatggggcctagccgcagatttgtttgaacaacagatcaaacggtcatcatttatttgatctaaatgattatattaggttttgcattttttcttctcctttgaaaagatgaaaaacgaaaaaaggtcagaaatctactggagataagagtaccgtctgagactagaataaacatagatatcagctgaaaaaattgataagagtatgataatgtgcttattcagttttattattaaaaaaataaaaaaattagtctgctacgaaaacacaagtatacatactatagttgataagagcattatccatggtgtgtagtaagtaagtaaacaaaccattatatttggattaatcgagtattcagcaaatattcatattgtcttgttaatgattaagagcctagaagtctttaaaatatccatcaagattcaaacattatgactcaaactagtgtggtgttgtccattatactcgaaacgaaatggtattttttcaacttttgcttgtaaaacttagccagtgcatggcctttattaaatcaactattgggtcactgcatgacccatttatcaacctgtaactgaatattgggctttggcaaagatccaattagcttcattcgtatttcagaaatttgattttatatccgactgagtaggtacgtatatgcaatacgttatgtcctattagccttatgggactcacgggtacttatgcaggagatggattaatttcatatccatctgcaaactaaatacatttattttcttatggcaaaaagccaaaaactatgtaacgtttaatttacgaaaaaaaaaatatttaatatttgggttatatggatttttttttattttttttttttttttcgggacattagcgagagtcatagtattaaagaaacagtaaaaacaacgaccagatttaatgcaactttattactactttaattcagattcgagaattgacaggcaaatacgcattattttagtacattatgaagaatcatacagttacatatttcacatatatattgttttaaagatgtaaaacgactaagcaagtatgtcatctgatagcattatgaactaataactttttgtcaactctgattttcatttttaaaattattatatcttgttacctctttgtaaccagcaatagtttcttgacaacaaaagaatcggcaaatcaatgaaaacttattaaactaacacacaaaacataaaaaatagtgattagccgacacaacaaaattggatttgtctttctctctttaaaagattttcacccgaatattcctaaagatctgaaatactgaaaatatcacacaaaaaaatccaaaaagaaaaaaaatcattttaaaatttagaacttgtttttcaaggcccaaaattaatcgttgtcaataattggaaacttaaaaataaagtcttgttctagaagaatgtgaatcatcttctccaagtttcaaacgttggtttttttccccactgtgatcgtcagctttatatattatatacacgagaatcttgtacccaattaacatatacatacatgtaaatgtgtgtatgtatataatataaaattattctccttttcactaatttttcttcaaatactttaatgcccaccacctgttcgatcaaattccccatctcgaaaagctagaactttcttcgtctctattggtctctcactctctctcttacctcttctcatttgttctttctccttctaaattgggttatcaagtatattggatcaacgggtttgattcacgatttgtcatttcatcttcgtggagagagtttgatctgatttgttgatcgtcagcgtt

SEQ ID NO: 1452 - DNA, 3000 bp, Unknown
  misc_feature (1)..( 3000): cDNA_ID_3062423_gDNA_ID_1620403_Annot_ID_156017 3000 nt of promoter + ATG
tgacaaccaatttctgatttaactcatatatatatatgagactgaaacaagtccacaaagcccgatttttaatgggccaaaaagcccatattgttgatgaaaggtctaaacagtatatgctctgtttagccgttgcaacaaacttcatcatcacataatgttttgttttcttttgagtttttttttgtttctctagctttgatgtcgtaatcttcttccatcaagattaaaggaaacaagcaaatgacgacgtcaaaggacaactataacaacaacaacaaaaggagaatacaactagaacacattaaggttggaacactccaaactaagtagctagataggagacgtttggaggcacaattcgttggtctctcgatagcgggtcaaggcgacaccgaatgaagttcatgatttaaagtattaaagcagaggctggtcttgatgaagcattatgcaatcttgagtttctttccttccaaagaatgtaaattgatgcttaaaatctccgattctgatcaatataaacataaaaggtgtggttttgccaatgcattacaacaagactagcctattaattataattcatgttctaagattatgccagtatgttacagttacacaaacatatcataaaagttgagaatttcccaattgaaattgttctacgaattaaggcttttcatcatttaaatggaattctatcaacaatggagtgtaaatttggtacttctgaattcgaaccaatgaccgatgaggaaactgtaccaaggttgacagggattagagttcgtcatgaaagcctgagacagaacctttagaagccttatctttgaggtactgtactgccatcgttgcatggatagcagctccgtaaggaagaacatcctcgttgattctatagtgtggtgaatgagacgacgcataaccttgggtctcatcttgcattcccaagagggagaaatggcccgggattgtttctgcaaagtatgagaagtcctcggatcccatttcaggcactgcttccacaaaagcttcttgacccaacaaatccctaaccaccttcttgaatttcttgtataagtccatgttgttcacagttggtggcatcggttggttaccattgggtgctagattcacggacgcattgcatcggtgaacggctgcttgctttgtaataatctagaatcaaaagttgaaaccagggtttgttgattctatggtaaaataacatacagagaaaaaaatcaaaaaggatcagatcacctctttgattctctcctgaagctgagtaaacccggtaaaggctcgaagagttcctcctatggtgattgaatcagggatgacattgaacgcgttgcctccattaaccttagtaactgtgaccacctacagaagaaaccttaataagttatactacaaattaagcatagaccaggagagaaatcatcaaagagtaaaaaatgaaacctttgaatccgaagggtcagtttcacgtgaaaccaagtgttgaagactgaggacaatgcttgaagctgcaacaacaggatctattgtatgctgagggatggcagcatgacctcctttcccagtgattacagcctcgaaagctccagctccagccataaatgaacctgcaagtgaagcagctttcccaaagggagtccggggggaaagatgtataccaaaaatagcttcaacgttcttcaacgctccttcttctctcatcatctttgctccactcaaaccttcctcagctggctgaaagataagcaccacagttccctaaacaaaaacaaaaaaatgtgttagaccaatgttactgatgaaagtagtataaaagggaaatatgcatagacctgcaaatgttggcgatgttgttgaagtatcttagcagcaccaagaagcatagcaacatgaccatcatgtccacaagcatgcatttttccaggatttttgctcttgtgctcccactcaacagcttcctgaattcaattatcaaatcaaattatgttctaatccttaatccaaatttctgaaccatagacctaaatgtaactaatcgatgagagttctgtgaattggtactagacctgaataggcaaagcatccatatctgctcttagagcgacgaatggtggttctccggtaccgatatatccgataataccggtgatagctaccggaaacctatacttaactccgataaggtcaagctccgacctaatgaacttactagtttcgaattcctcgtatcccagctcaggattctcgtggattttccttctgattctcaccattgaatcgaaaacctccgggctctttgctaattcgaggaaattgatcgggattcgagacacatctccggcgacgatccatggagattccgatgaaacacgaagtagaagaaggagtagttggaaagtcaaaaagttgtttagagccatggaggaagatgagactgatgcgccactcaaaatatatatatgagactgaaataagtccactaagcccgatttttaatgggccataaaagcccatatgttttatgaaaggcctaagttgtaatgttctgtttttagccgttgcaacaaacttcatcatctcataatgtttttctctagcttttgatgtcgtaatcttcttccatcataatttaaaggaaataagaaaatgatgtcgaaggaaaacttatattacgaaaactgttatgccattgtagtatttgtaacaaactaataacaacgagatatttttgagttgtcttttaacaatgcaaaaatatttgttttcactcaaaagtcgaaagcatgggccgtggaaactcacacgaattgtcttctccacttggctctaaagttagttagtcaattagttacgaacataatcaaaagaaaaagaaaaaaaacgtaaaaagacaaccaatttattacaatttacacatgttcaaaatccacaatactccaaaatttgaaggagaatatactgtaaatagcataaatg

SEQ ID NO: 1453 - DNA, 3000 bp, Unknown
  misc_feature (1)..( 3000): cDNA_ID_2046001_gDNA_ID_1620403_Annot_ID_156019 3000 nt of promoter + ATG
tatttacagtatattctccttcaaattttggagtattgtggattttgaacatgtgtaaattgtaataaattggttgtctttttacgttttttttctttttcttttgattatgttcgtaactaattgactaactaactttagagccaagtggagaagacaattcgtgtgagtttccacggcccatgctttcgacttttgagtgaaaacaaatatttttgcattgttaaaagacaactcaaaaatatctcgttgttattagtttgttacaaatactacaatggcataacagttttcgtaatataagttttccttcgacatcattttcttatttcctttaaattatgatggaagaagattacgacatcaaaagctagagaaaaacattatgagatgatgaagtttgttgcaacggctaaaaacagaacattacaacttaggcctttcataaaacatatgggcttttatggcccattaaaaatcgggcttagtggacttatttcagtctcatatatatattttgagtggcgcatcagtctcatcttcctccatggctctaaacaactttttgactttccaactactccttcttctacttcgtgtttcatcggaatctccatggatcgtcgccggagatgtgtctcgaatcccgatcaatttcctcgaattagcaaagagcccggaggttttcgattcaatggtgagaatcagaaggaaaatccacgagaatcctgagctgggatacgaggaattcgaaactagtaagttcattaggtcggagcttgaccttatcggagttaagtataggtttccggtagctatcaccggtattatcggatatatcggtaccggagaaccaccattcgtcgctctaagagcagatatggatgctttgcctattcaggtctagtaccaattcacagaactctcatcgattagttacatttaggtctatggttcagaaatttggattaaggattagaacataatttgatttgataattgaattcaggaagctgttgagtgggagcacaagagcaaaaatcctggaaaaatgcatgcttgtggacatgatggtcatgttgctatgcttcttggtgctgctaagatacttcaacaacatcgccaacatttgcaggtctatgcatatttcccttttatactactttcatcagtaacattggtctaacacatttttttgtttttgtttagggaactgtggtgcttatctttcagccagctgaggaaggtttgagtggagcaaagatgatgagagaagaaggagcgttgaagaacgttgaagctatttttggtatacatctttccccccggactccctttgggaaagctgcttcacttgcaggttcatttatggctggagctggagctttcgaggctgtaatcactgggaaaggaggtcatgctgccatccctcagcatacaatagatcctgttgttgcagcttcaagcattgtcctcagtcttcaacacttggtttcacgtgaaactgacccttcggattcaaaggtttcattttttactctttgatgatttctctcctggtctatgcttaatttgtagtataacttattaaggtttcttctgtaggtggtcacagttactaaggttaatggaggcaacgcgttcaatgtcatccctgattcaatcaccataggaggaactcttcgagcctttaccgggtttactcagcttcaggagagaatcaaagaggtgatctgatcctttttgatttttttctctgtatgttattttaccatagaatcaacaaaccctggtttcaacttttgattctagattattacaaagcaagcagccgttcaccgatgcaatgcgtccgtgaatctagcacccaatggtaaccaaccgatgccaccaactgtgaacaacatggacttatacaagaaattcaagaaggtggttagggatttgttgggtcaagaagcttttgtggaagcagtgcctgaaatgggatccgaggacttctcatactttgcagaaacaatcccgggccatttctccctcttgggaatgcaagatgagacccaaggttatgcgtcgtctcattcaccacactatagaatcaacgaggatgttcttccttacggagctgctatccatgcaacgatggcagtacagtacctcaaagataaggcttctaaaggttctgtctcaggctttcatgacgaactctaatccctgtcaaccttggtacagtttcctcatcggtcattggttcgaattcagaagtaccaaatttacactccattgttgatagaattccatttaaatgatgaaaagccttaattcgtagaacaatttcaattgggaaattctcaacttttatgatatgtttgtgtaactgtaacatactggcataatcttagaacatgaattataattaataggctagtcttgttgtaatgcattggcaaaaccacaccttttatgtttatattgatcagaatcggagattttaagcatcaatttacattctttggaaggaaagaaactcaagattgcataatgcttcatcaagaccagcctctgctttaatactttaaatcatgaacttcattcggtgtcgccttgacccgctatcgagagaccaacgaattgtgcctccaaacgtctcctatctagctacttagtttggagtgttccaaccttaatgtgttctagttgtattctccttttgttgttgttgttatagttgtcctttgacgtcgtcatttgcttgtttcctttaatcttgatggaagaagattacgacatcaaagctagagaaacaaaaaaaaactcaaaagaaaacaaaacattatgtgatgatgaagtttgttgcaacggctaaacagagcatatactgtttagacctttcatcaacaatatgggctttttggcccattaaaaatcgggctttgtggacttgtttcagtctcatatatatatatgagttaaatcagaaattggttgtcatcttcctcc

SEQ ID NO: 1454 - DNA, 3000 bp, Unknown
  misc_feature (1)..( 3000): cDNA_ID_2046005_gDNA_ID_1620403_Annot_ID_156018 3000 nt of promoter + ATG
tttagagaaataaattacttaaaaacatgaagccatttgagattctccttgtcttcctcgttcataaggtgagtgtaagctccagccttgtgcaatgctacaatacattaatgttaattcatcaatcaaattatgttactaattaagtgtttagttagttaatagttttattgtgcttacgataaaaggaatggtatcggatgatgaatagtcccggggatggtaaggtgcttccattctccttggccacctatttaaccatataataatcgttttgtgaatcatgtaatcataattaatgattatagttgataaactatagaaaggaattaaagaatttaccagatacatgtagtcatcatgtccccatgacataagaacattttcaagtccacagccttcagaataaattccagctttggtattgtacttagggttgttaaaatcagggttttccataaaatactacaatcatggttgaaaaggaaaaaaatatattatagaaatcacttgtttggtaaatattaatcaactaggttctaactatcaatattttgaggatgtcaaaaaaagaactatcaatactttgagtaactagcaaaatatattgagttatatgtaccttgtggtgtacgttagattcatcaaatgcacacccaacaggaaatgtgtcacctaaacggatagagaattcataaatcacttacttaaaattgataagtttactacttagtaaatcaggattaattaatgaaagaaatcaaagattaaacttaccaacaacagcccattgaggaagccctccaaactgtggtagggtaagaaccttcccaagatctggaagttcagtcatttttagtatttttaggattcttataatatgataattttgattcttataagcatgagtttttgtcataaataacaattaattaccatggataagcgcagtgagatgaagccaatcttcgttaggataatctttacggattgcttccgcagattgaagcaaatgttgaatttgtggttcgtcgaggtcgggatcactctcgtccaccacttcttttgaaagttcacaacattcccaaatgttcatcaccatcttgtccaattttccatactcacttctcattttctgtacctgcaaacgtatcataagttagtaacaatatattttataacagatgagaaacaacaatatgtatcgtatgttcatttcggctaacatcgttaggaaagatttttattttcattagtaattcataaatcacgtccatgcaaaaataataggactcaactataatgttgatcacacaatctaataaaccctaaaccatataagatatataagagatcttacaaagtctaaagtttggttagtgtgttgtgttgcatagaaatgttcgacgctcttttgcctctcgctgtttgtatccgtgtagtctctgcaataatttacatcaataaaatcttaaatgttttggaaaacattttagaaatcgtctaaattatttcttgagaaaaaaggaacctgaattgacgaccaaatgcgttcatctcaggagccaaaaacacttcatcatcggatgatatcttcgacattggtatgtcgctgtccaatcgtaactctccggtcttctgcgttgtcgagtcctcatgtacttaaacaaaacaaaaaagaaacaaaaaaacttctatttttacgaaatctcaagataaaatttatagaagaaaaaaaactacaaagaaaagaataacaaaggaagatagatagatgttttaccaaaaacagggttttcgacggagatattcatcttccaaaaaaaaacaaagtaaaaaagaagatgagttatgaaaactaaagatcgagagagaatgtctacgaaaagatgtaatttgatggagacacaaaaagggtatttgtagtggtgatggtttaggagacgataggtactttcctctatatttagagagaaatccaaatcttttgaccacgaaaaataaactttgtccaagaaaataaaaactgtggcatgataaagatctcttaacatttatatacaagagttaatttttttgttttcgttttttttagtttatttactctactgcgtttgtttatgttttgaaatataccaaacatcctaaatccttaaatttactctcttcttgattggtcaactttttggcatattttcttccttttaagatttaggaagacatgtgtcatgttctaaaatagatatagtagactattaacatctatgtgatattcttatgaattatcatagacacatatgtccaagagagttaattatacttagattctccattttcttattcaaaaaaaaaaagattctccattttcttacctttttatcagtgtttttcactttccccccatttttcatatttataacattcacacttattagtttctcccccatttatgctatttacagtatattctccttcaaattttggagtattgtggattttgaacatgtgtaaattgtaataaattggttgtctttttacgttttttttctttttcttttgattatgttcgtaactaattgactaactaactttagagccaagtggagaagacaattcgtgtgagtttccacggcccatgctttcgacttttgagtgaaaacaaatatttttgcattgttaaaagacaactcaaaaatatctcgttgttattagtttgttacaaatactacaatggcataacagttttcgtaatataagttttccttcgacatcattttcttatttcctttaaattatgatggaagaagattacgacatcaaaagctagagaaaaacattatgagatgatgaagtttgttgcaacggctaaaaacagaacattacaacttaggcctttcataaaacatatgggcttttatggcccattaaaaatcgggcttagtggacttatttcagtctcatatatatattttgagtggcgcatcagtctcatcttcctcc

SEQ ID NO: 1455 - DNA, 3000 bp, Unknown
  misc_feature (1)..( 3000): cDNA_ID_1035346_gDNA_ID_1620403_Annot_ID_156010 3000 nt of promoter + ATG
atgttactaaaccattttgtgtatgaacatgaatttcaaaatgttaaacacttatcccaacgaatatccaataatggttattataaataaacactgaaatactcttgtactttaatcaagaaagtaatctcgcaaactctatgttgcgggtttataacaaggataaatatgacctttttgtcgatgcaacaatcgagtcaatgcgtccattgaatcgatgcatcttttataaccattaggtatctaaatgtcatatagtgggtgatcaacccataattatctccttgtatatacttacgaatagataaagtccaaattacttacactggtaaaaatcacattatcatattgctttttgagcaagtaacatttgataaatcattagggagaattttatggtttttcacctaatgtccacataattctcaatactttcacatcatcattaaaccaggatgaccaatccggttaagataaatatacttttgaaatttttaattcatttgaaacttctagttctttcaaaacttctaatttatttttcattgcttatcagttactcccttaatgagatcttataatcaaaattacgtccatgtattttaataatcaatcatatgttaataaaacaataacgagataataattaaaattttatattctagtataaacgatattaaatttgactaactatgtaagatcttatattcacttcagaatatgagtattacctatcatcgataactcatatattttcttagcctttgaaaaacactcgatttaagtttataatagttctcaaaatttctttcaaaatattgtgtctacaggacaacaatacttgcgtaaaagtttaagcgtctgttttaccatctctgcatcatagatattctcttaacaatgtgagttatattcacaaagagacttcaagtcttgaagtttcagtaataactaattatatcttattttatctgataacacattcgtataagaattgctttatacaacttttagatctttagtagtcaaagattgaacataatcttctggatatgtcacttattatcgatgtgagattcattatttctcctcctcgaaatgatgaaacttcaagttcatctatctcgtttttaattccactctagaatcataatgtattttatatctcatcatattaactttaagatttggagaattataccccatcgatgattttaattttgtattcccatagaaagcaatgtatatgctcttctagagtcttttaataagatttatactacttgatatactagattatttcatcgttagaaatttttcttatttttttttttttttaccatatttattttctcaatttctggtgataatttaagttcttgaaaaaactttgaccatcaaaaatatgatatctttttaagatacattaaaatagtcattcataaaaatttctataagtgattatacctttaaattaagttatttatcaatcaatttatttcataaaataatcaaatattatatattaatataattttaatgcaatattgtaaaaccaatcagaataaaactactttgtgcaaaatctggattttacatatatcttgacaaaacttttatttagggtaatatgaattcgtgcaagatttgggtaaaatgatttcgtgcaaaattacgacaaaaccatgaacaatttttttttagataccacaaagatttagagaaaagaatcttataaaaagaaaaattatcttgcaacgtttttagtaaaaataataataacacaatcaaatatatggaaatcttataaaaagatttagataataataacacaaagatttagatatatggaatcttataaaaagaaaaattatcttgaaatgtttttagtaaaaataataataacacaatcaaatatatgaaaatcaaatatttaatatggaaaagtcaatatctaaaagtgataagatatgtataacgttttaatcaaaggagttaaataagggatatcatatcaatcataaatggattttagacaatataatatttataaaatgatattgaatatagatgcaactattcaaaactggaatgctaaaacattaatacatgcttgcatcacccaccaccgggttatgaatagttacaaagttagttatataattataaaattggtaatttatatattcaatattgtaatagtaaatcacaaaaattaacaattaacaagcatgattctcttctttaacgattttctttgtagaatcattgaatcatgcgatagtaattatagaaacaaatgataagcattattctcttctttattgaatcattgaaaacatgcttttaccgatctatactataatcatcgatcggctcatattgttttgtttcaataatagaaaataagtactatgaaccatgagtcgataagtaaacatggttcttaaaaaaaatgtaagaatctctatatctaccttttagaacgtgctgataacgtgttataaccagagaaagagataaaagaaatgagtgtgttattccattgagataaatggttctttatataggagtacaaaaaaaagataaaaccctaaaaacatctagatgatgggtttagatgagggccttataatggacatccatctttattcataacaaaaatcaattataatgaaaatcgaaacatttgtttttttttaggaaaagaccatatttaattaaatgttttggttttccttaaataagttttctatttttttatttatttcctcccttttcattataactggttgattttctaatacaattttcctctttagaaactattaaaaagagctgtgtctggcacgtgtcaatcatgtataaaacaatatatttgcgtaaatgccattgccacacactcactcactcgtagtttcgacgctatctctagaacattccgataaaccacaaagaagaagcagagcaaaagtaaagaagaagaagaaaacaaacatg

SEQ ID NO: 1456 - DNA, 3000 bp, Unknown
  misc_feature (1)..( 3000): cDNA_ID_2046035_gDNA_ID_1620403_Annot_ID_156009 3000 nt of promoter + ATG
gtttttgagtttaattcatgaaaacagagctgttcatgtttgagtttaattcatgaaaaaaattactctcatatgttattctccttatcttttgatttggccttaatgaaatgtcatagtttgggagaaataagttttttaacttgactaagtctatttaatcacataaaccaaaaccttgtacattacataaaaaaggaagaacacaatgaaaaataaaatctcattcaacttttatagtcaagtaatagtctttagagacacattacacaatatcatgtatcttatcatatcatataccaaatgcaaatgcagaagaagagggcttacttatctaaggtagttaacaggtggttccagagtgccaacaagtatcccgagatcgatatccttgtcctcaaacttttttatgaatggatgactctgagaacatgaacaaacaaatcttagaatgtttcatcagagatactaataaccaagactgaaagagggtggtgagtaggaattacttaccaagaggtccaaagatgatgctcttgctggaggatctttttgtatgctgttatgaatgtaaagaagaatcatttaaccattagttttaattctttgtgtgccaatgccaagtatatgaagatgaaaataatgagttgccacttaccaggctgatacaaaggagcagaattcaggtgagaattgatcagaaggagcagttggtggtggattctctactattgctgccaagagttcataaaagcttggcgggttttgctgatcttcagattctaaataaggaaatcttcctattgcacattctaacactgacatccccaaactccaaatgtcactgctgtagtcatatgtgcttccactaatcctctcaggctgtgaagtgaaaaaagagacaagtcatgattatgtatgtatacaatacagaaacatcaagaaatttgtaatgtagatgatttttggaatgctttcgtaccgacatatagttgtaggttccaacaaatgtgtccctctgtcccatggagctagcaagacttgcacttacaccaaaatctgagattttcacttcccctttatggtttacaagaaggtttgatggcttaatgtctctgtgtatgacatgtctttcgttgtgtaggtacacaagacctagcaaaacctgttcacaaggaataatataagtaagagtgaccgataaatcataagaatgctttgaataagctggtggtgtatttgacctgtttacagacaacagcaaggtaaggttcaagaatagtcttgacttgtctaatcacatccgcaagagatccacggtccatgtattcaagcacaagcgaaaaggctccattgtgatagaaagaatggtagcaaactactacatgtggacattgtgatgatgcttggtttattttaagctcctgaacaatttgcttacggatttcttcttgtatattcatctgtatgacctgtgattcataacataagcaaactcaaaccccaagtctactcaaaggccttagtcactagcataaaatcaaaagaaagaaaaacaagtagtttaccttcatagcaaagaatttgccaacccatttatgacgaactaattgaacaacaccaccactgccttttccgatgactttgacagtctctaagtcttcagcagtaatttcgaaatcaagctccttgctatcagattgctataaatggaagataaaacacatacacaagaaatctcctttaattctctggaacattgaggtctctcataaaacaagatttagggttgaaaaatttacccttgattgcttctcatctgacgtcaaccttagccccttttgattcagaagaaaatctccatcgtgaaatgttccactcgcagtcctgttttcaaattcaatgaaatttcacagaatcaattcaaacccagaaacaatggatcaaatctaatcgattcttgtttacaatctcgccaaacaaaacagatccaagtaaagaaaggagaaatcgcgaaacttacaggaaggaagagattggggattcttgagctggaacggagagcttaagctgcttcaagttcgatttgatcttcaccattttttttctttggtttcttccttgggattatcgctctctttctagggtttctatctaaataagcaatttcaagaaagtgttaggaagtggagagaagacgacgaagcaatcaataacggactaatttattttgaacgcgtaagaccgggaaaagaaaaaattatacattaagaaaaacaagaattaaatcatttgggctgtaagatttaaatgggcttgaattgataaatataagatggtacggcccattgcttatctctggtatatttgacagctggcgctaagaaaagtcttaattgattttctctttttttggtatcggaaaacgttttgtgtaaattggataaacgaattatattacttttttttttcgatttgtcggtttgaaattaatatttttcccacactttaaatgtataagcaaattaatgtatttgatatcgaatttattaagagcgtataaagctcacaaattcaattcaatgggaccagtttaatttaaattatattggggtagttttcgagaataggcataaataacgggggagtaatgaaaaagttggaaatggtcacaaagcttagcggaatccagacaagtctatcaaatcgaatttattgtactgcctgaggcccggtttgtttccgaccagtgttcaacttctgacaagaaaaaaacaatagccaagaaaaaaaaactaaattagtttcccactctcgctgtagagagagagagagagagctttaacgaagcttttgttttttgtagagagagaaaaagcttcaaacttttttcactaaaagagagaattaactcgaagaagaagaagagctgccagaagataataaagcttccttctttcgagtaaaggaagcaaaagcaaagtgtgtagttactcagca

SEQ ID NO: 1457 - DNA, 52 bp, Unknown
  misc_feature (1)..( 52): cDNA_ID_2046139_gDNA_ID_1620405_Annot_ID_156066 3000 nt of promoter + ATG
gatctttgttttcattaggtttttttaaatcttccaagtgatgttgacaatg

SEQ ID NO: 1458 - DNA, 3000 bp, Unknown
  misc_feature (1)..( 3000): cDNA_ID_4262380_gDNA_ID_1620405_Annot_ID_156084 3000 nt of promoter + ATG
atggaaaaattaaacatcccaacttgaattgttacaagatcttgcttataataggtagttattaaacatatataccaaccaaacctttcttctcctcaactcctccgcaaataaaacagaaataatattatatttatatggttttgtgttttctttttcttcttaaacgttgagattgttgaagtggtcgcacctacgtctcacttctccatctttatcgcccttgacgccgaccgtgccaagtttctccatcgcacgagcgaaatcctcaaagaatgctgtctcgttagttgcgtatagatccacaaacggcttggtgctgttgtctttaataaggatgtggtcagacgctaaaagccctagccctcgctttaggttcttgaagtacatgttgtcgaactttcctggagtcatcacgtcgttaaacgcggcgattgtatcatccacggtgtggtttttgcaaagatctttgagagcggctgcgaatcgcgggttgatttctttatcagcacgggatccgtagagtctgtcggaaaactctttgcagtgagagaatccaatggtgtgagccccgcttaatgctaccatctcgcgaagactaaaaccgtttttcttgaatatcccgtggatgtcaggaacagtctggtttgccattgggacatttcctctgactttatgagctttggattcgaatccgtctttacgaccaagctttacgtcaaagtaaggtcctcctaccattgtgacaaggtcacgtgtagcctgcgctagaatatccgcgcatgatactacaccaggacaagacaactcgagagctgtcttgatgcgggtgacgatgtcaaaagcatctcccgggagggaatcattgagatcatcatcgcgttccgctttgttgaacgagttggtcgcgatcaagacagatgcatcacaaccttcaaggaaacaatcatggaaaaagagacggagggtcccggccgcagttgttggttgttggacttgtttggttgtaacggcttcacgcacaattttgtggaaatcaggacatgttttttggtaatagtccgttctcaagatagcgacatcagccgatataattggtgcaaccacggcgagacagaagaggataacaaagggattaaaaccacgagagaattgcatattcgacatcagataataacaaacaatggtaattgaattggatttgtgagagagatgtctacgaggtagacttctctacgatcgattgtcgtcgaaagcaattagaaacgaagacgaagaaagggcctttgcgactatttcatggcttaggaggttactaagaagaggctacgtaaaggatggttttcatttccttatatgtacgtgtggttgtttttcgtttattcttttctatttttgtaatttatctattttttgtatggttttggttgctttgaatttgttttggttctagaaattttcttatgttcgacaaatgtggtaatatgatagttgctttaataggatgcatacacacgtgaaattgataaatacgagagaatagaaactcatgtgaaggaaaaaactaatattaattaaaattattcatttcgcacaaacaaacaaacaaattaaaatcattcatagtttatcaactaaactttaaacttgacgttattttataattttgttgaatcaacaacctgtgaaggtgaaggtgccaatgattgtgacaacatgatgtttggtatgcttacgttaatttgatccaagaacagttttctagcaaatgtttgatgaactagactcaaataaaaatacctactcatgtagaaatcacgcaagctcaacattattagagatctgattgaatttgatattttcgtcagattcgtatcaatctcaattttgtattacatataacgagcctaactctcatatggggcagatctttttgtaagttcgaatgagagttatgcctttggtaacataaattgctagaccacaaaattacatattttcttatttaacctacgcaaaatcgcaaatatctaagagtgcaaatgatttcataaaggaatttaatggaataaatatatgaataaaaaaaaagaagatgaataatgttattcaatcaattccacctgcgacatagtaaaaaaaaagagttgaataattattattttttaattttcacccttttcaatgtaatcatttaaaaaaaaaaacttttttgtcatcccaaaagtatagaattggaagaatggtttattataccacttttattcttctagctgtaccatttgcataataagtttctctataccggaaccaaattcttgtattttctatattaaatattctaatatgagaagttgaatgttaagaatttttttttacttatcatgctatcttattatagaaaatttggtttctcaaaagtagttattaacataatctaatatgagaagttgaatgttaaaattaaatatttacttaacatgtgaacttatcatagaaaactttggtttccaaacttgttcataatttttttctaaaataaaatagtaaaaaagtaaatctaattcaaataaaaataagataatcaattatttaaagtgttagaaaaatagagtgataaaataagaaataaacatcattcaacaaacctaaatatttagaaatatgtagaaatttaattgaaaaccccaaaaaaatatgaagggaggctttggtgtctaaaaattagtaattgggcccaatatctcgtgcgcaaagcccatattacatagagcatggcgcgtataaataacatacatcttatgtatttatctctctcacgcgcccctcttttcttcttcattgacacggacattcgtttccaattctctctaatgtttcactaaagcgcatacataaccctaaccctaactctctcgtactgcacaaaaaaaaaaaaaaaattgaagaagagcgatacgatcgtaaccagggagcttgatttctcccctgatttttcta

SEQ ID NO: 1459 - DNA, 3000 bp, Unknown
  misc_feature (1)..( 3000): cDNA_ID_3062496_gDNA_ID_1620405_Annot_ID_156085 3000 nt of promoter + ATG
cagcaaacaggtaaatggttatgcaaagaaacgggtacctaagtagcctggggaaaaaagtcttcggtccgtaaatccttttggcttatatgttttgtttttgccttgtattattaatatacgctcatatgctctatattattatagtcagatatctgaagcctacccatatttaaaattggtggtggtgtttaatggtgatattgatatgatttacaagttcttttgctttatttggtttttatttttttcacggtctgaattcatgatttgtgtgcaagttttggtatcattggcttatgggcttgtccaatctgaaatttgttttggatttctaagtttcgttaaaactgattcgacttgaattttatgttctcaaaatatctctgagttgaagaatttcataaagattatatttcctaggtttagccgacatgattttgttgtccctatgatttgtttttgagtagatagaaatggttgggcagcattggctaatgaacacgaacatgttaaaaaaaaaattggacattagaatatcatattacattttggtgtcttagatgggttcttcgtgacctttgaacacatgtcatgaccatatgcgactgtgatgaatgagactcttagctatgtggacccacaagcccaaaaatctttttcgaagcgacacgaaacgctctatgtgtttctggtttgacctcaaacagacaaagaaactctcctagtttggctacgtcctctcgaggttttcgttttggctttaatttcaaatacaaaaactgaaagagataggaagtagaattatattatatattaagtggaagataaagtatcacgaaatgtgagatgccgtgaactttatacctgcttactagatttttatgatctagttggcccttctaaatcaatctcttaaattttccctaaatattggcttttgtcacgcctcaaatttcttcttttcaaaactactgaaacatgccataaaaggaaacaaaaaataaaaatatctacctaacatttttcaactctgttaagcacatatctcatctaatccttaactatgaaagatttcaatttcatttcttagtcttctcatctaatatttattcggaatatggactgacatgaatcaatagagtaaccgtctcgtatattttaaactacattagatatttttcccttaattttctgtcaacaacaaaatttagatattttgttttgaggcaatcttataattttggttttccaactattatctttgacccgcctcacatattttagtgtagatatagtacggacaaaataaaaatggtaacggttgcatcatacctgcaaaactcagaatggcagtctcgtaatttatggaaaaaaacaaagggtactgtagtaagacaagtcattaaaaataataatcttatcctatggaaacaaaacaatatttttcctactgaaatttgtgattatctttatatagttgtttagacataaatcaaacttaattaatgtgaaatcaaattacataactgctttctccctaatcttattatataaattatggttttcaaagttgctaattcgtaggattgtgccacgtgtcaagtcaaacgatcagatgtttacatgtgtcattccaaatttaacttttttattctctaaaaaaatagaaaatcttaaaaagtaaacaaatttacatatactaatttatatatctatatatttataaacaattaacatttattcaacaaaaggaaaattaacaaatttgtctttaactcatgtaatcataggtgaaaaataaaacattttgagaaaaatagcttagcttataggatttaacttttcaattattttcatttattaattttaactcatttaatattaatttgcatgatgtaaaattaacttacgagattacgacatatatacaaaatatattttcaacaatgtttggtttttaaatatttttatggattttttattattattaattattagccctaagcgtttgggtattcggatcgggtatttcgggttcggatttttgggtttagaagtttatgacccgttaaggtaatttaagattttaggtcgagttcgggttcgagtttatttatatattgaaatatcaaattttgtgtacaaatctattaaattacttgaaaatttcaaaaatttccaaaacaacacgagtagttttgcttgaatatatcttaaaatacacaaaataactaaaatatccaaaacatcctaatagtttctatatataagtataaatataactaatatatacttatatttgagatatgtttgaatacctattcgggttcgggttcaagtttttcgggttttgaagtttagacccgttcgaatatttgaaaatttcgggtacacccgcctaaataggcgggccttatctagtataaaataaaatgattataaagcaaagatttcaaaaacaaaaaataaatagtatttaattttgatgcagaggacagctgtacatttgatttaagcgtagcttcaactccataacagtcctctctctctctctctctcattctgaaaggaaaaaaaaaagaaaaaaggaaagctaagtgaaacagaaaaagaccatctctgactacactactcctgaagatcccaaacaaaaaagcttcatagtgaaaaattattccttcgttttctcgatttctgaatcaggtttaccatttttctcactctcttctctgcgctttcttcgtttgtgatgaaactctcctcgcgctgtgacattgttttttccgctttcttaggttttttcaaaatttccttatgcgatttttttctctctttgttgttgcagattttgtgaattcagattagtttcgattgtttgtggagtcgtatcggaattgaagttgatcgactgagaattgcgagttttttcttagatgtcgtcagtgttgttttggttctctgggatagtgtgtgactgatttttgcttttcattggtg

SEQ ID NO: 1460 - DNA, 3000 bp, Unknown
  misc_feature (1)..( 3000): cDNA_ID_3062492_gDNA_ID_1620405_Annot_ID_156087 3000 nt of promoter + ATG
cgaatattttttttttaattatcaaaaacaaatattaaaatccagtggtagccattgtaaataagtccgaactacttgatttatttcacaaaatggttgcaaaaatgtatatatagatatataaatataaaatcactaacatttttgttttttttgcctggtatggttattcctcattttgttcaacttttgtattaaatttgggtttcgggtgtaaaaacgttgtcactaatttaaattcctcattttaacaacaaaaacaacatttcataacatgtgttatcgcatttggcataaaacaaatcataaataaagcatctttaactaatatgtccactgaagttgctcatccatatcaatagacccaataaaaccactagaatacatttatactttgttatgtaccatataaaaagtataatgtaagatttgaaatatctataccaaatcttcaacaaaaaacgaaaggtgatattggtggaaaataaaaggagaagtttgaagatggggtttgataaggcaaagaaggaaaaccattaaataagaatactatttgttgttgttattgttagattctctcaaccatcaatccatcctctacttctctttaaattcttgtaaccttttatgagggggaccaaggaccaaccatattttagggtatggccaaaataatttaaatccaacaagctttaacaacaaattatgggttaatcaaacaagaaacgtcaaagtaattataacccctcaagtagctgaattggggatcgcctagagaaaaagttcttcaatatcgtacgtgagtttgaatctcaacggtgggaagagggctgatttaacttgttatggacatctcgagaaaattagggaccaaaagtttggttttttttttcctaatctaaaaaaacatcaaaatgcaataatttatttagacgaaaaattagaagatgtcggatttacatcgattagtcattgctcctcccatattgacgatgcaagtatcatctttctataaatctaaaagcttatcaatcttatgtgtcatttgtacgtagaacagaaaaatttagtagtaacttatggataaaagtgaactaaaaatcagcaccatgaagaaatctaaaagattaaaaaaggataatttggtgtgtcgctataaattgagagaatattaggtcaatgaccattaattccactaaatgtggttatagcacgatatactgttatgtggaatgaataagtaaaatatcatcctctttttttttttttttttttttttttttttttttttatggttgatttttggtaaagaaaaggttataagtgacacgtgaagagagatcgttaatctgttttttcttgcaatcttcattccctctcatttttgtttgatcatctattcctttaatgaggattcctccaggacaagtaattatgtgggtgttgctaatcaagtcactggtctttttgagaagagatatctctctaatgctctgttatagacacattttctaattagtgttttgtttctatatgaacttctctaatctagaaagatgctgcatcttcaaaaagttgctttgtttattgaatgctaagatgggataatggatcaactcagttcacgcagtgaaatcactagagcctaataacacatatattgcatttccctctatgattacctgattgggtaatgtaatgggccttagtctcattgtttcagaaaggcccaatttgttttttcttttattttctctcgtggtcgacatacgaaaatcacaggaataagattttcgtcacccattttattcatgtataagtctgaattccatgaattaaaaaataaaataaatcagtaaccgtacatgcatataaaagataaaatgcgaaaatagtagtataaaaaatacctggacgcgtatgtatacggaataccgtagggagtagctgtggatataacacgtagacatttaagccccagcttccaccttatctttatctgacacgtggcattattacaagcatgggtcccaagaactctcggtcttcttcttatgttttgtctacctgatgccactcgtttttgtctttcccatcttatccgatcgatccaacggctataaatgaattcatcattgggaattttcatatcagtatccatatttccataatatcaatttcatccctcatcttttcagtcaatacttttcttcctctaacttttgttaaaaacataatgtttgataaaatcatgatcttatttacaagagaatttgtttagctcatgaaatttgattaaaaaaccacaaaataaaaaagttgaattgaaaatcatgttctagttaaagaggaaaaaataatattttgtggtcttttatggatttgtgaggaagatcttggtgacaaaaattaaaaaataatttgatgtaaagcaaaaaaaaaataaaaaaaaatccatgttttgcaactatcttatttcaatgagaagaatgtcgattttctaaatattaatttattttactaggatttataaaacatatagaaaataatatttacatgtgtgtaaataaatcgaatataacaatttgtctaactgttgtttatgccgattaattaaaaatattttacaaatttgataaagatatcgaacctaaaatacattttttatacaaaaaatagtaagtttgctttgttaaaagtaaaataattttacattttgtttaattaactaatcaaatccgaactattgaagtaacaattaatttcaagaatgcggttttattttaaatatataaatagtaggggtaattgtttcaatgaaaatactaatataaggactaaatacgaatttcattacaatatgtattaaacaaaagaaaaaacagataaaggtatataataatgtcgacgaagaaatgcgtcggtattataatataaaagacgatcaaaatcgatcttatttacaagagaatttgtttctcgaagaagaagacgttaatg

SEQ ID NO: 1461 - DNA, 3000 bp, Unknown
  misc_feature (1)..( 3000): cDNA_ID_2996054_gDNA_ID_1620405_Annot_ID_156095 3000 nt of promoter + ATG
tcctaatgaaaggatatttacaaaaagtatacataaaagaacagaaaattaactgacacaatatattaatacttatgcagtacattagtaaaaaaaattacatcattattcttatgccttttcattttttatctttcatcttaaaattggttaacaattaaattaccgagttaaataaaactttatctagaggtagtgataatattaatcttattggaagagattcatattttgcacgttatagtaacttgttaatttttttatatgatataataaataagttaagacggtaactataaatatatcacataaattataacttatgacgatacaaaataacttagcatgatataattataaacttattgatataaatattttgttatcatgttaacctaataagtattaccgagatatttgttatcatgttattctgataatacgttatctgctaactattctgattcatgtattttttacatgattattaagtcgcaagtcaacttttttgctttatatgctaaatattttgttactttttaataataatgttatcgtcttcgcatatatatccgtataataaccatattgtaactatgacaattttgtaattaatccaaatatgaaagatacttttggtttatattttttttctctttcatatttacctaatttttaaattatctcttctacttttttaatttcaacttcttctaagtatataaatttaattcacccactagattttaacccgcggtataccgcagagacaatttattttttaaattagtatatataaaaatttacaaattaaatctatttatttttattttatagtttacaattgttattaaataacatcctgccaaacccgtctcgccaaatccgtcccgtaaaaaaaacccgccgtacaccactaatttaaatatataattaaaataaatattttatgggattgcaattgtattttagtttgtcaaacaaatatttgttttaaatagttgccaaaatctagttcaaattttggagaaaaaagatttattggatagataaagaatgtatttaggtgtgttttgttcattttaagggattgcaattatatttttgtttgtcaaatatttattgttttaaatagttgctgaatactatgtgcgtgacatatgagattggaatatatttggaatatttttagtttgttaatcaaattatttctggaaaaaaatcaataattaaaatggcagtcattgtaaataagtctaaacttcataatttatttaacaaaatagctgcattatatagacaataaaatgactttttttttcctttgtttctcatatattgatagatcacataatttattgaattaatatatacaaacaagagttccactaattcttatttgttatttcgattccactattcaacaaggtccacactattattagaaattcaaactatacttaccataaatatcgaaatcacaactagtcagtcacacacctattctaacattagaaaaacaccgacctcattgcaccactattatttgtagttgtacctcacaaagcacctccctcaaagtcttcgcaaaaacgtcacccaccaccacgaaaattcataaccaaataaaacgacaattttgtaattcttgatttaataaaaaaattaagtaaaaaacaatattcttaccattttgtcgccatataataagaagaagagagacacaacacaacacaagtagtagaagtggtgtagtgattacggtgtaacgcttattccaaaaaccccacgcgcgtagggcccacctctcccccgaatccccatgattttctttaacgtctctcgagtgctggtgggacccttgttttatggaaccctgatgtagttttatgtactttcatttgtgacccttatacttctgttaattacaatcttgccgctattttgttgcttccttcttgtttttgttaccttaaaacttttgtttgaatgccttcagaaaaagtttacttctctttagacggatgtgatcacttgttcaatgtaacaccaccgtaagttacagtggttaaaatgtctggtagaattatagctgtatatatttattgatctctaaaaaattagcttgtagaaattattgtctttaaattgttagtaggatccatccaactactacttaaaaaaatctgattagtataagatatatttatgattaatagaaaaataatttttgtacaagagattaataactaagatagtaaaattctatcatttcatttctaaaaccaaaatagatgaaattaataaataaataattattgatttcatgtgtgtttaaacaatttttttttgtatcacattatgtaaagtaacaagttatcaatttcataaaaaaatatttacgataattacattgttttcttaatttttttgtcgactatatatcttaaaaataatgttaaaaatgcaacaattttgacagtaattcctaatcatacgaaaattttcaaactttgcaacttcttcatgtattattgcattgacaatcagttaataattttactttaataatgttgtctaagtaaaaaagaaaattaaaagttaataattgaactaaaaagtgaatgtcgaaaaaaaacatttaacttttttacttagctctctcgaaagttcctcaaaaaccgaaggacgagtaagtcacgaaaaagaccattttgtaacgcctctctatcaattattcctctatgtgtcaataaagtatatttctcaaaaggaaaacaacaaaaatggttttcgatttcttgtactttcaaaaatagcataaaagccaatagattctcctctctcaaagtttcgccccttgtttttactttctctctcttaaaccccaaaaaaaaaaaaaagatcttttgctataaaatcccacttcacactttcttcacatcaacaacaaaacctctctctctttcactttctctctaaaaaccagaaaaaaaaaaa

SEQ ID NO: 1462 - DNA, 3000 bp, Unknown
  misc_feature (1)..( 3000): cDNA_ID_3062488_gDNA_ID_1620405_Annot_ID_156092 3000 nt of promoter + ATG
tgccaccacatttctacttctacaccttttgtctatatatacacaccaagaaaaaagaagagaatatatatacatatctatagtgtgtgtatggtccattctcatcttattatcttatttgtgtaacagtctaatattctaacatctaccattccttcttactataattttcaaaataaataagtatagttttcgctgcaaaataaatgtcatttttaccacatgatacacttttatgtttgttaaagatctatgatatacacgtatgtatatgtttatatatatccttcgttttgaagaagacggaaacgacttttttggttgagaatgtgaaaaattggatagtgtgaagcattattattgttactcatgaggaaacgtgaaggtggcctaaagggataatttttaaaaccctaattaatgaaaatcaatgatgtccaattgtgtattttgcatctaatcaaatctacccctttgaatattgactcttccacttttttatttatttcttaatttttatttaatattatatagtttccatctttctatttttaagtaagtcaccattttttcatcatggccaacacacaaatccaactaaggctaaaaatgcacctatatatacatgtacaagataaacattaaacataaagtcttttaagtaactaataacatatcttaacatcatgtataacttgttgttttacattcaccaagttattactcccaccctagacatacacccattgtttaaagatgccttgtcacatgcaccacccataaagacacaaaaatttcttttaaaaagaaaattgacaccatgtaagtttcgctgaaacgttcgactacgaacatgtctcatggtaaagattaaagaatgtccggaaagttcaccgtctttgtatattttgttatatatttgttatatatgtatagtaaaaaaagaatatgaaggaagtatgaaaaatgagattgttgggtgaggactaagagagaaagtgaggctaacatgttttaggaagagaagaattgaatgttcaagaagttttgcccaagaattcacaatttggtgtggtgggctcctttaaagggcaaagaacaaaagtgtgttatgtctccattactattttcaataatatttagtcttttaacaatcactactatttctctgttttggtccaatactccaatcatatataaaaatagtccgaacagtcgatcatcgttatacattaattcataatagaaattgattttgcattaaccattttgttatatcagcatcacaagttttatatggatatatataaaaaaatgtctatggcagaattaagtttgaaaacaaaatttctcctatcatcatatatatatgtttcttcctcgcctaatgttcaaaactaattaaactttggaacttattaggttaagccaagagcaacgacccacctaatatctatataatatattacatgctcataacttagctggttaatttgataaaacttgttgattatctttgtttagttgttagatttctgttccatcatgatactttactaaaccgaataaatatttctccatctattattatatacacagttcgcgcgcaaatgtatatcatgtctttatcatggaaaaagtcagttacctgcaataacataatttctaaaattcaatcagatgtaacagtcaatttaatttgaatctacctaatttattatcgtgaataaatatgaagtgtattgggtataaaatttttaaaatattgacaagaaaatttcaagaatagtaggaggagcagtgaataataaatttacacgaacgttctactcttttcggagaattacatcattttttttcttatagtggattaaacaaatcttaacatagtaatttttgaaatagatcacctaaaccaaagaaaagaagaatagtaaaaaggagacggtgccgttcgatagcatcaatcaaagcagcaatgaggaaacacgacagagagtcttctcgtgagaaaaagtaagaaaacaccaaaaaagattgagaagataagtttttagtgttttggaaaaaaattactaatttaaaaaaaattgatttggtatatgcatgcataagtgattaaggactatatgattatattaatttaagaggaaccaaaaaaaaaacatgccgaaattaaataccttttaaatttcaatgatgtgtactctacaagatatctcatatgaatcaccgaatatgtagattttatacgaaaataacaaaatattagttacgcatataacatatttatattcaatagaactataagtattttcgttaaagcttcaaaaatttatagagaaattacctagcaaattttatattacttatatttatataatatatatatatatatacggatatttttctattgatattgaattaggttttcactgaaaaataaaattttctattttccaactcaaacacatatatagcatatatataaattgaatagatacattgcaactagttaccttcctcattttcataaattagtaaaacaaaatacaagaaactgctaagattgacgaatcaatacgcgtatcaaaaaaaacgaaatatacgtttccattaaaaaagaagaaaggtaaaaataaataaatgtagatgcgattcaaatattcaaacatagagttatgtaataaatgagaatcatgcttactatgtgcatataatagagagacttattaaaagcccttcccttaaaaacttcccaattccattcctcttcctcttccttctccttcttcttcttcttcaccatttatttctcatcatcatacttataaaaagtaaatcagaatcccgaagcaaactttcaatcttccatcatcatcatcatgtccgatacacatacatacatacatatctttcgtgtgatttatacttattaaagagagattctctcattaagaagaagcttccttctttcttttctttttcttctctctgttc

SEQ ID NO: 1463 - DNA, 3000 bp, Unknown
  misc_feature (1)..( 3000): cDNA_ID_2046125_gDNA_ID_1620405_Annot_ID_156072 3000 nt of promoter + ATG
ctgcaacaacggaaggctcagattccgattagcgaacttatacacttttgctcttgatctaagtttatactttgcagcataaagcttagcaagtgaaccacggataatataagaacagaaattcacaattttctttctgttatctgcaaaccgataccactcagcaatcgtagtcaaaaacttattcatctgattattcgtatgagcttgagttgcgtggaacattctaaaacaaggctgtggatccggatcacgatctccttttataaataacagctttcgaaactgtttgatgcattgcttcaaactcgctgtaacggataaaagcgttcccacgcctttttcgcttataatcttcccaccggtcgcagtatacctcagagtcggataaacaactcggcgacacaaaacatgatcaagaaacattataccttttgttatatgttcaatgggtagattctcattgtcgagtctaagcatatacttctgatcaacaaactcaataagctctttccttaacgttgcagcatcagctcgaggtccacggacaccaatcaagatatgacctccatatctaacgtaatccattttcctcgttttgtcaggaccactcgtgggaacaaattccggccaagaagtgtttccttgatccgcttctccttcagggttattccatataacatcgcttttcgaaggacggtaaaagtctttcactttcgtttccatccaacgatcaagctcgtcaagacatacattaaccaaaagaggactaagaatcccgcaatgtccccactgcggagacttcccagcttcctcaggagcaaaaccaaagaacgtctctaaccaataaggatcaggcttgggctcatcctcagccaaaacccgttttttctgatattttctcttcttagtcttcttcttctcaccatcttcaactttactcgttacaacaggtgtaacaagcgcagatttgatcaaatcaatcactttcttatctctaacatctctcatcaaagaactaatcacaaaaccaactttcattccatccaacacaacactcaaatcacccttaacataccacaaataacccgcgaaattcctccgaatcactctcaacaccgtatgcgcggtcctcccgggccgaaacgcaaacgatttttgcgaaaaccgagattcgtatatcggttccaaaatcatcaacaaaacctcctgaactatcctatcctgaaacggagtaggctgcgtagtagtcaaaatcgctttaatcttcctcttcgacaacgactcgtaatcggtcttatctctaggagatttaatatagaaatccaaccgagaaccccatttaaaccgatcatcgagaacagagtttcttaaagctaacaaattctctaaagctgatctttgaatagagctacgaggaacataagcacctaattcatcacagcaaactttctgataagctaatacccataactcgaatctacgaagatacgaggttaaattagtagcggttttgtcaggttctttgaaattctcaagccacatctgagaacagagagatactccatcttctttcaatagattcgctggatcatctggatctggtgcttgttgttgttgtcttcgttgttgaggtgcgaagtaagatagatatcggaaaatcgcagagccgttgttagggttagaaatgagaggaggatttgtgacgaagcagtaaacgttggtatatgtagaagaaggttttagccatttgtaaggacccaaaacagagaagcttctacgcatttcggacgattgatgaacagcttcgacttcttcctcttcttcctcttcttcgtcttcttcagggaaatggtggaaactgtagtaacccttgttaaaccccaaatcaaagctttgtgatatttttgcgttttggtgggctttttagttgtgaggaaagaatgaattggtcttttagttataggcccaatattttcagcccaagttcatatggaactatactgtaatctaaaagatgatctcacgtttgtgtcattgtgtatgtgatctaaaaaaagatgatctcacgtttgtacttttgtcttaagttctgtctgagaggacaagtttatcactttgaccacttttgactgaatcatttgttagaaaataataagtagagagattggtgcatattcatatcagagagataagtagagaagaagagagtgtgagagagagacgagagaaagaaatttacaacgaaagcgatggctactacgaaccctggatatcttcggtgcaaagaagaaaggaataacaaaagcttcttcatggtgcttcaaagtgttgatgtttcttcagagaacttggtaacaatgttcaaaactctgtttttctaattttggcgatttcttgtaatagtttggaaagtttgagactttttgttttctgtaacaaatgggtgttgtcttaaaggttgaatcttgtcgttatatgacaatgggtcttgccgtaaaggtttgaatcttgttaactttgtttggaaaggttaaatctttcgtcagttgtctttatgtgtatcaaataagttactgtttttgcttctctgtctgaatgtgagctgtgttttaaaggttgaatcttttggtcaatatgggtctcaatagcctcacggcagtttttttttatctttaacgaacatggttttgttgaatctctcggttctctgtctgaatgtgtatgctttatatttcacctttgtttcttctggatgagatttgtgctctgttctttttcaatatcttgttgggtttgtcttttgtgtgtaattgaagatactacattcttattattattgtctcttgcatcttatttgtataaacaaaagcgggcacttccttatgactttgtgagaagcttcacggacaaagagctttcctgtaagatgaagtaagaacgcaatggggacgctcttgggaagtaggaatctccaaaaacccgacattttactacatg

SEQ ID NO: 1464 - DNA, 3000 bp, Unknown
  misc_feature (1)..( 3000): cDNA_ID_2046128_gDNA_ID_1620405_Annot_ID_156071 3000 nt of promoter + ATG
acatggatacatcaataaacaaaacaaatctatgtatgatatataatagtttacggtccatctattggtcccattgactaattcacaacttatttgattcatattttatatatacatgtcacaacccatatcacaaaagattccagaaacacaaatatttttaattcttataaataatattatctaaattaccacttcctaactggataatgcatatctaataataatgatttctaaatggataatatatagttgcatacaaatatatattttcaagcactcttggcaggggaaataaataccagtatgtgcaagcttaattataccaaaatagtaggttattccttagtggattggtaaaactaaaacaacatgacatttattaacatatagctaggttagtccatatttaaccaaaaattcatagatgacaaaatatattagatttaaatattatgatgtgaacaagatatgtaatatattgatttgcaccagtttggtgagttatcatctaggttcaaactcgtataatacgaactttttgacccaaaaaaaaaaaactcgtataatacattttgatgaccaaagaaaataatctatatggcatataaaaatattttaggaaaatagtatgatagtatagacgtgtgatctctaaaacaaaagtgggataattaacaaagacttagaagagagtgacatacatttttatttttcaacattcaaatctatgatcttttcttttaaaaagggaataggagatttaagaaaatatagaaagaaggtcataaaagaaaattaaaatataactaaattatagtaaaatggacgtatctgttagaaaaatagacaaaatagtctttcatataatgtcaaatggaagttatgaaccaatggtttatataagaagagggatataaatgacacagaaataataaactagtaaaagaatggtttggacattattggatatgaacaagaagaacaaataaactaagagaaaataggcaaaaaaaaaacatcgaattttttgtctgtcattcaaataggtttaactacgacaacaagtgaatattttttgggtgggtctagtcgaatattctaaccactacatagattgggaaagctaaactaagaagcctaagaccaagcagaaccggttacagagtagctaaaccgcaaggactgaaaccggttaatgaagccgagccacattggtatggtacagctttcgttttcgctgacttcacaaaactaatcattatacctaactcatcacagtttatttatttataagaaaagagaaaccgaaattaagaatggaccaatggatttctgttgggataatggctttaaccgggaaccggaaaacccggtgagctcaccaccacccacagtaacagtaaccaagaaaaacaattgtcttcccaatgcacctgccacgtgtatagagacagtacagaagtgtcaccacgtttcgactttctgttgtttaaatgacttgaataccctccgttatgacactattttactgtttgaaggaaacgcaagattgatgaaacggcgttttaatgggttggcagcgtttggttgaaccacctaacaaccaccactttccttcacacttatagttcctttttttttatttttttattttattttctgttgggaatctattttttctttatttttttattaagcatttggtcttaaacaattataaaaataaagctgattggtacaagtattaaaaaggaaaaaaggctgactgataatggagttgattagctacagctatagattaataatagctgaaaccttttatttaatatttgtttactggaaaatagtggttgtaaatttcaaacaaataaaatgtacatctttttaaatttagaacaaatataacaaaagtaaacattagtttgttagaaatttttaaaaatataaaaatatttaatttttgattagactattcactttttctttaaataagatatattttaatatgattggattatactttgcttaaaatcttgggatgtttatgaaatgacttaaaaattcttaaaatagatcatgaccgcaccaatcgcagcaaaacggtaggagcgttcattagacacctaattggctaattgatatggcttgtgaagaatttgggaaccttcccgatattcaccaatatttaattataatttgttgttttctttagaattttaattaggaacggcttttgtgttaaaattacggtggccactaaagcatacacgttttggagtataaaactataaattatacattcataacaattttttccggttttccaagtttcttcctctctcggtcctcttttagcatctctacagtttctctctcctctaccgccggaaaaaaaaaacgatttctccggccggttttggtttctccgttccgttaatagccttcgttttctcgtccttggaatcgtcctctggttgatttctgaatgttcgtttgactcggctacgcggcgattcggatctccgtgtttgactcggtccctggctcgttacgcggcgttttcgtagaatgtggtttactttgtttgcatgccaggctttgtattgaattcgtggggcgagatcgtgatctagggtttcgtctctgttcttttggttcgttgcttgttgtggtcgctttttgtttcttaatccggctgaagaaaacgaaagtctacagagataatagattacggaatgatatggtgagatgatttcccctctctgattttagtcaattttgttgtttaacgattttggaattctcgtgaatttttgttgttaacgattttgttggatcagatctctaacattgctcgatttttttagagtttctgctattttttttcttgaattggttactcttttttttactctgcttcgttgtttgatccttctctatggagaatctcacgttttgttgctatttttgtgaacttgagatttgagctctgttgaa

SEQ ID NO: 1465 - DNA, 3000 bp, Unknown
  misc_feature (1)..( 3000): cDNA_ID_2105052_gDNA_ID_1620406_Annot_ID_156104 3000 nt of promoter + ATG
atcgtgtagttaatgtagagagattttaggaagattgttaaatatcaaatatttaattcgaagattttttttctaattatcaaaaacaaatattaatccagtggcaaccattgtaaataagtcccaactataagatttatttcaaaaaaaatgtatatatagattgtaatagtgttgttgcatttgtgaattctagataaatattttcttttttaaaaccaaagaacgaaaaagaattattgagatgaaaccgctaactcgttgactataggactattaaaatagttgacttttgcatgtcaaagcagaaacaaatcaatatccctattcttaattactagttcattgctagcctaatatacatgattaggtagctaatcaatatttatcatgattccatatttccatggaccctctaatttttgctacatcttattttacttagaattcccaactatagtttaaatgaaacgttgattattaacgattatatatatataattaaatactaatcatctttcttagcccaaaaattgtttgcaagcgacaaataaacggaacttttggtctaacaaaagaagactgatgaaaatctcgacccacgcgctgctggtcctcctattttttcatttatgcaaaaaaaaaccaaatcggagggttatatagtccacgcatttttgtctcacgcgctaaacgcgcttatggtgcgcgtgtttttatttagtacacgcgtgtagtttttttttaaatccttttaatttccgtagaaaccaaatgtaaacaagctaacacagagatcaatataataactagtctcaaggatctgaaacaatttgctagaagaaccaagtctaacactaaacatagatgcaacatcaaatgatgtcaatagatgttataatacatacatgagttgcttcaaatataaggaagaaggttacaaactctcacaacattcaaaccgacaatcagaacctaagtgttgttttgttgagatgttttcgtcgctctctccagatcaatcttgcaattttctctcaactctttcatggctacaaagctattgtgctgcacaggttatcaatagcaatggacatcaaaacacagaacccaatttttacggaccaaaacaaaacacagtcgaatataaggtctgaggaacttacgaggtggttgctttcacgagccaagataccttccatgttacgaaatagagatgtccattgttccatgggattatctgtatttgtggagttgttggagttttcagatccataaatatccgttggcgttcctctatcgttcctttggatcaagccactagcttctttctggctcttcttcaacactgcattcaacacaaatacatgaaatttaccattgttattcgactctgtgttttgcagtgtaataagaacacttaccagataatcgacctttgatatcctggtagtgaagatctgaccagatatatgcagctgaagaaattcattacatccacaaaactaagtcagatcatgttattgagaatcaacgagacagcaataacaaaaaaccaacacactaaagaatcagccaaacctgtcaggcaaaatgaacaagagcaagatttaagctcgccgtcagcttccatatggtgattaacaattcccataccgtcaacattcgaacatctattcatattaaacgatttgatagcctgaggattaggcactaacaaaccctcactttcattattgttgctactaaacagagtcatagctaagtcttcactagtaacagcatcggtttgactgccacatacattcatgttcgagtctttctcacacgtctctttcacagtatcatctttagaaggttccacatcaatatctccggcattggtttcaccctgagattctttgacatctaaattctcagaatcacaatcataactaatcttatcctcagaagaagaagcttcattagtatcactagtcctagtactctctttgaccaagtcgtcaacaactaaacacaacctcttggaaaacttaacaccggagccttcacgagcagcaaggctcttaccagaatcatctccagatttaagtagcaaatctcccaaaatcgctgaaagccctctcttgcttggaaggttagtcatatcacacaatgcgacacgtgtttccttggacactactaggctgcaccaatctccagtcatcttcaaatatcaccaaaacaaaacaaaaaccaaaaacgttttaaatttccaaacaagaaatcaaaactcaccaacaaaccctaagaatttagaggtacaatttttaatatccaagatatgaaattgaacaaaacccacttcaattaactgacaaagaagctagaaaatgaagcgattcgtacattagaaacgaagaaccctaaatttaacgaaagagacaaaatcaaattgagtttgggttacttaccaatggattaatggcatccgtcgttggccgagaaatcttgatataatcggaagcaagaaatgagaaatcttggtttaatcggaagcaaaaatatactcaacagagaattagggtttattttagaagtggttgaggcgggaacaaatcctgatttctccgatcttagattttcttttgacccgcgtttcgaattcgtcggactcgggagtcacgcgcgaggactcttagatttacttaatgggccacaaattaaaaacccacagttacataaagcccaaaagcccacattacctaaaattaggaaagttgggtaacaagatggaaaagatcaatctggcttatgtctggtcaaaaatcttatctgacaaaaaaaggaaagagatcacctcgaaaagcacaccagatagagccaaattgttatccacttatatatctacacgtcattgacaacgacgtgtccacgtcatcttccttgccgtaaaagcattcacctttataattttcataaattcgttagcgaagagaaaattttcaactcattgaaatg

SEQ ID NO: 1466 - DNA, 3000 bp, Unknown
  misc_feature (1)..( 3000): cDNA_ID_3062536_gDNA_ID_1620406_Annot_ID_156119 3000 nt of promoter + ATG
tttattgttgatatctcttactatcttgatttcacctttcgttaccatttgcgtacaaaaatttaacaaagcaatgaatgggaatttcttattttttgtatagtcgttttaactgctaaactatgttaagttggtccacacaattaggtgctgaaaataaagtgacatcctaataagtggaaacttgacttatggagcttttcgtctgcttaacattaatttttatcatcttatctatttgacaccttccaaacactattggggaaatggcttcttctcttttttccggtgtaggtttaaggttttagatttgaaggcggatggtgaggagtttgtgttgatgaaatgggtgatttgaagttaaatcctttaagttcttttagccttaagttcttttagcctgtcattacaatatatgtttcagttgtgatcttttggtgctctccaaggtcttagggaatctccgtgtcccctctggtttctttctttgtataaagtctctggaatttaaagatgattttgtcctgttttcttcgaagaatttggcgaagaaacatcaaaagttcactatttgctttacgtgttatgcttgtttgactttgtgtgatctaacttttggttgaaaactaatgctcatcttttgttctttggaatgtcttgatctgcttgattttgaatgctttgtcacattgtttaaacaatttgttctttgttttcagttgaggaaaacatgaattcgacatcgacacattttgtgccaccgagaagagttggtatatacgaacctgtccatcaattcggtatgtggggggagagtttcaaaagcaatattagcaatgggactatgaacacaccaaaccacataataataccgaataatcagaaactagacaacaacgtggtacttttttacttcattgctcttcaacctcctgatgataaatttgtttggtctgttttcagaaatttaaactagctttcatttcttgacaatcttttttttttttttatagtcagaggatacttcccatggaacagcaggaactcctcacatgttcgatcaagaagcttcaacgtctagacatcccgataaggttagctattcaaatacttctctatcagtttcttaatcataaatttctacgcatcatatagactaaatcgttatatcgttacagatacaaagacggcttgctcaaaaccgcgaggctgctaggaaaagtcgcttgcgcaagaaggtatgacttcattttcttccccttggtaaactgtttctgtttgcctaatgagttgagagatttgattgttttttttttttgcaggcttatgttcagcaactggaaacaagcaggttgaagctaattcaattagagcaagaactcgatcgtgctagacaacaggttaatgaaatgaaatctaaatatatattcgctttctttcgagttccaaaatataatgcaatttctgattgaatatgaatgttttcagggattctatgtaggaaacggaatagatactaattctctcggtttttcggaaaccatgaatccaggttttgaatcaagaacaatgagtcttttggaaaaaatatagaattcaagattttgattggtggaagcttatttgatttgcagggattgctgcatttgaaatggaatatggacattgggttgaagaacagaacagacagatatgtgaactaagaacagttttacacggacacattaacgatatcgagcttcgttcgctagtcgaaaacgccatgaaacattactttgagcttttccggatgaaatcgtctgctgccaaagccgatgtcttcttcgtcatgtcagggatgtggagaacttcagcagaacgattcttcttatggattggcggatttcgaccctccgatcttctcaaggtataaaacaaataacaatctagcgtaatgtttaatgaatagaaggaaacaagcaagattacaatgtttcaaatgtttttttttgtaggttcttttgccacattttgatgtcttgacggatcaacaacttctagatgtatgcaatctaaaacaatcgtgtcagcaagcagaagacgcgttgactcaaggtatggagaagctgcaacacacccttgcggactgcgttgcagcgggacaactcggtgaaggaagttacattcctcaggtgaattctgctatggatagattagaagctttggtcagtttcgtaaatcaggtaaaatatatatattcaaactcatttgaaaatactatagtatcagtttcttgattttgtttgttcattcttaggctgatcacttgagacatgaaacattgcaacaaatgtatcggatattgacaacgcgacaagcggctcgaggattattagctcttggtgagtattttcaacggcttagagccttgagctcaagttgggcaactcgacatcgtgaaccaacgtaggtttgagttattttgtaacaaccaaatgaagaaaatggaaagacctcaaaaaatgaagaatgagtgcatctgaaaacagaggactactctgaataaatagaggggttgctgctgatatttatttttactctgcggcggaattagaaaatttgaaaaacatcatgtattgataagttgtaaatatcagaaaaaggtgggggtgcaaaaatttgtactttttagcttttgaaagaggcaagtttttcgaatgtttgtttgatttgtaaacaatttcagaattatataaacttggttccaaatcccctgtaataatgtcgagctatctgcaatttgaaaactataggggctttacttaattttacgttttgtgtgacacctatttgattttttttgatacgtttggaccagtttcgtaattagaggtaaataaaggggcaaatagtaagatataagaaaagccttatctcatagagtttcttctcttcattatcctcaaaatcgctcgagagtgagaactctgctcttcttcttcttcctccgccatagctaca

SEQ ID NO: 1467 - DNA, 3000 bp, Unknown
  misc_feature (1)..( 3000): cDNA_ID_2136569_gDNA_ID_1620406_Annot_ID_156124 3000 nt of promoter + ATG
gatacgggtaagttggttttaacatcaagacatatatgttgattgtggtcacacagctttatccacttctcacactttttggtgttttttttttgcagaaaagctcctaggtttagaaggcctatgcgttacatgccgtaccaataaaaccgtcatcatggttaagcatagaagggattcgctaccagtgtggatgcgtgtattggctatacccatccttcattgagctttctttatgactttggctctttcgccttttagaactttgcgcgtaaacattttcgaacctagactggtattataagtttcatatcgttttgatatgatgcatataatgattggatcaagtgttgcttatataattgggactattgggttatagctgaaatctgttaaatgaaagtgttgactctttttattcgcttagcaaatcaactccaaagatgttccgcgcattttaaacttttattgtcgaggctttgctaccatgcgcctgtaagaggttctcttctgatgatggacgtcaaggtcgtagccatttcttgcaatgacctgagatttaaccagtcacttgtcacagacccgaaaagacgataatgtccttatcgcttccttctcgatacgctctcttctccggctcgactcctgttcgcatcagcaggaggagcaacctctgcttcgccgtctccgccgcacgagcttctcgccgggattctatatcattcccccagcctatcttcctccgccacgtcatctctacccagtcgaatttcgagatcgatcgaaattatagagctcatgcgtcttctatcggatcattcgaggatagctcttcttctaacttactagaagacgccagttccgatggtttcgatttgggcagctttgtttctttcgcggaagcgctttgtattttatcatccgccgtgatttcagtggttctcgcggtgaattacgtggtggttggtgaaattgggaaaaaggttttgtctttaggtttcgttggattggttggctcagtcgccactggttcttggcttagacgacgacaatggatgaggatttgcaaaggcgcgagagaaagtgaggggactaatctaattcgaaggttggagaaacttgaaaaggatttaaaaagttcgacttctattgttagagttctttctaggcatctggagaagctgggaattcggtttcgggtcacacgaaaagctctaaaggaacccatttctgaggtattgttctctttctcgagctttgcttcatcaaatgattccattgaaaacgtcccattctctatgtcactatgtgagtgaaattgcatgaaagtggaacaagtgatgatttgggaattgatctagagttgttgaatgtctgaggaagtaacaaatgttctagtgtttgaatcaatattttggagatttaggataatcttgcagaaaatatcagtttttgagtttatgactggtcaatatagctgtctttgtggctgtatgtatctgaagagtttggtttgttttgtccaaaagactgcagctttagctcaaaagaattctgaggctacgagggtattagttgcacagcaagagattctagagaaggagcttggcgaaattcaaaaggtgctgcttgctatgcaggtatttatctattaaccaatgatccgatttgttttggtattagttatttgagtgtgtaaaagggtatcttctaagattttgccatggctgaattgaagaagtccatactagtgtcgtttgagctcatgaaagctggttgcttgctttgctatgcaggaacaacagcgaaagcaactcgagcttatccttacaatcgcaaagagcagcaagctgtttgagagcagtactagtagcaagcaatcccctagtgaacaacggaaaaataaagcagaggaaccctcaacacccaaacagatactcgttcaataaacagacgtaatgacaatgtgtaagttttgtatggacaatactctttgaagtcaagagagcgataacactgtatggagaaactcactgtggttacgtagctgtattatcatcattgttttgggttttgtaattttcacttgtttcgaattaaagtttttttccttctaataagaaagttcttgatgacgaataatgttaaaaagtttggacataaaccaaacctattcgtaatcaacaagtaacgattatcatatagattttcttgggcttttgggcctcttccagttgtcgaaaaggccttattgtttttattctattttcttaatttctttgttaatgacagtcaaagcatcatcatgattaattattattttaatcacgcacgaaaagcagttttacgacgaatgtcggcttttttagtctcaactctgactggacacaacgactgtcataattgcgatttgtttcgaaagacttttccatctaacaacagctccaacaaatgtaaacgaagaaagaaaatcaaaagtttggtttttctttgtaaaagacagagttttacagttttactttctcttcctaaagagttttcaactagccgaagtggaaccatccaagcctaagtattgttggttttattcgtcgagtgaatctttcttgctggaattattctctttccctttttggattttcttctccgcatcgatttttttttttgttgggcactttctttttctttttgctgttcccaaatctgagtttctcaaattttcttgagatttggggtcaatatctctgtttttccgtgaaaactgaagaattctctgagttatttggatttttatcttttgggtaactgaaaaaagttcgtttttttattactattgtagaattttgaatttagaaagtctcggattcctatagtaaatccactctatctaatctacaaacttaaaaatatgttttaacttttgtttcaaaggtttcttgtagatgtcacaatttcttagagaatccaacgttttcaattttggtagctcttagaaaaatg

SEQ ID NO: 1468 - DNA, 3000 bp, Unknown
  misc_feature (1)..( 3000): cDNA_ID_2136573_gDNA_ID_1620406_Annot_ID_156125 3000 nt of promoter + ATG
tgaaaagatcagcttaatggtttaaacggtattggtagtatcactcagacaacggagaatgcaaccgagaccagctctctctgttagtttctcgtgaatcatcaaacactgttcgcatgtgggttcgtcaccagtcgaaagacctctgtacaagtacctgatccacaccatttaagcaaacaaaacactgcttccacatcacgctaattaaaagctagcagagcaaaaggcaagagacttacttcatgagaatgtcgtaatactcggcagtaagagaatttaacattccttcgatatcctttatcgccatgatagctctgtgcacaactatccaattagctgactgcaatttcacagatatttatcataaattacacaatctttttgatcatgaacaaactacttatgtgcatggtagaggaaacagtaggaccttgcaacgttcgtcgagagttttaggtggcgaaccatcaagagccgttttaagagcttcgacatgtttgtagctgaataaaacgaagtaacaattatagcctaggtcatctgagaaagttggaagaaaaaaggaactttagggttattactgtttgagtaagctttcaatcttctgcgatttggtttcgatccttgccattatttcctctgcattatcagcttcaacaaatgctgctgcaccagccattggatctctctctttctctacactctccagcaaaattatctaaaacctaatcaattaatttcatttcttcattcaaatcgacaacttgctgcataagaaacatatgatttgagtttactaaccaaaggaggcaatgcaaaacttgtcatccccataaaaagctaaaaagagaagtaacaatcacgacaaaatcaattctaatcacgtaaaacaatccattgccgatggtacgcagatttctcacatcatatcagatcagtaatcctgaactttctgatcaaatcatacaagattgaagaatcaagcaggattcgaagattacctgaaattagagagaataaagcaatcgagtggtaaaacggccgagtgagaatttatcagaactgtgataccaattattaaaatcggatgcttcagtttttaatttttactttttcacattgacgtaacaagagaaatagaaaagttgttattgctggtatatatttgtaattaacaaaaatgtaacaataatcttacaaatgtagagagaataaaaacatgttgatcaaattaatatccaatttttaagatcaaattaagatcggtttgttatacttggattcaacaccccaaaaccccacaaaaactgctcattaagcaacaaatgaatcacacagctctagataggagaaatatcccaatcagagtctttaaaacatctatatattgttgttatcaagtaacattcaagaattgaattggtttatctaagagttacaacacatgttactcttgtttggtatcacttgaccaggacctggaacaatatcaatcttcttaccagcaagcgacccgggattaccattctcttgatcttcactcgcagccagacttttcttgttcacaatgttgaagatctcagtcaaaaccgtggagaaagcgctctcaacattggttgcgttaaatgcagatgtctccaagaagaacaaaccttctttctccgcaaattctttcgcatcttctgtcggtatagctcgttgatccacaagatctgacttgttcccaataaggattatcacaatgttcttatctgcatgagcacgtagttcttctaaccatcttgggatatggtcaaaggtttggcgtctggttatgtcatacaccaacatcgccccaaccgctcctcggtaatatgcacttgttactgctctgtatctgtttcaaccaataccacacatatagaaagatatacaatgtaagcatatgataagcatgaaatgtggtggttagcttactcattaaagatcagtgaatgtataaagttgatgaagcatcactgggaaatgtataacaaaagtgtccaaatttgtaccaatcataaaattatagaagcttaataacattggaatagtaatatacataattctagtctatacataattttgaaatcccaatcccaaattctcaatgattctaccattttacttcagatcctcccaatttcgtatacagatcagtaagctttactagaattcgaaatcctaagcagacctatcatcttccagatctagagaaacagtaaaatcttacgagatctaagttcaagcaattgaagtagctaaaagttccgggagaggtcggagattaccgttcttggccggcggtatcccagatctgagccttaacactcttgtgatcgataacaagcgtccgagtctgaaactcaacgccgatggtggccttagaatccaaactgaattcgtctctagcataacgagccagtatctgtgatttcccaaccgcggaatcgccgatcaacaccactttgaacacataatcaatcttctgcgacggatctccgtatcctcctccactagtcatcttcttcaacgtctctctctcgctaaatcctctcttgctaaatcctctgttttaagcttttaccgaaaagtgagcttttttgaagttttaaacgcagagagagatctgatacggtcgtattgtcgtcgttgtcaactattagtcaatatttttaattaatgatgacgtgtctaaatattaaccgttggattctgccggctcggtgagatttgacggattcgacaattatctttctgtcaggcgcatgtttttgggtgatgatgtcatcaaatagggtaatttcgaatgttaaaaagtcttttaaaattgggccttattaggcccattaagttataataaagggccgttatttggttgattacgtgtcgctatccgaattgacaaaaagtgacctaagcgttttcagaagaaaacaaagcaaacgtcgcgacggagagagagcgagagagacgatg

SEQ ID NO: 1469 - DNA, 3000 bp, Unknown
  misc_feature (1)..( 3000): cDNA_ID_3062546_gDNA_ID_1620406_Annot_ID_156113 3000 nt of promoter + ATG
attttcgaaaataagatttcaaataaacaaaataaaaagatgtgatcaaaaccatcgatcaaatacagtttttccagaatgcttaaatttgaaataatgatgatatgtatatgatcaatgatcaatcgtcgaatgaatgtaaagattaattattatcatgaaatttacaataaactcgttatgttcatgaacgcgacgtaccaggcccatatcatgagaaaaatggaaaagtaactatgggtatagaattttcgttttttctcttcctcatatcaaggcccatatcatgaaactggatacaatagtatgtaattggccttggccttcatttttgggcttgaagcaacttaggctcggaccacaaacttacacaacattttttgacaaatctgaagaaaaaaatgtttgataatatctgaaatattataatacatttagaagttaaaaaatcttgaaaatataaattgtttgataatatctgaaatattataatatttagaattagaaaatactgaacccatggatttgtctaattgattaataattgtaaatataccaatctgtttaaatactaggaaatttcatttgacaaacctgtaagtaattttaaaataatgaatagtgatcagatttatacgtcaatgacacggaccttggagaccactttccacacaaaatccatattttttaacaaaccgacccagcccaccttctcacgaaaaccacctgtaccaacagattaggcacgattttaaaaaaccattaaccaaattttatattattaaagaagatatttaatttatagaaaactattgacccaaccttatccaaaaaccaataccacacgtcaaagccacactatatataccagttgcgttgaataacatctaacatagaaccaaagataaccgaacatcagaggtagataaaccggagataaccgattaaatggcggacatagcgattttggtggcggaggagtacgagaggaggatgaagcatacgacggtgggttcgagatcatcgccggtggaatttgattggtggaagataattccggcgaagatgactatagcttttgacaagatgaagattgagagtttgaagaagaattttgaagctaaatctgagtttgctttagccatctctcatggcttcttctctgcttgattccattttgttcatagctaatttcgtttcttaatttctgttttttttttttgctttttgggaagttttatgtaaatatatgtaaattaatctgtttattttatcaaccgttgaatcaatgacttggtcttctccggcgaatcactgttgagtaaaaaaagataaaaaaaaaaaacaaatctcagggactttgttgcatacgtggacaaacttctggggaagaattctaaaattttaaaacttcatcatcttaatactgtgttgagaaacttcggcgtaatttttgcaattcgacccttatattctggatttctcttttaaatcttttcattcaaaattatataaaatgggaagcagcagcgacgagacgccagtggttctcatcacaggatgttctcagggaggaatcggtcacgcgttggcgcgtgagttctcggctaatggttgtcgtgtggtggcgacgagtcgatcgcagaagacgatgactgaattggagaaagattccaagttctttgtgcaagagctcgatgttcagtctgagcagagcgtgagtaaagttgtgtcgaaagttatcgacaaatttggtcagattgatgttttggttaataacgccggagttcagtgtatcggacctttggcggagattccaatttcagccatggattacaccttcaacaccaatgtgctcggtgaatgaaaattttcgagttacttcttatatgcacaccatgtgtttgttaaaattcttgactcaactctttcatgttttattttgctctgttgatttgggttgtgagaagtctcttcaagaactgaactttgtaaagaaactttgcaggttccatgaggatgactcaagctgttgtacctcacatggcgtctaagaaaaagggaaagattgtgaacataggaagtattagcataatggcaccaggaccatgggctggggtttatactgcatcaaaagctgctcttcatgctcttaccgacactttaaggtttttcgatttcagcagtctcttttcatcagcttgattaatatcatctaaacagtaaacactatcttgttttgtgtttgtctaggttggagcttaagccatttgggattgatgtaatcaacattgtaccaggaggtattcaatcaaacatagctaactcagggatatcgagtttcaacaatttacctgaattgaaactatacaaaccgttcgaggacgctatccgtgagagagcgtttctgtcgcaaaacataaagccgatacccacagagacttttgcgaaagagactgtttccgtggtgctgaagaaaaacccaccggcttggtactctacaggtaggttatctacagtcatggcgatcatgcaccatataccgattttcatgaaagattttctgttgactaagagttttatgaaaaagggagtaaaacctgaatagttgtgttcttggttagaaactgttttaaatgtatccaacaaagtaaatgtgttgcctaaccatgttacatctttagtaaaaggattaatcaaggtactactttggtagggtgtgcaaaaacaaaaacaaaacagtggctaagcagaaacttggttataaacaaaaaaaacagtgcctaaccatgttacatttatagtaaaagatccaaaaggccgaaccaaaaccaaatcgaactaaaaatgagtttttattcgattttggtttgtataaaacaggtaaaacttaattcgaaacaagataaaaccgtaaagccagattgtctactagactacccttatactttggtttttggtacaaagatttgtaggggaaatgtcatatcatctgtgatg

SEQ ID NO: 1470 - DNA, 3000 bp, Unknown
  misc_feature (1)..( 3000): cDNA_ID_3062554_gDNA_ID_1620406_Annot_ID_156105 3000 nt of promoter + ATG
tggtgtgattcttactttttaacagcttcgatgaacttggcaagaatgactgtttcaatgtgagattctgcaagcgttaaaagatgattcaagcatctgttccatgccccgaaaccaccaagagtctttgaatgcttctgcaatctcgctgccacattttgtagcaatcgcgatgttcgatactgaggagacaaatgtaaagaatacaattgtaatgaatgaaggcaatgagagtctcagagagatattatatacagcaaacactaactcacccggaaagcatctagttggaatttaggatctcttagatgatcttcaccttcccaacgcgctgtaacgggatttggctgagacaaataagtgttcattgattctctcaagtagctccatgtaactgtcaatgtcccgccttggaacttttctttataacgcttcaataaatcagcagccacctgaaagcaaaagaaaaactttgagcatgattattctcaagagaagtgaaagtttcttaaaggagtgaaaggaggacctgttgcagaagtacagtgttgtctccttcaaatgtttggaaaatgtcatgatcatttctcaagcttccaaatcggttaacagctgcgtaaccatgacctccacaggcttctctgcagaccgagagcgccttggcggtgtaagacgtcacataagatttgagcccagcagagagtgcatggacatcagcaaccaattgctcatcgtgagtcttcttcatctctgaatatttctccacaaggtatacagttgcaaaatggtatgcataggtggaggctaacatcggcatgagcttgtgttgttgagactggtaatcgagaatactgacctcaggttgctttggaggcccgaattgttgtcttagaagagaataacgaatggcaatcgttgcagagattttaaggacgccaacagatgcataggcaaggccaactcgaccacctacaagctcaccgagtgttgcaccaaatcttttattgattgttggcaaactacttgtatacgtcccatctcgggacacatctccaaaacgattgagaagattatcacggggtattctcacagaacggaatctcaacgcaccattatccactccattaagtcccactttatgtccacaatcttggatttcaacaccagggagtgtctggtgtgttttcatatcccttatcggaacaatgaaggcgtgaacacccatatccgagactcctttggaatcatgagttggaagtataagcctggcaaaaacagtggcaaacttcccatgaactgcagcatttccaatccaccatttgatagctccatcattaggtgtatcgatcacaaattcgtctttaagtggatcgaatgtcgccgtggtctgaagaccttgcacatttgaccctagaagaaacatagacagacacttaatactgggcatgacactgagacagactactagatgctgaggggacattagacatcactcaccatggtgtaattcagtcatggcaaagcaaccggtgtaatcaagattgtcaatgccatcaaaatacttgtctctatgcttcttagtccctaaattgatcacagagcctccccagagactgcaaatatatacgtatcaacaaatcaaatccagagactagagtatgaatcctaacatcaatactaacaaaacaagatcaaaccttttccatcaagaacaaccacaaaacaaaaatatttcaatttagactactactaacctgtattgaacgcccatcttaatcccaagggacatatcaacacttccaacagcttccatgattgcgaaatacttctcaggatcatcagcaacatacctaaacggccttaccccagcttctctaacaagccctataagctgattcatacacaattcccgatgatcatccttggagatctcgatcggcgtctgcaaatcgggtcgggaattgaaaaagtcgaaaattttctcttgtatatctatatgttttcctctcatatacagcgacaaagcttcgccgttgacatccagcttcttcgacctcgccgaacacgtctccgtctgcaccaacggtaacgacggcgacggcgtcaaggagggagataggtgtaaagacaatcgttggatccgcctcgccgcaattagcccatcagattcctcctccgtcatcggattcttctctcgccgcgattccatttcaatgagttgaaaattttctcttcgctaacgaatttatgaaaattataaaggtgaatgcttttacggcaaggaagatgacgtggacacgtcgttgtcaatgacgtgtagatatataagtggataacaatttggctctatctggtgtgcttttcgaggtgatctctttcctttttttgtcagataagatttttgaccagacataagccagattgatcttttccatcttgttacccaactttcctaattttaggtaatgtgggcttttgggctttatgtaactgtgggtttttaatttgtggcccattaagtaaatctaagagtcctcgcgcgtgactcccgagtccgacgaattcgaaacgcgggtcaaaagaaaatctaagatcggagaaatcaggatttgttcccgcctcaaccacttctaaaataaaccctaattctctgttgagtatatttttgcttccgattaaaccaagatttctcatttcttgcttccgattatatcaagatttctcggccaacgacggatgccattaatccattggtaagtaacccaaactcaatttgattttgtctctttcgttaaatttagggttcttcgtttctaatgtacgaatcgcttcattttctagcttctttgtcagttaattgaagtgggttttgttcaatttcatatcttggatattaaaaattgtacctctaaattcttagggtttgttggtgagttttgatttcttgtttggaaatttaaaacgtttttggtttttgttttgttttggtgatatttgaag

SEQ ID NO: 1471 - DNA, 3000 bp, Unknown
  misc_feature (1)..( 3000): cDNA_ID_2136597_gDNA_ID_1620407_Annot_ID_156141 3000 nt of promoter + ATG
tattgtaacattttgagcgaaaacaaaaacatgaaaatatttcacctacatgtccacaaaacataagtttcccaagattatatagcaaatcacatttattagacggcacgagtcgtttgccaaagctcataacatccatatatattattctgatgtacatgcattagccattttaacctataagaggtggaacttttttttcttctattcccactcatatgacgaattaaagtcacctgtcaactatatttcagtacacgaactgctaaccatttttgttttaaataaaaaaatatcatcgtcatgtaacatcgtttactaaaccttaataaaaataatttacatataatactaatttgaaaaaagaaaaaaaaaactgagaccacacacaactattactgcaaggaataaaaaaaggagtatatattgacgtagtttcttcatataacgaatttaagtacatggacaagatatcaattaccatgaactcagaaatagtaagtaattttttttatatataatagtaagtaagttgactactaataaattttcagaatattattgggttaccatcctttttgacctcgatggtttgtttaaattttgatattataattatataggatgatcgacatgtaatgatgtacatcaccgattaacgtcaaatatagttttatcttatataccaatcttgatgaaactgaaaaccacacgtaagacgagaacgtatgggcatgatttcctcgtaaataatgttttgattgattagcacttaacaaaattagaactagttttcacaaattgatattaagataatgtggattcatattaagaaaataagtacgatcatattcgtctggttgacaaaaagacgcatgtgataaacatttggccccacacacattgaatttacaaactgtttctgattggcacgaaaagtatggtgcctccttatcctttttttttcttcttcttatgatcaatttccgaatatatttgaaacaaataaattatgccaatgccatagtaacaaacaaatcttctttatcagaaaaacaaacaaaccattttctgtatacattgctgattaaccggttagaaaaacgtgggacaagtagggttttaggttaagaaaacatatcgctgtctagtcaattaccagttgtaaaatatcggttccagagcttttacaaacaaatgttgtgtttcattttaatgttggttataaaaaaaaatgtctgcatggtacatgcaaaggaaaaacatggctcaatacagaaaaatctctaattaatggaagagaagacaaatgactcaacgagtctacgtactagcgtaagtaataccttgaaattcgaatcaataataatatatagtaaagaaaaggaaagaaaaagcaaaatatccgttaaatggggaaataggagaagaagaaaaatgaagtctatgattttcgagctcccaactagtaactacaatctgccgttataatttgatggagattgattaacaaaagaccacattgttgttggcaagtgtgatcgcgtacggggattcttataatattaaataacaaatgtacgtaaaatgttttacaccacatattataccaacatccttgaacaaaaaaaatcttcttttaacgatgataaattctatttttattagatcattcatacccatacgttcttgatcatgccgtaaatctagagagcaaacatttgtgagtgtcagaaagtgtgtctcttatatattaaaacacatgatcaacgatgatgagtactcgagttctagggtaagagtaaagattgacctaggatacggttgttcgtgttaacaacgataagaactcgagtttgcggttcgaaattggtgttttcctcgaaatttttctaactggatcacttgtgttttctttgttatgttttgtttgtaattttcgttatcatttcatttttcagttttttcccgttgtcaaaatttttaaaaaagtaaaattacttaacattgataccacgtaaaaaaatattgcactatggtaattttatagtgcttatctcttataatagttactttccataaattttaaatgataaattcatttaaaatgtgataatggtaactatgagtctatgaatctatgattgtaaaatcatgtattttagtttatgatatttcgacgcattctttaatttcgtgcatagcgaatttgatttacatttttctacaaaagttttttttttttttttggtatatacagaaattgggaggatagtttggttaccaacaaaaatatattattgggagggggtatatgttgaaaggtgagcaactggcaagtgggcacatattacatgaatgggccattttctaaagtgtttggattgcttgtccaacaataactatccaacattcacttgtccaattgctttctagcttttgcttttctgcttgccctttcaattaatacacaaatttatgtatatatacattatccacctacatataaagtatatacatgaactttcgttttcttataaaatgaaaactattagcatattcctaaagctctcatttattttcgtatgatcaacttggtttcttagtttttttgttaatgggcttgattttttaataactcaagagatatcttgaattatataaacccaatgaaacaaaacgtgacaataaaatatctcagaccaaaataaacaattttagtcaatatgggctagattataggcccataaaggtcaacaaaattacaaaacctctgttttcttcagacagctttcgagcttcgtttgtcagacagagaacacgtggcacttccttcagcacctctgtgtcaaagcaccgtgagagacaatggtgacgcgtgtgaccagacggcgtttaaacccttttaccaaaatctcatctttcttcttctccgtcgtcgtcatcgtaatatctttaatctgatcgttttgtcgaagcacaagaggctgaatcaacatg

SEQ ID NO: 1472 - DNA, 3000 bp, Unknown
  misc_feature (1)..( 3000): cDNA_ID_2136632_gDNA_ID_1620407_Annot_ID_156153 3000 nt of promoter + ATG
gatgagggattgagtgttgggacgatcggaggaggaacaaggtttgtagaagtagagagtgcccatgtgaagtctcacttgaatcaagtctaaattggaaagccatagattgtgtgtgggtgtttcttcagctggcttcacgatcgtagcttgcttcacccgaatcttcatttgatccacgatcactaaaaggcaatggctttaaagacagaacacgacttgattagcatgacctgatctgctgatcagtttaccggaaagtggagactgataaagaagaaaaagaatataaaaaggctctttttttttgtcgacaatataaaaatgctaccacctcaaaagaaataagagatgaaaaacaagaaatttgagcactagacgcaaccactccatgaattgttgagaatgggtacaatcataattcaaaagtgataaagagaaatctttacaaagacagatacctaaaaaccccatgataaactcaacttacaataacagcaaagctttacaaaaaagccacagcttattgtctttgatgaacaaagagagtgattggctcagtaaggaacaagaacacgaacggaaggtggaccagatctcatatcttcaagtaacagatcaagaagcgcctttgctataggaccttcttttcctgagtcagacagaaagaaacccatctttaatcagccaatctatccatcatgtaagtaattaaaagtgaggcttttaaaatgtttatatgataatcttacttaccttcaccaataaattcttcatcccattgaatcacaggtctgatcggaattccactaccaataagcatcatctcatctgctttctttccatcttcgactgtcacatccattactttcacagttttaagaatccccttgcttacaagctgttcagcgagtgtaagtgttctctttgctgtacatccgctcaaaacgttatcaaaccgcggcatcacaagctccttaccaccattaacaacaaacgccacattcatgttcgggccttctgcaataaacccatctttacacacccaaatacctgcataagctcctttggcctcagcttccatttgtgagagtacgttagggaggtagttaacacttttcaccgtggcaaactctggaggctttatggggatggacgaggtcactaccttgacacctattgggttaatggcgaagttcgtttttataacaatggcatagagagttggtttgagacattgagatggagataggaggaaatcccctggccctgcagagagccagtatcttagagatccatctctacatccagaaacgctcacggtttgaatgagaattcttttaatagtttctcgatcgaatggaagtgggatcttagccattgatgcagatcgcaagatacggtcaaggtgctgatccaattcataaaggtatctgcttattcgtaggacaacaagcgaagctcagatgattgagtaataagacaaattagaaaagggggctactatttaaagtgactaacccattgatgatcagggcagtgtcaaagactccatgaccacggtgaaccatgtgatcatccaatggaagaaccatcgctgctggatcggttgtaattccatcaacaacacttgagtacatggccaagaactgttgtcctcctcttgctagttttagcctctcaccaaccttttaaaccaaacatacttcactgatactcaatcaatcaacgcctctaaacataaacggataacaaacaaatgtcgcaatccttcattacgggctgcatctataatttcattgacaaaacacagaaatgtctggtggttgtgtcaataaacatctctagctaacaaattgtgaacagtttcaagagttaaagatatgattgataagtacagacataaaagagaaaccataattacctcatagctagataaaacaggaacattccacgactgagagcttgaatctgtggagaaacgaatgcagatttttgtcatcaattccagaacacttatggaatttaacgatcaacaaattgatctcttttttagggtaataagtgtacattaccctaaaaagattataataaatgcatcaccaatcacaatccagaagaaaaatcagaaaagagagaacacaaggtagaaatgtcgaaccagaacacatgagaatcgttcttcttcgtgtcaaccgacgcgggaatcgaaagccatgtcttaaaggacatggaacttgagagagagacctgagattccaagtgttaactgtaaactccagcgacaaacctgccatggggtttgggactcaaaagaatagagagagagagatcattcggaaatagcaacttgctttgcattattattatctcagtcgtgaactggaagaagacgaaaaaatatttgggcctaacttcaccacaaaaataaaataaagttattcggcccataagcccaatatgacttttcgcattgtattttaatattcaatcaatcaaaaataaaagcctaaaacaaaacaaaccctctctgtcttttagtgggttttgtacgacgcctaatcgatgttagtattatatctgtagccaaacaagccaccaaagtggtatttttcttcttccttccttaccttgtagggctctgagctcgagttataaaaaagccaactttgatttctttgccagtatttcatccttaatccattcttgtggtcactttttcgtccttaacccatctaggtaagtcgatttcattgtttgttatttgagtcagtaatttttgaaaatctttgcttttttttcttttcttttgaatatcaaaagaagaaaagatttgggggataactagatcatctctttagttaaattgactctttgaggtgtgtcaattgtcactgatagtctgattaatcttttattggcatcttagaacagattttgattctaaagtcttgtgaatcggcagcggaagaagagtgaattgttcatccttatcttgcc

SEQ ID NO: 1473 - DNA, 3000 bp, Unknown
  misc_feature (1)..( 3000): cDNA_ID_2136648_gDNA_ID_1620407_Annot_ID_156157 3000 nt of promoter + ATG
aagaagaagaagagaatttttacccacaagcattaacacgaacaactttcataagccggtggagattgttgatcaatctgattcttgcattgtatactttataagcaagaggcacaaggctcttcacaaccataccatttttaggcggaggtagaggtctcttaggtttgtctttgttgttcttgactctctccctcgcagctcgtctcaggtccacaatagggactgggaaaggtttcttctctcgccttgtgtactgcttaggtaagtcttcattctgaggacgatcatttctcacaactaatggcagagatcgacgctctttactaagcacaactcttgaattcaactgaaggctaaactcaatgctacttccctgcacaacatatccgcacataacagtaaacattgactctctacttcaaagggaagcaacgaagtgtggtctaattctaagaaccaaaacaacaacgaagcagagtctggagaattggatgatactgactagtaaaggaatctgacctgaagagaaggagagaacccaaatctataaaacgtgttgggattaagaaattgcctcctggttacgctatgaatagcaaaaggtacactttttggtgaaaacccagaaactgtactagctggataaaacaacggaaaccaaaatcaatcacagtctcacaataaatggataaaattgagcattgaggacggattcgacacacagtgaggaagaaacttacaggaaatagcggagtacgttatcgacatcgtcgacagttgctggattaaaccattggaagatggaggataaggaagagagagcggtctcagtcccggagacgaagaagatagctaatgtaaatcgtggacaagcttaaagctaataagttcaaataatgggcctttaatgggcagaagttcccattaggcccacttataataacatttgtttccaaattccacagttgtataaccgatccggcctttaatgttttctttccaatttgaatttaggatattaaccaaaactaacattgtattaaacactcagacagagtaatgcaaagaaacaagtaaacttacaaaccgaaatcgaaccgaattggctaagaaacaagactaaatcacaagccaaagtaacaagtaaaccggaaaatacaaaccgaaatcgaaccgaattggctagaggtaattcacaagactaaaccaaaaggcctaatggaagaagaagaagcaaactccatgctgtgttcaggcttcccttgttcatgatatgagcgtttaaaggagcagcagcaacgcttctgttgtaatttggagacaagacaatgtttacaggagcaggagcatcaacaacgcttctgttgtgatttggagacaagacaacaacacgaagcttctctcctctttggcaatgtccttcttctccacttatgaagtaaaaaggacctgacctcttcagctctatattcgtgtgaccatctttgtatcctcttattggctctgatctgtcacatctctcgtaatctgtttgtctcacttgcaacactgaatcattctccgcattgtatttccacactgttgaaagacaaaatgaacttttatgagaaacaaaacagagccatgtaccaaagtcaaatcttattacttacagagagaatctccaattttgaatcttgttctgcctgaccattggtttagtgtttcatctctagattctggagccttccatgtgttagatttgcctcccaccagaatctctctaccttcagacaacaaaccaaacaagagaagcaaacaacaacacatcattactgaagacattctggttatacaaaaaagtttaattatgtttctgtgatgattaatcatatgatgagaatttgcaagaataaataagagaagataggtcagtggcatcttgaatccaaacaaatccttcccatgaattaaaacgtgactaccatagaaacaaagctcgtgaaaatgaagaagctaaccgttacagttactacagagctgtgtgttaattgtgaccaaaccctttttcaccattgcatcagctgatggtcactgactaactgatgcattaaacacactagaatcatcgatgtgaacgcaaaaagtcattgccttaaactttatttttttttggggtaacagagtaaatggaatgcatgtgaagagatggcaatcttttaacaattgacgtaataagaagattttttttttatatagaagaaaactaaaaccttgcaccagtttccagaaatcaagacagagttttctgcaaaatccgtatttttttaagtaataactaaaaggcgaatctttttttttctcttccaccatctgacttttcttgagggattatattaaaaagtctgaaaaatatatttcaacctccattctcatcggtctctatacaatggacccagttgaatgaagataaacttaatatttacagacgacaatggaacacaagaaacaaaacagaaaggtttggtttcttcaagatttctctaaccaaactaacccattaatataaaaaaagttgtctagttgataaaatgttattaaaaaaggaagttgcttttatgtgttttctttgacccattacacaatttacttagtgccacaagtcattacccatttcctgcataagtctgcttccatcttcatcactgctgtctcaacccaacacactcacatccaaaaaagcaaattttgccttttattttaatttttgttttcttttttcttttctttccttctcacaacaacaacaacaacaacaacaacaacagcaacaacatgatgtgtccttcttttctgcttctttgtccttctctgacttctcctcacattgatattagacttctacacgaaacccagaaccttcctctttctcatttctctctttcctctgttttcatcttttgctcttcatctctctctttctctccttgtgtgattctgtaatttactcatctgatg

SEQ ID NO: 1474 - DNA, 3000 bp, Unknown
  misc_feature (1)..( 3000): cDNA_ID_4371064_gDNA_ID_1620407_Annot_ID_156156 3000 nt of promoter + ATG
acactgaatcattctccgcattgtatttccacactgttgaaagacaaaatgaacttttatgagaaacaaaacagagccatgtaccaaagtcaaatcttattacttacagagagaatctccaattttgaatcttgttctgcctgaccattggtttagtgtttcatctctagattctggagccttccatgtgttagatttgcctcccaccagaatctctctaccttcagacaacaaaccaaacaagagaagcaaacaacaacacatcattactgaagacattctggttatacaaaaaagtttaattatgtttctgtgatgattaatcatatgatgagaatttgcaagaataaataagagaagataggtcagtggcatcttgaatccaaacaaatccttcccatgaattaaaacgtgactaccatagaaacaaagctcgtgaaaatgaagaagctaaccgttacagttactacagagctgtgtgttaattgtgaccaaaccctttttcaccattgcatcagctgatggtcactgactaactgatgcattaaacacactagaatcatcgatgtgaacgcaaaaagtcattgccttaaactttatttttttttggggtaacagagtaaatggaatgcatgtgaagagatggcaatcttttaacaattgacgtaataagaagattttttttttatatagaagaaaactaaaaccttgcaccagtttccagaaatcaagacagagttttctgcaaaatccgtatttttttaagtaataactaaaaggcgaatctttttttttctcttccaccatctgacttttcttgagggattatattaaaaagtctgaaaaatatatttcaacctccattctcatcggtctctatacaatggacccagttgaatgaagataaacttaatatttacagacgacaatggaacacaagaaacaaaacagaaaggtttggtttcttcaagatttctctaaccaaactaacccattaatataaaaaaagttgtctagttgataaaatgttattaaaaaaggaagttgcttttatgtgttttctttgacccattacacaatttacttagtgccacaagtcattacccatttcctgcataagtctgcttccatcttcatcactgctgtctcaacccaacacactcacatccaaaaaagcaaattttgccttttattttaatttttgttttcttttttcttttctttccttctcacaacaacaacaacaacaacaacaacaacagcaacaacatgatgtgtccttcttttctgcttctttgtccttctctgacttctcctcacattgatattagacttctacacgaaacccagaaccttcctctttctcatttctctctttcctctgttttcatcttttgctcttcatctctctctttctctccttgtgtgattctgtaatttactcatctgatgaatccaactcacggagatttcactcccttgaactctaatcatttcgaggatccaaaggtcaggtttaggcatcatagccttatgcaagactatggagaattgcatatggtacgaactctcttttcttgagttttagatcaagtttcagtttctgggtctggttttagttgtctctggatctgagaatgtaattttatttgctcaaagattgatctgggctcagagctactcggaaaacccggaaaaaggaacaactttcttctttaaaataatagaaagaagaaacttttaagtttaattgcttctgcttccttaacaaagttaattacttattaagatttctatgtgtagttagttatgcaaatctctattagtcttaactcttaaacatagttttaggatttaaaaccttgttgtgtacatattatcagctcgatactctgatctttgagatcatttggttatgagcttttgttaacgtgtgttggttgattatatacactaggaaaccgaagctatgagaaaaaggttacaggcagtgcgagaaagaaaggcaacactaatggctgaagtcaggtaaagacagtttcaatccttgacaaaatatatcattagtcctttcctttgatgttttcctcacttgttaatatatcgttcgtttataacctctttaacagatttctgcgacggagatacagacatttgagacaagaccagccacaagagattaaaaaggtcagaagatcaaatggtgggaagaagatccgagtggaagtgtctcctagtaacaaaagtgaggcggaaactaagcatgtttcgcttcctgacttaaaccactcggaaaaggctcacgatgaaaccaaaaccagtcctaagagaagagttcctttgtttgatctaaatcagatatctgtaagcacatttttcactcttaatcagattgtgaagagacttagaaaccaaacatgtctttactcataaattgatttatatagggagaagaagagcaagaaacagaggcagtggacaataatcaagagaacacgagagttgaagaaagtaattcatgtaagagattaatgatcagtagcattgagatgcagcagaaagatgtgaagccatcttcttgcaggaatggcggaaacggatcaaataagaggaaaatttcatggcaagatcctgtcgcagctctcagagtctaaaataagaagacggaaccttttgttcctcctcatagatcttgttgtaacatagcttcacatcaaagttagcttgcttatttacttatcttgattgaacaacatatccaattgtgacttgaaaacttaaaaaccttatccaatggtggcttattgcaaacgtgacatttctataccgaaacatgtgtcagcaaacgacatttatggaagtgatccaaaagtcaaggaacaaaattaacggtcagatgcattgacacgtgtctaaagagacacgtttcgtgtaactttaaactacattattaccgaacacaaagaaccgatctttgaaaacaaaacaagaatctttatg

SEQ ID NO: 1475 - DNA, 3000 bp, Unknown
  misc_feature (1)..( 3000): cDNA_ID_3062601_gDNA_ID_1620407_Annot_ID_156166 3000 nt of promoter + ATG
acaaaaaggcagtggctttggcacttttcaccttagtttggaacctctcctcagtcactgcccgtgtttgggcagcattcatgttactcgtcgccttcagatattatcaacataagatgatttggacaactgatcaagctgatgatgatgaggatgacaatgaagaagaagaagcagaagaagaaaaagaacaagtccctcctaaacacaaaagggctcctcctcatatgatgatgcctaataaactcaagaaaatttcttaaatatactaattgtttttcctccatatataaacaacatttactatgtaatctctttagtttttagttacttctctatacaaagcttacagtttataatgtgaatctgatcttctaagttcaattaacttatgccaacaatctaaaactcacacacttgaaatatttatccattcttcttaaacttagttagacttgaacccaaaaacaaacaatcttaattaggcttctaacgggctttaagcgggccttattacataaactattcagctttcgtgaaataacaaatcggacagaagttgaaagctttacttcttcacttttacggttgctcaccgtcgtgacatctccactcttttcctttcaaaatccaaaatcacgatttgattttctctcgcctccgacgaacaagtttaaggtaccactccatgtttctctgcgatttcaattcgaactccatgtgaccttttctctgtctgtgtttaatttagggtttactcaattcgtgactttcatttgcgttgaaaaatttatctgattttgctttgttgtgacttgtgagtggttttcagatgagcgtagcaagtgattctccagttcattcatcaagtagtagtgacgatcttgctgcattccttgatgctgaattagactctgcatcagatgcttcgtctggacccagcgaagaagaagaagctgaggatgatgtagaatctgggtaaactcaactctcatatgtcatgcattctctctaattgaatcttcgaactctctactggtatttacagtgtgtatattttctcaaaccatgtttctcaatcttttaggttaaagagacaaaagttggagcatttagagggtgaagctctctttattgattcagtcttatttttctgtctttcgtttgttcgattgtattgaattttgaaccttatgcttgcagaagcatcctcaagcaaaggcgaatgcgagcatccaggatcatttgggaatatgtgctttgtatgtggacaaaaactggaagaaactggtgtttcatttagatacatacacaaggtatcgatttcagaatagcttctcttaaatcaaatcttagtttttatttaatgagctttgggaaatctgttttcttaggaaatgaggctcaatgaagatgaaatctcccggttgcgtgattcagattcgagattcttgcaacgccagcggaagttgtatttagttctcgatctagaccacacactgctaaatacaaccatactgagggacctaaaaccagaggaggaatacttgaaaagtcatactcattctcttcaaggtgatacattcagctacattgttttgcttctttttcaaatgtgatctttgtgcatggaacttcagtctagtatttgtctttttttttgttccatctagatggttgcaatgtttccggaggcagtcttttcctactggaatttatgcaaatgatgaccaaactgaggccgtttgttcactcatttctaaaagaagctagtgagatgtttgtgatgtacatatacacaatgggagataggaattatgcacgacagatggccaagctgctggaccccaaaggagagtactttggtgatcgggtcatttctcgggatgacggcacagtgagacatgaaaagagtctagatgtggtgcttggacaagaaagtgctgttctgattcttgacgatacagagaatgtaagtatgatttgtaatttgtcaatgtttcatgtaacttttaatcatgatattgagttgtgctgatgatacttggtttgatgctcaggcgtggccaaagcacaaggacaatttgattgtgatagagagatatcactttttttcttcgagctgcaggcagtttgatcacagatacaagtctctatcggagttgaagagtgatgagagtgaaccagatggggcacttgcaactgtcctgaaagtcctaaaacaagcgcatgctctattctttgaggtatgcactcactggatctaaataaaacttatctcttgtcttgttggagtttgttgattatattattcgtttgtttcagaatgtggatgaaggcatatcaaacagagatgttaggttaatgctgaaacaagtgcgtaaagagatacttaaaggatgtaaaatagtgttcagtcgggtgttcccaaccaaggcaaagccagaagatcaccccctgtggaaaatggctgaggaactgggagccacctgcgcaacggaagtggatgcatcagtgacacacgttgtggcaatggatgtgggaacagagaaggctcgttgggccgttagagagaagaagtatgtggttcatagaggatggatagatgcagctaattacctttggatgaaacagccagaagagaacttcggtttagagcagctcaagaagcaattgaccgaagaagagtgatttatgtaacaacaatgagaaagaagagatagcttttttttgttggatattaattatgaatctatgtctaaagtaaagttttgtaatgtacattacattgtatctctgatatttaaacaaggtactaatttttggttgatctccttaattattttgtttcgtctatgcttatttgcgaaggtctgtaatctaccgacaacttttttgggccgggcctaaatgggccgtatatttatgtccctcatctactttcatttgttttgtttggtgtttgtttctggtttctgattccgtcttcttcgcttagac

SEQ ID NO: 1476 - DNA, 3000 bp, Unknown
  misc_feature (1)..( 3000): cDNA_ID_3062603_gDNA_ID_1620407_Annot_ID_156165 3000 nt of promoter + ATG
aaaggagagaaagagagcggaagctgcaacgcactattaaaccctagctaaagacccagccacttattttattttattttataaattttgcatttgatagagacaggagtttctgtttctgttttctgttacggtggtctataccgcgcctgattattaacccggggaatgaaacagtacttattatttatagccttaaaccctaatttaaaggaggttgaacttggaataatataaaaaccaattctaggcctaatcaatgtataagctataaatttagaactattctaaagcttttaaaatataaaaattaatgaattaaatccaaataaaagcttcaaaatgttgatattggttcttcacattttttttttatattttgtttaacttattttaaataatattaccataaaactaactcagtattgaattataaatggaattaaaaatcaatagatattcaatttttatttttctggtaggaatagatattcaaatttaacctaatgggaaagaaattcaaaaataatattgttaatttttaaattcagtcaaatttaattgaatcccttccttccataatcccctaaacccctgaattctgttcactaataggcctaattaaaaagcccatttatatgagtttgacgatttgttaggaagtttggaactaaaaggagaaactggattgggcttatttcgatgagtaaacccggagcttttgaggccatatataataaacccacactagttgcaaactggtgctgactattattaatctatgtaaaagtttcaatttaaataattttttatattggaaaaaaaaagcaattagtaaagaaatagatttactgcagaaatcttaaatctttttaaaaaaatatgaaattatgaatcaactttttaatttagagcaagagaaaggaaaacaaaagtttagtggaaaaagaaaaagtagaggaattgcatggggggagagaaaaattataaaactaaaaacaatagcagacagctattgtaattggtaaacatgtgtagtagtaaaaggatcccgagtcggtgaagactccaaagtacgtttgtatatttatatatttcagagtagtgaattggaggaaatcaatatctatctaatccccataagatacacccattattgaaaccatggcccattcatatatttacttatttgtttctgtgtgaccgttattacttatttgtctcattcttaaattagtgaatgattaaaaaaagattgtgtgtgtggatgggtcatcaactcatcatgggtttaggtaaatgttactcacaagtcacaattaacaactttttttttataaaagaaaaacaaatatgttcgttgccacggtagtttggctcactccaaatttaataacgtattgtattcgcaaaagaagatatactaggagaaagcaaaatgtgttttgtagtattaaaaaagagtctataaagagagagagagagaatgtgcatgaaaataagaaagacagagagaggggaggaaaacaaagaagcaggtgcatagggagaagtgccatgagtcacgtgccctcttactcgaccacgtgccgtcgaagcaatcccaatccaactccgattcgtgttccaatttttcattggggtctaaacttgattagtgtactactatgtaattaattagtgtggttactaattagacacgcacacagacgcaattgcaaattcacatttagattaaggagaccaggatccgttatagctgttaattaggtagggtagtttatccaatacaccaagcatgcatttaacgttaattgagtgtttgctagtacaatccatgcttgatagtataaatgtattgatattcatatattacaaattaaaatatgtatgcttgtactatctatataaagttacggattgtgactttttcttttggtgtaaaaccgatttattatcactgttttctgccacaaaaagctgtcggtggcactcacttcactaatccagtgacagtaaatttttataaaataagattatctaaattaaagttaaaataataacaataacacgttaaatacttaaattagatccatttgttcattctcatctcaaacactcgaccttttataaaggaaaatttagtttcactctctccgactccttccaaaatgatttactttttaatatccaaactcatctaaatttgggtctatatatggctccgtatagatatattctaatattgcatttaactgacgtagacaatattcaatgccataaattttcctcttggttagttggtgaaaaaagtcaaaaccgaactaatccaacaaatattcgttaaattttagctagtttggtgatgaagtaaagtctttaacatattcttacttttgtaaaaaaaaaaagttatattgatatttgatcaaagtatgagtatttacatgaaccatgtgaatacgtatataaccattcacttaaatctcgtgaggtacttgaagaacaaaaataatagtggaagaggacgcaattcaattgttaaacacggcacatgttgattgatagataacgtaaactttatttcataaagtaaaaaacaagaagtaatcaaaattaattaacttcaaataaaaaaagaaaagtaaaaaagtagagagattgtgatcataaaccttgatgattatgtttaagtaagcatctttgcagtgcaaccacatgcaaaggctttaggttaattttaaaagcagtagccaattatccaatttggtgatctatagctagtctcaatcttcatgagacaaacataggtccccctcctctgtctgatctaacaacccaactccaaattctgctttatcagaaattatatgaaatcaattaccttttggtgcccaacaacctccattttccttcagcttcaaggctcatcatcattactactttcaaattcacagctcgattactagtacgacatagacatagacataaagacagaga

SEQ ID NO: 1477 - DNA, 3000 bp, Unknown
  misc_feature (1)..( 3000): cDNA_ID_2136676_gDNA_ID_1620407_Annot_ID_156164 3000 nt of promoter + ATG
tgggcaccaaaaggtaattgatttcatataatttctgataaagcagaatttggagttgggttgttagatcagacagaggagggggacctatgtttgtctcatgaagattgagactagctatagatcaccaaattggataattggctactgcttttaaaattaacctaaagcctttgcatgtggttgcactgcaaagatgcttacttaaacataatcatcaaggtttatgatcacaatctctctacttttttacttttctttttttatttgaagttaattaattttgattacttcttgttttttactttatgaaataaagtttacgttatctatcaatcaacatgtgccgtgtttaacaattgaattgcgtcctcttccactattatttttgttcttcaagtacctcacgagatttaagtgaatggttatatacgtattcacatggttcatgtaaatactcatactttgatcaaatatcaatataactttttttttttacaaaagtaagaatatgttaaagactttacttcatcaccaaactagctaaaatttaacgaatatttgttggattagttcggttttgacttttttcaccaactaaccaagaggaaaatttatggcattgaatattgtctacgtcagttaaatgcaatattagaatatatctatacggagccatatatagacccaaatttagatgagtttggatattaaaaagtaaatcattttggaaggagtcggagagagtgaaactaaattttcctttataaaaggtcgagtgtttgagatgagaatgaacaaatggatctaatttaagtatttaacgtgttattgttattattttaactttaatttagataatcttattttataaaaatttactgtcactggattagtgaagtgagtgccaccgacagctttttgtggcagaaaacagtgataataaatcggttttacaccaaaagaaaaagtcacaatccgtaactttatatagatagtacaagcatacatattttaatttgtaatatatgaatatcaatacatttatactatcaagcatggattgtactagcaaacactcaattaacgttaaatgcatgcttggtgtattggataaactaccctacctaattaacagctataacggatcctggtctccttaatctaaatgtgaatttgcaattgcgtctgtgtgcgtgtctaattagtaaccacactaattaattacatagtagtacactaatcaagtttagaccccaatgaaaaattggaacacgaatcggagttggattgggattgcttcgacggcacgtggtcgagtaagagggcacgtgactcatggcacttctccctatgcacctgcttctttgttttcctcccctctctctgtctttcttattttcatgcacattctctctctctctctttatagactcttttttaatactacaaaacacattttgctttctcctagtatatcttcttttgcgaatacaatacgttattaaatttggagtgagccaaactaccgtggcaacgaacatatttgtttttcttttataaaaaaaaagttgttaattgtgacttgtgagtaacatttacctaaacccatgatgagttgatgacccatccacacacacaatctttttttaatcattcactaatttaagaatgagacaaataagtaataacggtcacacagaaacaaataagtaaatatatgaatgggccatggtttcaataatgggtgtatcttatggggattagatagatattgatttcctccaattcactactctgaaatatataaatatacaaacgtactttggagtcttcaccgactcgggatccttttactactacacatgtttaccaattacaatagctgtctgctattgtttttagttttataatttttctctccccccatgcaattcctctactttttctttttccactaaacttttgttttcctttctcttgctctaaattaaaaagttgattcataatttcatatttttttaaaaagatttaagatttctgcagtaaatctatttctttactaattgctttttttttccaatataaaaaattatttaaattgaaacttttacatagattaataatagtcagcaccagtttgcaactagtgtgggtttattatatatggcctcaaaagctccgggtttactcatcgaaataagcccaatccagtttctccttttagttccaaacttcctaacaaatcgtcaaactcatataaatgggctttttaattaggcctattagtgaacagaattcaggggtttaggggattatggaaggaagggattcaattaaatttgactgaatttaaaaattaacaatattatttttgaatttctttcccattaggttaaatttgaatatctattcctaccagaaaaataaaaattgaatatctattgatttttaattccatttataattcaatactgagttagttttatggtaatattatttaaaataagttaaacaaaatataaaaaaaaaatgtgaagaaccaatatcaacattttgaagcttttatttggatttaattcattaatttttatattttaaaagctttagaatagttctaaatttatagcttatacattgattaggcctagaattggtttttatattattccaagttcaacctcctttaaattagggtttaaggctataaataataagtactgtttcattccccgggttaataatcaggcgcggtatagaccaccgtaacagaaaacagaaacagaaactcctgtctctatcaaatgcaaaatttataaaataaaataaaataagtggctgggtctttagctagggtttaatagtgcgttgcagcttccgctctctttctctcctttcttttcacacagccgcaaaggctctcatcttcttcttcattcacacaatctctcttcccgacaatcacacggattgttgattcctctggatttggggtgaatg

SEQ ID NO: 1478 - DNA, 3000 bp, Unknown
  misc_feature (1)..( 3000): cDNA_ID_3062615_gDNA_ID_1620407_Annot_ID_156159 3000 nt of promoter + ATG
gctcctgtaaacattgtcttgtctccaaattacaacagaagcgttgctgctgctcctttaaacgctcatatcatgaacaagggaagcctgaacacagcatggagtttgcttcttcttcttccattaggccttttggtttagtcttgtgaattacctctagccaattcggttcgatttcggtttgtattttccggtttacttgttactttggcttgtgatttagtcttgtttcttagccaattcggttcgatttcggtttgtaagtttacttgtttctttgcattactctgtctgagtgtttaatacaatgttagttttggttaatatcctaaattcaaattggaaagaaaacattaaaggccggatcggttatacaactgtggaatttggaaacaaatgttattataagtgggcctaatgggaacttctgcccattaaaggcccattatttgaacttattagctttaagcttgtccacgatttacattagctatcttcttcgtctccgggactgagaccgctctctcttccttatcctccatcttccaatggtttaatccagcaactgtcgacgatgtcgataacgtactccgctatttcctgtaagtttcttcctcactgtgtgtcgaatccgtcctcaatgctcaattttatccatttattgtgagactgtgattgattttggtttccgttgttttatccagctagtacagtttctgggttttcaccaaaaagtgtaccttttgctattcatagcgtaaccaggaggcaatttcttaatcccaacacgttttatagatttgggttctctccttctcttcaggtcagattcctttactagtcagtatcatccaattctccagactctgcttcgttgttgttttggttcttagaattagaccacacttcgttgcttccctttgaagtagagagtcaatgtttactgttatgtgcggatatgttgtgcagggaagtagcattgagtttagccttcagttgaattcaagagttgtgcttagtaaagagcgtcgatctctgccattagttgtgagaaatgatcgtcctcagaatgaagacttacctaagcagtacacaaggcgagagaagaaacctttcccagtccctattgtggacctgagacgagctgcgagggagagagtcaagaacaacaaagacaaacctaagagacctctacctccgcctaaaaatggtatggttgtgaagagccttgtgcctcttgcttataaagtatacaatgcaagaatcagattgatcaacaatctccaccggcttatgaaagttgttcgtgttaatgcttgtgggtaaaaattctcttcttcttcttgtttcatttttggtctgttttgagtatggcctttttttgatgttgtatgattggtctcttaggtggtgcaatgagattcatgttggaccttatgggcatccatttaagtcgtgtaaaggtcccaatacttcccaaaggaaaggtcttcatgaatggactaactcggttattgaggacgttattgttcctcttgaagcctatcacctttttgaccgccttggcaagcgtatccgtcatgatgaaagattctcgattccccgagttcctgctgtagttgagctctgcattcagggcggcgttgaaatacccgaatttccagcaaaaaggagaagaaaaccgattatccgcattggcaaaagcgagtttgttgatgcagatgaaactgaattgcctgatccagagcctcagcctcctccagtgccattgttaactgagttacctgtctcagagatcactcccccatctagcgaagaagaaacagtctccttagccgaagaaacattacaggcctgggaagaaatgagagcaggagccaaaaagctgatgaggatgtacagggttagggtctgtgggtactgtccagaggttcacgtaggtccaacgggacacaaggcccagaactgtggtgcattcaagcaccaacagcggaatggccagcatggttggcaatctgcagtacttgacgacttgataccgccaagatatgtttggcatgttcctgatgtgaatgggccaccgatgcagcgagagctacgaagcttctacgggcaagcacctgctgttgtggagatatgtgctcaggctggcgctgttgtacctgagcattatagagctacaatgagactggaggttggaattccttcgagtgtgaaagaagctgagatggttgtttgatatgtagaagaccttgtaaacttcttcttgtacaaaatcctccattccaccttgtgttgtataataatatcacagcccaggtctttttgacttttgaaggacaaaaaaaacaatccacgctaatcctattatcaagggtaaaaatgtcatttgcttcgttttcatcttttctcgttgccattttcttttttttgtctgtgtcaagtcgataccacttgtctggtagctttatacccactttcatctttttcatgttcgtagttgttcctctggttatcctcatcaacgggacccttgaaaccgtgtagccatgtaagcctttgtctttgtctctttctcttgcttcagcaagttcacgtctgctctatttctaattttgttctaagattcaattctccttttttctatgcgagaaatttaagattggttctctagctctacctctttaaatttgttactatgtgtcggtgtccatcattcatcaaattttttccttttttatccatttgagttgatgtaatgatgttgcttcgcttcatactggtcagagttagtctaatcttcattttagcacaacttgacaacttcatatggttatgacttatttttacttgggtctttcaaaggttaagtattttagtcttattttgggatgatgcagcttgcttaatgattagagtcttaaagctgtgctctttcttcatcgatttgagcaagtgatcttggaaggctcttgagttctgaattccttgtaagcaatc

SEQ ID NO: 1479 - DNA, 3000 bp, Unknown
  misc_feature (1)..( 3000): cDNA_ID_2136652_gDNA_ID_1620407_Annot_ID_156158 3000 nt of promoter + ATG
ctcctgcaccgaaacgctatcttcgtcatcgatgcgtctgtcacgttaggactgcttctaatggcaagaacctgtagattcgggcatctattgatatgtccaaaatcagactcgtagccatagaaaattccaaaatagaggatatcacaaactcaatcacgatcttgataagaaagatatttacctatcggctgcgtaagagagagcgtggtcgctgcaatggcggacgcggatcttagtgagaccaccttcgctccaatcaacgactgatcgtagcattaagtctaccttctgctcgaactcaggggaccacaagtgagtcgactcgggataggaatcgaaccatggctccagatcgaagatagaccagagatacggatctctgcaaacagttagccacgatttttggacgaacatcggaccggtccatagctcctgaatcgtaagccttgaaatgatgttgatgagtatctctggagccaatccgccccaatcagacccgtcttcttccataaagattcttgttttgttttcaaagatcggttctttgtgttcggtaataatgtagtttaaagttacacgaaacgtgtctctttagacacgtgtcaatgcatctgaccgttaattttgttccttgacttttggatcacttccataaatgtcgtttgctgacacatgtttcggtatagaaatgtcacgtttgcaataagccaccattggataaggtttttaagttttcaagtcacaattggatatgttgttcaatcaagataagtaaataagcaagctaactttgatgtgaagctatgttacaacaagatctatgaggaggaacaaaaggttccgtcttcttattttagactctgagagctgcgacaggatcttgccatgaaattttcctcttatttgatccgtttccgccattcctgcaagaagatggcttcacatctttctgctgcatctcaatgctactgatcattaatctcttacatgaattactttcttcaactctcgtgttctcttgattattgtccactgcctctgtttcttgctcttcttctccctatataaatcaatttatgagtaaagacatgtttggtttctaagtctcttcacaatctgattaagagtgaaaaatgtgcttacagatatctgatttagatcaaacaaaggaactcttctcttaggactggttttggtttcatcgtgagccttttccgagtggtttaagtcaggaagcgaaacatgcttagtttccgcctcacttttgttactaggagacacttccactcggatcttcttcccaccatttgatcttctgacctttttaatctcttgtggctggtcttgtctcaaatgtctgtatctccgtcgcagaaatctgttaaagaggttataaacgaacgatatattaacaagtgaggaaaacatcaaaggaaaggactaatgatatattttgtcaaggattgaaactgtctttacctgacttcagccattagtgttgcctttctttctcgcactgcctgtaacctttttctcatagcttcggtttcctagtgtatataatcaaccaacacacgttaacaaaagctcataaccaaatgatctcaaagatcagagtatcgagctgataatatgtacacaacaaggttttaaatcctaaaactatgtttaagagttaagactaatagagatttgcataactaactacacatagaaatcttaataagtaattaactttgttaaggaagcagaagcaattaaacttaaaagtttcttctttctattattttaaagaagaaagttgttcctttttccgggttttccgagtagctctgagcccagatcaatctttgagcaaataaaattacattctcagatccagagacaactaaaaccagacccagaaactgaaacttgatctaaaactcaagaaaagagagttcgtaccatatgcaattctccatagtcttgcataaggctatgatgcctaaacctgacctttggatcctcgaaatgattagagttcaagggagtgaaatctccgtgagttggattcatcagatgagtaaattacagaatcacacaaggagagaaagagagagatgaagagcaaaagatgaaaacagaggaaagagagaaatgagaaagaggaaggttctgggtttcgtgtagaagtctaatatcaatgtgaggagaagtcagagaaggacaaagaagcagaaaagaaggacacatcatgttgttgctgttgttgttgttgttgttgttgttgttgtgagaaggaaagaaaagaaaaaagaaaacaaaaattaaaataaaaggcaaaatttgcttttttggatgtgagtgtgttgggttgagacagcagtgatgaagatggaagcagacttatgcaggaaatgggtaatgacttgtggcactaagtaaattgtgtaatgggtcaaagaaaacacataaaagcaacttccttttttaataacattttatcaactagacaactttttttatattaatgggttagtttggttagagaaatcttgaagaaaccaaacctttctgttttgtttcttgtgttccattgtcgtctgtaaatattaagtttatcttcattcaactgggtccattgtatagagaccgatgagaatggaggttgaaatatatttttcagactttttaatataatccctcaagaaaagtcagatggtggaagagaaaaaaaaagattcgccttttagttattacttaaaaaaatacggattttgcagaaaactctgtcttgatttctggaaactggtgcaaggttttagttttcttctatataaaaaaaaaatcttcttattacgtcaattgttaaaagattgccatctcttcacatgcattccatttactctgttaccccaaaaaaaaataaagtttaaggcaatgactttttgcgttcacatcgatgattctagtgtgtttaatgcatcagttagtcagtgaccatcagctgatgca

SEQ ID NO: 1480 - DNA, 3000 bp, Unknown
  misc_feature (1)..( 3000): cDNA_ID_3062623_gDNA_ID_1620407_Annot_ID_156152 3000 nt of promoter + ATG
aggacaaacaaactgcttgcattactcgtattgacatataaacctatgaagttcaattatgtatgttgcagacacctatcaaaatccaacatgagctcagtagttattacaaacacaaagcattaaaactcgcaaatcagaaagatattagccaattcagacatttgagagaatcaaatcagcaatataccaaagattataattccaaacaaaaaggctgctgattgcgacaaacccgtaaaaaaggataaatttttagctcaagctaagacaagagagataaaacaaattctaaatcagaggaagaagagggagttagatccaaatttagagaggggacccagaaatgagggtaccttgaagggaaaagaggaagcaggagcaccaccatgaggacgaaggagaggtagatccgaagatgaaagagagccaaaagagagagacgaagaagaagaagaggaaccaaatagtctgtttcctcgaccgccaccaggtctcaagctcagaaccgtttgatcgccttgctgcatacctcgatctaatccgccttaagatcgaatcgaatctcacaacaaaaatcgaagagaaaggtagaagctttatcagcgacgatgaatcgctgactccgataatccaaggagaggagggatcggatttctgggtctctctctctcctgccgttagcgaagaagagaagagaagagaaaagttgagattgagaaatgagaagaagaagaagaagtcgagaaggagacacaatcccttctctttattagggtttttttcctctctttttcccgaaccagacacacttatagccttaacgtttttttccgttaagattacagttatgtcctttcattttgtttttttgtctctttattttgtcaccctcattgggttttccgtcaatgaacaatgtcaaatggtaataatggagcttcctcggctcgtgttagctgcacctctagctcattgtaaacatattaagagactgtaaaaactactaatctggcaagttgcaatcaaacttccacatctcaatatctttacttacaacaattgtctgtaacaaactaaagaggcgttaacacaagcagagacgcaaaagaaacaacttctggcgtttatagactcctccttgtgttttgaatcaataccttctcctgaagtttccttgatacagtaagcaactcttcatgaaagtgagaagtcggtgggctgtgcaatgttgacatcctcaaactcgttatcatctgcacatggaaaaaagagatgcaatgcaatcattatgccgttcatagctgtatagattcagaatgcaatacagcatcctcaacagttgtgtaatcgaaacaaggctaaaagaataataagattaggaatcacattcagctatatcacggtcacaaaagttaggcaagactcttaaacataccaaaagattatccagtgataacaaaataactaagattcacaataacaggctcaattgaagtcaatggagtttgaagggttcatataccaaataacatatagaaagatgaagtgtgataagtaattaaccaagatgcatgatccattacgacatttcaacaaggaattgaaaatttcagaataagaggatctaaggtataacctttcttcaaagtcaaagccacaactgcatcattctcaacctgaacaaccaaaaaagaagatggtgacaagcttataactttcaaatacacgcaaacggaggcagtggctatgtgaccaagttcttcttttaaacttgagcaatgactcaaaagataaatatattagatagtcaaacgtgtgataccttctgatctgctaaggatttcgaatcctctaatacttcttcggtagacattaagaccagacgctgattgttaactggttgctcaatgagagcaaacagtttttgcttaacatccaaaacagtctctgttggatcacattggataaagtaagtagttttcatgcgcttcacacgaatatacatagcctgcaaacaatattacacaagactaatcaatactacaaccaatatggccaaaatctaacttgttcgattgattaaagcaaaattattgcaagacaaaagtatctcaacttttattactccaagaagaacagtaataaatgtgatcaggaagctggaattaagaagggaaaagatgttctcattccaaaaacatctctacttcccgtcaaataagcaaaggattgaatatactaagaacaatcaaacccatcaaagtgaacaaaagaagtagaatgtttaccatggcaagataaggatgaacaattcactcttcttccgctgccgattcacaagactttagaatcaaaatctgttctaagatgccaataaaagattaatcagactatcagtgacaattgacacacctcaaagagtcaatttaactaaagagatgatctagttatcccccaaatcttttcttcttttgatattcaaaagaaaagaaaaaaaagcaaagattttcaaaaattactgactcaaataacaaacaatgaaatcgacttacctagatgggttaaggacgaaaaagtgaccacaagaatggattaaggatgaaatactggcaaagaaatcaaagttggcttttttataactcgagctcagagccctacaaggtaaggaaggaagaagaaaaataccactttggtggcttgtttggctacagatataatactaacatcgattaggcgtcgtacaaaacccactaaaagacagagagggtttgttttgttttaggcttttatttttgattgattgaatattaaaatacaatgcgaaaagtcatattgggcttatgggccgaataactttattttatttttgtggtgaagttaggcccaaatattttttcgtcttcttccagttcacgactgagataataataatgcaaagcaagttgctatttccgaatgatctctctctctctattcttttgagtcccaaaccccatg

SEQ ID NO: 1481 - DNA, 3000 bp, Unknown
  misc_feature (1)..( 3000): cDNA_ID_2136607_gDNA_ID_1620407_Annot_ID_156146 3000 nt of promoter + ATG
acacacaagaagacgaaacgtctgtaatcaaaagacaaacaaacaaaaaaaacaaagcaaagtcaagctttgtttgacttgtaggcataagccaaaaggcgctattttgaaacttgtgaacgaagaaattaggtttggcgaagcaagtacgaagaaattaggttgagtaaaaagtaaaattagggtttaaccaggaattagaaagaaaaaaaaaaactcaaaacaatggaggatcgtacgaaattcgaaaaacaatagtctaccgtagaagaatctcagttaaagcttagtcattcataaggaatcgaaaccggaaaaaagcagaaacaaaagagagagatcgacgaacctgtgtgtatcgactcgcactgtcaagagggagattttagattttcatgtgtttgctaggaagtgtttgctttgaatatatttatataagcgataatcatgaactctcgtagctcagagattaaataaggaattaccggcttataattaatcaaaaagagggtttagagtacttgtaaatatatttgatgatgattaggatttagatggccatgtcatcgaatctacaaagttacattacttttatttttatagaaggaagtaaatttaattcgagtattttttttcccttttttctatgccaaaccaattaacatttaaatattatttatgtaccattaacttgttattcacatttaaatttggaaattccatccaacattagtctagtttatgcattctggtattataagttccaaacaaaataagcgaatgttttcatattataatttgattggcctttcttagacatcccaataaaacacttacactagagaggaaataataaggccaaaacatacacacgcaagcaagaaattaactttgaaaccatgtattattacggacttgattgcctcttcatcaagattgaaggcttggttcaaagaggacctggaaaagttccactctccctctgctcgttccacttgtcaacctgcgatgtaagatacgcggcagaaattgtcagatggatcaaactataccagtgtgatttgtgtgtaccactctttgatataataatctaaggtccaaacaaaaggaaccaacccattctccaggacagagggcacggtaatacttggcaaacctttcacagtcattagactcctctccctttgcagttgtacacctgcagaatcatctttgatgtcaacaagagattaaaataatgattttctcaaggatgagctagcaatgaggtacctgtgaaactcgatgtaccgagtgaagcagtgcctagtttgatttgttgtaggaaaccggaaatcagcaggagcagttttcaattcaatctaatgcaaatacaaacacaagtgtgaaagaaactgtataaggttttgtaaacttaaatcactttgtttctttcctcaatcaatgaaccaataaccaaacatagaaatctccaaaatacttgttgcctctagaaatctcaattttccaaacatttcaacaattctacggaatcaagaagatactatcatccaaatccgaagaatcaaccccaccaatacggcttaaagtttattcctttatcccagaattgtctcgacaagtttcatcagatgataaagataccgccacagacatcataaaaatcaaaactttatcaaccaattcctctatgatacatagaaaccaataagcaatcgaaattactgtagcacacagtttcaagaagatcaaattcattaacgttttctgatttactctaggtatacgtagttgtgagataaataaaggaacgagaaatcacctcgtcttccatggctgatctgatcaatgaattggagaaattacagaagcagagaagaaatcagcgtcgagtggggaaatcaggatatgacactcatatctctccggttcgaccgtttactacaacagaaccgaagtagcccattttattgggctttaatgggcccaaaattaagtcttttaatttgtttatgtgattttagattgaaatctgattcaccattttattttttaaaatcaatgtcaatatgtctttagtattaaatataaaattgacctacgagcatccacatcgcacaaaaaattgatagatctttagtattaaatataacaaaagttaataaaaaacagaataaagaagtaagacccgtgtctattgtgtccttggaaagacacattttacctattcgagaggcaacgtggcagcatcagcttaaattattaataaattatacttaaagacattttaaaaaaatgaccgatgtggatggtctaagaacgactggatcgattgtccgaaagtagaaacatcatttattctctaatatttttgattagaatttagaaattatttatattttgttttaatttgtttgatatgatatttgggattgaaattattcacacacaaaaaaaaaaaaaaaaaatttagacaaacatttttttattttctcaaagtaatgtgtaagaacgactggttcttttgtctaaaaacagtaacataataattactgttctcctattatttagattagattttagaaaatttaatgtattatttttagggattttatgtttgacttagttcactacatatatccattaatcttgatgtgcaatatttagtttgtgtggtttataatttctctataagggtttttacttcatttatccataaattaaacaaaacaaacaattaaaaactgtaatgaatttatactttaaacaaaacaaaaaaaaaaaacacttttggataattgatattcggacaagatctcgttgtacttaattaatgtgtacttatttatctctaacttacaaatttgactctgtaaaacccaccacacactcactcactcagacacctatatttatgatctctctgtttctatatatacatttccccatatcaactcaacacctccatagagagagagagctttctttcactttcacatg

SEQ ID NO: 1482 - DNA, 3000 bp, Unknown
  misc_feature (1)..( 3000): cDNA_ID_4254815_gDNA_ID_1620407_Annot_ID_156147 3000 nt of promoter + ATG
ttgatgttgaccgtatcgatttggtgtgggaagcagccatgaagtatggtcttagtgctgtttcttcactcacaaattgagtgaagagagagacacgtttcattgttgtcttttgactctcccaagattggtcattctttgtacaggtgaaaggagatgcaagcaggaaaaaaaagtagaatttcaccttatgtattgttttatcttttattaatgatgtattactttctttttagatttccttaatattaatatatgcacctaatttccaagaaaattcaacaaagcttttaattatccagcttgatttgcttctctgtttggcacttacacaatcagacgacaaagtgtcttcaatgttgctgtcttctatacttttaatttgattagacattattagttgagagaaatatcgaaatatcaaactaaacagtgcattaacagaaattgtaaaaagctgatcagattgttgtttgttctgctaatgaattttttaaggtaaaagtttcaatgaagatttttgaatcaaaccaattgtttatactttattacaaacacattctctacactaaaccaacaaaaatcccacaataacaaaagagacagaggaagaagagctaaacatttgctcaaagagacatctgcttgagttctaaaacaaatgcagaagaaagagattattttacctaattagaaaagactccataatgtgactaacccttgaatcgttcccaaaaagtagccaagaagatcaagagatgagacatgagaagaagaatggaaatgacgatcaagaagataccgagctgccaccatttcctccttaccgatcttatgaatccgaacttacaagatctacaatcatagcataaaatgctccaatcgttcctccatagttgacagtcgctaatccttcccaccatcatctcatcaccgtacattaggttcatagacgacggtggtccttcgtcttttcttctgtaccaaaacgtcgcgtttatcgcgtccatgttacatgtctctggtggcatacaacatccattctgtaacaacatcaaatgtaaagataaaaatgtttgtaaaatcttatacaaatgttttacaaaacgtatatttgagtgatcttttcatcggtatattgttcgaatgtactaattgtacactttaaaagtcggtcttgagatcaaagaatatatatctatgatgatcaaaccttgattggtggcatttttcttctattgtaaggtttttcatttggagatccgtaaatgaggtcgttgcaagctcctttatcatagacacacgatttgatattgttccaggtcacatgatcgtccatgattttgagcttgaaccacatccttgtcgccggaaaccgccggctttgcatctcatttactccggcatacgccaaaccgatgaaaagcattaacaacaagaccaccaccatcaccacaagtgcaggcatcggaaacttccgccgcaaaaacagagctgcgttgctgacaacaaacaccgcgagaagaccgacactagctagcgtctggacacgtggcagaccgagaatatcttcgcagtcgtagctacgcatgtaaagaagccacactgcgtagccgaggagtgtaagtgagaggacgaaagtgaagatcggaaggacaccagcggctaaaatgttcacaagtgccatcaatgttcccatcggtggcttattatcactttgtgactccatttggtctgaactcttggcttctggctcagtcgttgcggttgctgtagctgtggctgtggcggttgcggctggttcctcgacgggtactacttgagcattatcagccatgtgaaagtgaaagaaagctctctctctctatggaggtgttgagttgatatggggaaatgtatatatagaaacagagagatcataaatataggtgtctgagtgagtgagtgtgtggtgggttttacagagtcaaatttgtaagttagagataaataagtacacattaattaagtacaacgagatcttgtccgaatatcaattatccaaaagtgttttttttttttgttttgtttaaagtataaattcattacagtttttaattgtttgttttgtttaatttatggataaatgaagtaaaaacccttatagagaaattataaaccacacaaactaaatattgcacatcaagattaatggatatatgtagtgaactaagtcaaacataaaatccctaaaaataatacattaaattttctaaaatctaatctaaataataggagaacagtaattattatgttactgtttttagacaaaagaaccagtcgttcttacacattactttgagaaaataaaaaaatgtttgtctaaattttttttttttttttttgtgtgtgaataatttcaatcccaaatatcatatcaaacaaattaaaacaaaatataaataatttctaaattctaatcaaaaatattagagaataaatgatgtttctactttcggacaatcgatccagtcgttcttagaccatccacatcggtcatttttttaaaatgtctttaagtataatttattaataatttaagctgatgctgccacgttgcctctcgaataggtaaaatgtgtctttccaaggacacaatagacacgggtcttacttctttattctgttttttattaacttttgttatatttaatactaaagatctatcaattttttgtgcgatgtggatgctcgtaggtcaattttatatttaatactaaagacatattgacattgattttaaaaaataaaatggtgaatcagatttcaatctaaaatcacataaacaaattaaaagacttaattttgggcccattaaagcccaataaaatgggctacttcggttctgttgtagtaaacggtcgaaccggagagatatgagtgtcatatcctgatttccccactcgacgctgatttcttctctgcttctgtaatttctccaattcattgatcagatcagcc

SEQ ID NO: 1483 - DNA, 3000 bp, Unknown
  misc_feature (1)..( 3000): cDNA_ID_3062627_gDNA_ID_1620407_Annot_ID_156151 3000 nt of promoter + ATG
actccaagaagaacagtaataaatgtgatcaggaagctggaattaagaagggaaaagatgttctcattccaaaaacatctctacttcccgtcaaataagcaaaggattgaatatactaagaacaatcaaacccatcaaagtgaacaaaagaagtagaatgtttaccatggcaagataaggatgaacaattcactcttcttccgctgccgattcacaagactttagaatcaaaatctgttctaagatgccaataaaagattaatcagactatcagtgacaattgacacacctcaaagagtcaatttaactaaagagatgatctagttatcccccaaatcttttcttcttttgatattcaaaagaaaagaaaaaaaagcaaagattttcaaaaattactgactcaaataacaaacaatgaaatcgacttacctagatgggttaaggacgaaaaagtgaccacaagaatggattaaggatgaaatactggcaaagaaatcaaagttggcttttttataactcgagctcagagccctacaaggtaaggaaggaagaagaaaaataccactttggtggcttgtttggctacagatataatactaacatcgattaggcgtcgtacaaaacccactaaaagacagagagggtttgttttgttttaggcttttatttttgattgattgaatattaaaatacaatgcgaaaagtcatattgggcttatgggccgaataactttattttatttttgtggtgaagttaggcccaaatattttttcgtcttcttccagttcacgactgagataataataatgcaaagcaagttgctatttccgaatgatctctctctctctattcttttgagtcccaaaccccatggcaggtttgtcgctggagtttacagttaacacttggaatctcaggtctctctctcaagttccatgtcctttaagacatggctttcgattcccgcgtcggttgacacgaagaagaacgattctcatgtgttctggttcgacatttctaccttgtgttctctcttttctgatttttcttctggattgtgattggtgatgcatttattataatctttttagggtaatgtacacttattaccctaaaaaagagatcaatttgttgatcgttaaattccataagtgttctggaattgatgacaaaaatctgcattcgtttctccacagattcaagctctcagtcgtggaatgttcctgttttatctagctatgaggtaattatggtttctcttttatgtctgtacttatcaatcatatctttaactcttgaaactgttcacaatttgttagctagagatgtttattgacacaaccaccagacatttctgtgttttgtcaatgaaattatagatgcagcccgtaatgaaggattgcgacatttgtttgttatccgtttatgtttagaggcgttgattgattgagtatcagtgaagtatgtttggtttaaaaggttggtgagaggctaaaactagcaagaggaggacaacagttcttggccatgtactcaagtgttgttgatggaattacaaccgatccagcagcgatggttcttccattggatgatcacatggttcaccgtggtcatggagtctttgacactgccctgatcatcaatgggttagtcactttaaatagtagcccccttttctaatttgtcttattactcaatcatctgagcttcgcttgttgtcctacgaataagcagatacctttatgaattggatcagcaccttgaccgtatcttgcgatctgcatcaatggctaagatcccacttccattcgatcgagaaactattaaaagaattctcattcaaaccgtgagcgtttctggatgtagagatggatctctaagatactggctctctgcagggccaggggatttcctcctatctccatctcaatgtctcaaaccaactctctatgccattgttataaaaacgaacttcgccattaacccaataggtgtcaaggtagtgacctcgtccatccccataaagcctccagagtttgccacggtgaaaagtgttaactacctccctaacgtactctcacaaatggaagctgaggccaaaggagcttatgcaggtatttgggtgtgtaaagatgggtttattgcagaaggcccgaacatgaatgtggcgtttgttgttaatggtggtaaggagcttgtgatgccgcggtttgataacgttttgagcggatgtacagcaaagagaacacttacactcgctgaacagcttgtaagcaaggggattcttaaaactgtgaaagtaatggatgtgacagtcgaagatggaaagaaagcagatgagatgatgcttattggtagtggaattccgatcagacctgtgattcaatgggatgaagaatttattggtgaaggtaagtaagattatcatataaacattttaaaagcctcacttttaattacttacatgatggatagattggctgattaaagatgggtttctttctgtctgactcaggaaaagaaggtcctatagcaaaggcgcttcttgatctgttacttgaagatatgagatctggtccaccttccgttcgtgttcttgttccttactgagccaatcactctctttgttcatcaaagacaataagctgtggcttttttgtaaagctttgctgttattgtaagttgagtttatcatggggtttttaggtatctgtctttgtaaagatttctctttatcacttttgaattatgattgtacccattctcaacaattcatggagtggttgcgtctagtgctcaaatttcttgtttttcatctcttatttcttttgaggtggtagcatttttatattgtcgacaaaaaaaaagagcctttttatattctttttcttctttatcagtctccactttccggtaaactgatcagcagatcaggtcatgctaatcaagtcgtgttctgtctttaaagccattgccttttagtgatcgtggatcaaatg

SEQ ID NO: 1484 - DNA, 3000 bp, Unknown
  misc_feature (1)..( 3000): cDNA_ID_2136622_gDNA_ID_1620407_Annot_ID_156150 3000 nt of promoter + ATG
tacaacgaaatccaacaacttctacagatgattactaagaagacgcctcaagatccgagtaaagtgtcgtcacatattcgcgacggtatcaattctgatcccaaaacttggaaactttgtttgatttcctccttctcttatctcaaagtttttgtattttgcagatcttgacatggtgtttgtgttggaggaagttggacactcgtgcgacttgtgccagagagatcttgctaaggatccagaacggcctaatgcttccttgagtggcttacaagaggcgtgcgtgctgtcttgtggtcatgtctaccacttcaagtgtttgagaggaaccactcttgatattgataaccattctaaagatccttcttgcattttctgcattagctgttagctactccaactgaatcaacctacactatatcatcccatgtggattcaactttaggtacttctaccattcaatgtctactagatctacgagagatttaacagttttgtcttaacaatgccaatggagttacttacaaataccagagatttactctgaaatcaatcaattttctttttacatccctgaaaagtttaagtaactttacatatggaaaactagaaccacgccgcatggtagcttctaaagccagaagtgaatcattgcctgttcaagaaacaaaaaacatgtttatagttccaaatatcattcaggtatcccttactaagtagcaagaacattcattacctcttgaattgagttaaggactagatcctcttcgggattggacacaggtttagattgatgatgcagttctgatcttaagcttctcatctctgactgcattacattgagctgttctcgaatctcctttagcaaactcaaatgttctcccttgatgctcgtatctcttggcggcttactcacttttctatcgtaattactagtcaccatcttgcctctaacctgtgagattttttccatctattagtaacctgatcaaatgtcttaaacaaaagatttagttcactaaaaataatgacttacatttctttcttcggcttcctcttcttccgagatgattgtaagactttctttcgtcctaggaacctcgaagatgtcttgaacattcttcggagacagaatcggagtctctaaagaagcatcttttacagagaatctttcagggttcttcatcatctccataatcgaactaacatcactcttagctgactcaagtatagtattgctaacttgtgacaccaacgcatgtgaaattgactcacgcctaatcaaagggaatttagatgccttctgagtatctctagagtctgaaatctctctaacatgctcatctattctcctaatctgttcccaatacgcattcaagtcttcacgaggagatacagaactactctctacaagacctttcttctcctcaaagctttcaccattaacatcagacaaaagtaaacttctttcactagatatgccatcaaatggactctgcaacagaaaagacttatgctttaatctaacaatgtcttcaaaaccatgaaagtagaaagctttatatagccatggccatggaatcagttttttcagttataacaatattgaaaagctttaaattaccgaaagatttctcttcatcttcctcttttgattgccacgagagttttcaccggaaaagatgagagtttcagggaacttattctcaatcacagcaggatcagagcaaccaaggctgagtaatttacatctataagcctgaacctgaaactcaagagacgcaatctccatttccttctgataaatcagatcttcgaaaagcacaagagatgtctcagcatgacacattttctcctccgccattctcttgtactgactagcttccatctccaacgcagctttctcaccttgaagccgtagaatcatcgataaagcctcgcttgcagcagatgaagaagcttcacgttctgcgtcaagttcttgattgatcttttgaagaagctcttgttgtgcccacatcgtttctctgactcctgaggtttctccatttcctcctacccccaaactcatcgttctctccaccattttagatcaaaaatttcttgcttttggttgatctttgatcaatgtgtgatttgttctatgattagaagcaggagaagagagatcagatcgaggatggtttttgattgatgcggcggagggaagcggagaatttaggttgatctccgattaaatgtccaccggagaaatcagatcgacaaggaaagccttaaaagcgaccagatattctcggaagtcccaatcaatagtgggacatattaacgtgtatacgaccactttttgaattgggtaaattaaactatactttataaattataatcatatttgggttaattaaactatacctaattatataatccagccgacacatcgtatttaaagtacgattattttgtttacgttttaaatgatttttattatgtaaataattgtttaaagaattagactgaaaatttggcgggatgagccagacccttgcaatagtgcaacgcatgggagactcgggaaagcccagatagcaagctacctagatgggctttcccccttaaaaaattgagttaatatcgtgtgggccgatggcccacatatcagatattaaactgataagaacagatactacacttgatcttagccaaaaggccgagaaaggtatgagttgcttaatctagtggcctctttatttataatactacttatttctcacatctaaatatactaaatcagcagtcacttttccaataactgatgcatttagtgattgacacatcagcttattactatttttttattctttcattttcacgcaggatttttatgtgtcgtttttagttaactttgtttctttctcaaacgattttctctttcatccccacgatctccacatctccactttctctcttccaaaaactccatgactactgtgtaaaatctcaaag

SEQ ID NO: 1485 - DNA, 3000 bp, Unknown
  misc_feature (1)..( 3000): cDNA_ID_3062633_gDNA_ID_1620407_Annot_ID_156145 3000 nt of promoter + ATG
attttaagaaattaaatctttttttttggtatctgtgtgttactttttataaatgtattttgaaaagtattatttcaatttatagataaatataattatgactctcaagtggatttttttttcacggtcaattggagtttggctgtgaatcttgtgaataatatcaactaattaagagtcggccgatactccgtatctttgatcactttcacccatatcttgaaatttaccaaatgttttctttcattggggtttctataccttttttttttggttctttctgtaatttgggttttaaagaaaaaacctataattacaaaaaaggttaaaagttaaaactaagcacgttcaaatatgttctttcgagatcccaccttcctgtctatcttataagaagtcgaacacgtgtgctcgttgtgtgaattagagtggttatttcaacatatataattaaactatgtatgtatcataaatacactgaatatgttggagttgggtcttgtggtaggctaacttgttcgcttcactttggtttagtttagccttgtaatcggtggtttcatatactgaaatttttaattttctaatataatccagatgacaaaaaaaaatcataaatacactgcaatggccatttttaaaaaaactttaaacgaaatatatatacatcaccaagtatcaagtaagtaatttggttgttttgatttttcaaaaaaacatttaggtgattcttttaacaaccaatcatatatgtagcaaagattaattatgtcaatcttttaacgtcacttatatagtttagctgtagtattattgtaagccaattgtacggacttcgtaaccgtttcgacaaagatacaaactaatcaatgtttaagatggcataatattccgacttcccctgccactcggtagtactgctgcgccatcctacaagaagcactcgtaaatgagtggttagacggccaaaaattagcaggattcaatccttgattaagagatggttcagataagccctctaggcctctactcgtcacaattcatatattaattgatcacactgcatgaaatgataagatcaagtcaattacctcaaaattaattgaaagataaaatgataaagcaacaagtaatgatcatatatggatgtaacaaccttcttcatccatacgaatatgataattcttttgtcgatcatttgccacatctatttaactaagtattttgtacattaagatcattttgcgagtattcccgcgttcccaacaaaaacgaattgaaaaactacatagggtgaattttgctctcgtggcattaaagagagaggctgacattatagattatgatatatttattatttttcttagtagatttcttgaccagcctttagatatgcttgctctgtcatggcataaagccttaaaccctaaagccctttacatttgtacagtaccaacaattgtacccaatgttaaatgaatgcggattaatttgtgatatgagaccatcaaaataaaatacttataagatagtagatatatagaaccgtaacaaaaagatgagaagaaaaagacaaattgaatagaaactggaccaaaagataaaagagtatatgaagaagcaagccaccaagaagtgtaaccatcgttgcttcaactgtaaaccgcacattaaatgtgtgtgagagaaagagagatagactccagctgtgagagctacgtccattgcatcaattgggttatatgtcgttaacaattttttaaaaatacataaataaatcaataaaatatttagaaaaaatcaatattataatgatattttgaagaagttaggtccataatggaaatatagagacttagtgtctatttatcaagaaatagtgtctatttatcaagaaataatgtctatttggtccacaattatcatattttttgtggccactcaaactacgaaaataatgaatattgttaatttttgtcttatttaagtctataactaacttactaattcggttgaaattgctaatatgcattttccttggtccactattacagtgctactgctgtcttattcttgaacacaaaataaaaaagatttcaaacacaaaatatgcatttttttgttccaccattacaaacctttatttggagaagtatacagttggatattaaatattttaattaaaaaattgaaaatattgaagttctttttctccagtattttggctggagcaaaactaaataaattccaaattaaaagctcgaacggaaaacatttactatgcaccaaaataaatgttgatatgaaatttgcatcagcatatacagtatgtatgtagtacaattgaacagagtcaaaattaattgtcactgaaacagtcagattttatttctgttaaaaaatattttcagacaaaaaatgattttttaacgtttttttatataattttattaaacctcaaaacattcctcagcagattgttttataatgttattattattttttcttaaataattttatttgaatttcgttatagagagataaataaaagatttttggggtctagttggctctcatagtttgaatgcttatataaggaaacagagctcgaggctctcaataatgccacataaaacacaacaccaaagcctttataactctttctggggtttttaattctctcaacgaacaaaaaaaaaaactcaactaatattctccatcctctttcttcagatttaagagaaaccttatcgttatattctctcttctcttttctttttgactcccacaagaagaaagcaaatttctttttctcaggattgcttgaaaactgtagaaatctttaaggtttttttacaccaataagagtcagagagagagagagagagagaaagagagatctattcataaaaaagacaggtaatctcaactccgaggagataactgatataacaatttgagagaataagaagaagaagaagaagaagaccaagctaaaga

SEQ ID NO: 1486 - DNA, 3000 bp, Unknown
  misc_feature (1)..( 3000): cDNA_ID_2137800_gDNA_ID_1620408_Annot_ID_156185 3000 nt of promoter + ATG
gcattcaatattcatacatgcaaatccaacttaaccacaactaatttcataaaagaaaaaagaaaaaaaagtatatgttttcttctgttacttgttcgtcttgttaacttctaacctacaaatgtagctgctatctgtaaccagcacagttattttccttgattattttatcgtcttcaatttaataatttcggatcgaacttctaactacgactaaaggggatggatctgcgtccaagttggccatacgtgtatatattatacatagaataattcacagacctcatgatttttattttcattttggttataagtttaatatatagatgctatctgtaaccagcacagttaaaaagctcttcttaattaccatattaaacttatatttctgatatagctaggacgcattttcctaatagataattgctttttaaaagaatgtctttttgtaaagagtgtacagaaaagaaggtactaggtaggcggttttgtacatatgacattgacgaatcttttttttctaatgaaaatttattcttaacaatatttatttgatatcaacttgaaaataaatttataagcctttgtgaattctcacagcatatcacgaccacttgaaatttgttttttcttacattttttatatatatgatctcgcataagagagagaacctgtaacgttgttttattcttggtcaagtgtgtattagtggttatgtaaagactaaatagggtatagtcgtatagaattcgtaattgtatatgtgaactatactaatttaataagtgttagtttatatatgtatccatcttttgtcgaggattatatgtatctagtttgtacttacatttacaaaccagaatatttacaaacagtgaaaagtaactttataataaaacatgctcaattctttatatactagaacataaatcaatatatatatatgtagaaattaactaaattaatttcttttaaatgataataatacatttggatcaaaattataacaagctttaaaaatcatttaacattacatataatttggtttaagcaaatagtactgtagcatcatcataagtaatttaacgtagaaaaatgttgtaacatcaaatagtagttcagtgttggtctcttatgctagttctagaggtctttgggctcgtaagtcgtatctacaaagacatttaacaatttgatgagaaacaccttctacttgagccttaaacattatatattgtggtcatgctatgggatacagagaacactcgtcgatgagtggttaatagccttgaagacatcaaattcatcctttctagttgtatggtccctaaaaaatctccagatcagattaaaaataataataataataattgcatgccttagacttgatcggaatgagattgatgaaaaatttggagttctatacttcgaaggataatcacgcatttcataaaattagttgattatatgttcttcaattcaatcagagactccaactagatcgccattcgattaaggaccataatcaaatagtctctgatagagtctatgctggaattgaagtacatataatcaaccatagagatgagttggagatatacttacggagccttaggaagattgccaactctaaaaataaatataagttcctaaagtgggcatgtagtatgagaacgaagaccatatgaacatatgaggtaaaattcgggcggccatcaccaatcaatgttcaaattttcaaatgctcgagagatacgtcagtacctctcggaacaagctctcgtgttagggcagtaggtgctttagggctttgaaaagtggagtcatgggtgctaatgaatttgatatttcatccgccttacgttcacggaccacgaatgtatataccatcatatcattgtgagaaactatgccgcattatcaacgactttttggaagttgagatatatatccatcaatgaaacttattatggtttctattcaatgctacaagaattgactaattataatgccaaatacagtattgaagtcgcaaggatcatactacaaaatgtgtccataataataacgttttttttcgtaatccataataataacgtttataaattatagtgttagttgttaacatctaaccgtaaatacaaccaactttaacaaaattttttttactatatcggttaattgactcttgtataagttaatatatatccaatgaataacgccatagacttcaaaaattcaaacgtatatatttaaaatctgagaatatctcctcaagaacagtgttaacatctaatcgtagatacaaccaactctaaccaaaaaaatgacatatatcggttaattggctcttaagtaagttaatatccaatgaataacgccatagatttccataaatctgagatgatctctgcaagaacggaggtttttttttggtcaataagaagaacaagtttatgtactaaaatgttcctttagaaagaagtgaacaagttggagaccgtgcttgtaaaaccccttatacaatagtagactttctttcatttaagaaatttaaaaatgattccaaataaaataaaataaataataaactttgacattcatgtaaaattttacgtcgatattgtaaaacaattacatatttattagcaaatatctctcaacgtcaaaggcccggcaaacaattcctaatctccgcccgttacggtgcaacacacaaaatgataattgaattactatttttttataactatattacgttaaatgatttattaatataaaaaaacgtaatttaatgttccattaaacaactatataaaccaacttagcgaccacttaagcatttcccttactatttacgttctcttctttctcctccgacacactccaaaactcataaatctatctgatgcgaatttgactaactctttcgtaattcaggatcttactacaaatctttaactcaccaatcttcttcttattcaaagattagagagaaa

SEQ ID NO: 1487 - DNA, 3000 bp, Unknown
  misc_feature (1)..( 3000): cDNA_ID_2137827_gDNA_ID_1620408_Annot_ID_156191 3000 nt of promoter + ATG
ttgcaagactgacgtaaagcatatatttttatagcaataacgtatataatatagtttgcttatagaatttcacatgttcatcagtcgaatctcaatagaaaaccaacgtatagtttctggcccatgttatgtcgttaaattcatgttgtgatcatgattcatgcactctacaattcaaaccaagaaaagaaactgttcttcgaaattacctttgttaataattgactgatgaattcagcgtgatagatcgtcgagacgttgtttacccatctatgataagatccagcattctcgatctttttttgtattctaaacaaaacttaattaaataatttcctcactttcacctgaaataatcaattcactagtgaatatagtaattatgttttagttaatactttaaaagaaaaactttaaattaaaagtttatagtttcttaagaaaatacgtttgataaaacattaactactatgtaacttaagtaaaggacttataaatgtatgactatcatgcttttaaaacatcacaaccaaaactcaaaacgattagcaaacaaattacttattttatttttgttaaaatcttgaaatttctatagaaaatgaagacgattttcttctttataacttttatagttcttgtttcatcatgtaagtttactctcgttatatacaatagtttttagtctataatagtataataatttaatagttttattttcttttgaattatttataggtacatcaaatattatgacaaaatctatttcacaagtaaaatctcagtttttcagccctgcattgagccctaatgttgatccagcggacgaacatattggacactctcccgatgatatgaaaattatcttttgccaacaatgtgcatttcattgtattgagaaaaagaagaatataggtaattgtgaaaattctatttgtcgttgtacattggaagacattttgtaaaacattccctttttaaaataaattatttataaaattaaattcttgtaatatacaaaatttatttgctgattctatgttttcattttgcaacttattttaatccaattgttatgtatacgtacatttgcatgaaatgtttatgttaggttatagaatctaaataaataaattcgctaaactaaaacttataatgatatacaatatctaaaaatagacataatagagaaagtgagagagtataaaggcaaaaccagttagggttattttcgaaatctaaagttcttccttggtttccatgtaataaaaccaagatgctaaaatatgctattgaaaaatggatttataataggaatcgttgtaaagtttttggtccaaatcactagaacttccggttttaaggatgtctctgacggtaatttttcttaaaaaatctctttaattatttgatgaaaatttgaattttcatggaacatcaaaaggtgatattttttgttcggagaaaaaacgaaaaaaagaagaaaaataagcgacccaaaggtttgtaattttaagtatttggtacagattcggactattcgtatacgatctctaaatatttggatagagaacatgtttattttatatgtcaacgaaaaacaagagattattagtttctaaaatatgatttagttcagtttttagggaggaggctagggcgggtttgtgcactatgaattggaagtgaaaatgatatctctgttgttaagcgaattctacacacagataaatttgtaacaaaagcaaaagacgaatcaaacagagtcattatcgggccaagcctaatttaagaaaatagtcccaaaaagcccatttactctaagagaatgtcgagaaataagtatacgaatgacacgtgtccttcttctttctcgtcgtctataaataccaatttaccattctctcgccaaagtttctcttttcttcgctggggtttagagagagaaactaaatagagagagagagtttcttcttcccacatcaagagccaacccatcaaaacttaacccgtaaaatttcatttttttcgaaaataaaaccttcacagaagaacatttacatatatatacacaaagagaaaggtatatatatccacatacatatgccaacacatatagattagaagagagatgggcgagagagagagaaagagattggtatttctcactgtgagatctttgaaatcgcaagtttttgatttcacgttaaaccaaagctgattttatatcaacatcgtttgatttcattactaaaagttttgatttttgagtgaattttgttccaaagttttgaaattggatccgcccagatactataaagcttgattcttttgggttctctgatactttctgtttggtttacttcaaacccacatggagagaatttgtgcatagcttccactttacgttccttttgagaagttagatgatttcacttaacattttgttttcaatttggttttctagggttttgattggatcgtctttggaatcgaccctaattgtggttttgtatactagtaaaagctcaaacgtttggagtgtgaggattgattgatgcgcgagtcagtatttatccccaatttcccaattgggtttctgccactgagttgattgattaagctaataaggtgcttttgagatgctcataactttgaaccttgttaatgtgagttgtggaaagtggttctgatctcgatttctggtgatttggtttggcaggcttatataaatctccaatcttggggtatcactctttattcaaccaaagttgacccttatcagagggttcagaattgtggacttggaatttgatttcttggaggtgattattgcgggtcggaaagtatattattgcgggtcggaaagtaaattttgagctggaatggtaaactggatcatagatactgatctggtcaagtgttgggataaaggagccaaaaagtagggagtgtgtgtggttaaagtataccactttacagttcccacggacaagtgcc

SEQ ID NO: 1488 - DNA, 3000 bp, Unknown
  misc_feature (1)..( 3000): cDNA_ID_2137839_gDNA_ID_1620408_Annot_ID_156194 3000 nt of promoter + ATG
gagaaggatctgaagatgcttgttgaccttggtctttgagtatctggcctgtagaaggatctgaaggcgcttgatgttcttggtctttaggtatcttctttggagaaggtaaagagacagctggaactccaaatttatctttcgtaaccttcaactgttatgatagtcattgattatcaatagaaaactcaagaagtgatatagtaaagcctaaaataagatgtaacaagatcgagtatgaatcctctagggtgactacttaccacagaggcataggatttcttgggagcatctgcaagtccatcatcagggtcataatttttctgtgaatcatctgcaacttctttgcaagttatctcagtccttgcaacttcattagcaatctcaggtaccagaacattatccttagcattctcattatccaagggtttggacacttccttacaaacaggattcactgaaacacatgcagcttgctccgaacccttcatgcctgtaggagctaaagtgtaagaaaaggattggaatagaatttgcgttagaagaaatataagtttaacttaccattgataatagtgggtgttgtagagtttatcccagaaacaacttccccatctatggtctctggaacattatccttagcatcatcattaacaaatctgaggatgtcattcagaacaaagaaacccttttcttgcggggcaaggaaaaaagtttgggtgaatttccttctcgatctctcgtttagagtgaagtatccagtaacgaagagaaggaaacccccattgtgagactcttgagtatcataactggttatctcagccgagttgcaatctccataagtcagtctcttaagctcctcacttataccctgcacaaagaataagcatcaatgagagacacttttagcaagttacttaaactgccatccaatttccaccataccaaatgacactccagcccaaccccatgttagttactaatccttaacatcataaaaatgatatagtctcatcctcattcaaccaaacccaactaaactactaagaactacttacttgaaaagtggagaaatcacgcatgactccgtcctgtccaacacggccaactctactgatctcttgataaaaccggggcagatgctcaggcatgttacagaaaatgtagtagtactgattgacaaacgcactcccaacctatattaaccaaacccaaaaatacactttaacaacaacaaaaacagaacaaaccacacaaagaatcacaattacaactagtaaaaaggagaagaaaccccataattgaaaaaacatacagtaagtgggtcaacaacacgtttggttgcagcagtagaatccattgtatcgccaacttccagagaataaacaacacctgtaattcatagaagactgtcaaaactcagaatcaatgtaaatcacagaacaacccaagaatcatgtaaaaaacagaaaatctctaaatctcacacacaactttccaaaatcgtttccgtagaaaacgtaattcatgaactacacatagtgactcgataaacacttaacaagcaagaaaacgaactaagaggcaacaacaaaatcaacttcacaaaagcaacccaaaatcgtttcatgaaataaacacagaaacaacttcgagaaaagcacaaactagctaagaaaccaacgaaatctacttcacatttcactccgaaacagtgtagatcacatttttccggcgaaatcgtgacattaaactgacggaagagaaatagtagaagaagattcacctgaaattagtgaaattggagcttcgattgaagtctgggaccaacaatggcgggacctagggtttgatcgctagaaggaaggccaagtgtacggagaaagcgaaaaggcaacggaagaggactttgtggggactgtgaagaagatgtttatatagacggggagagagtgtgtgtgttgacgacttttttattgcctttttgactctcacgtgtcaaacatggtccgttgcacttcctcacctttcttcaacagattttattctccactaactttaatattacttaccttttattaatgagtacattagattttaacttgggttagcacataatcccaaagaattctataaggtgaattagagaataataactcctcttgaattgttttgatagcgaaaaaccggaattaaatttagacacgggataatcgatactcttctcgtgcgttttttagattgtagtcaacttatttggcttattcctttgtcatgcggtttttctcgtgcgtttttagattgtagtttacctatttggcttgtaccaaatattgaacgtgagaaacatgtagggtgttaatttgagtatgtattagtctaagtttagtttgaatttagtatgtttaaagaaaaaaagttagttttgataaaggagtatgggctcaataaaacaaatgaacatgtatattaggcaaacgaaaaatgtgtggtgttcttctgaaaattcttttatgaacacccaaacttatggttagaagaaaatcactgatcaagcgtttgaacaatacatgatacaaaaacttgtgagagaaaaatattcggtgtggctgatgatataaagctagaatttttatagccttaatcatgacgaaaaaaaccaaactcaaatttaatccttttgaaactgattatacctcgtcgaaatgatatattcggtcacttcttagctatttataagatttcaatttttatcatctatatgttctgttattcaaaaaacaacgaacatgttatatcagagttaatactttcatttgtttgcctattgggccgataatgggccgagccttaaatttaatttcagaaaaaagcaacgatatgatagatcatgagaccaccaaccaaagagatttgacagataacagaaaaatgttgaacttatgagctaaaaaagcttctcctccttaccaaagactcgacggtctaccggaaaaaatg

SEQ ID NO: 1489 - DNA, 3000 bp, Unknown
  misc_feature (1)..( 3000): cDNA_ID_3062659_gDNA_ID_1620408_Annot_ID_156198 3000 nt of promoter + ATG
tctttctttgtcatactcaacgctgattttgatataattgtcgtcacaaaaacattccaaagacttgagaagaaacaagaaccattcaatatccatacactaaaaacaaaaatgttgcaagaattcctgcaactacaatactctataaactctctcattgttaaataacaccagacaatcttaacatcagctcttggttttccccaagatttggctttggagatgttggttatcttctagcaatctatcatactctagaagcagctctgcagactgtttctgtaacgccgtaacatgtgtttcagcagtttcgagtttcttctctttctcttttgactcagtctctgctttctttagtctctctgtaatagatgacaattttacttgcaactgcttgatttccttggatgctttctcctctttctccttcagttcggttctttctttctggagctgttcaagttcttctttcgatgatccgacgttgcttctcaaattgattagctttctgaggtagtgatgcattctgtcaattataaagccgagaaaaagtacgactcctgcaatgatcattaagattttttagcttcaaatgtaatttcattatgttacacactttatatagctcaacatttttatgtgttacatatagctaagagctagatcatatgtgaatgcactgtaatcaacaaatcaagatcaataaaggaagtattttgttactgttaataaggattcaggttccaaacttatcaactaccgaagcagcttctcaaatctggtgaatactagcagaacagagccttggagacaactatagatatattcatatgtgcgatacgaaaacaccggtactgtggttctatacatcgacaccaccatccactcaattggtatacaaactcttaatcaaaacattattaacttcttacagaagtgctcactcaacttaagcttgcgaatttgcattattcagatcattcctctatgaacaacaaagcctacaagaattcagtaaaagctgtattagccctacttgagagccatgatcaacacaaagtctagccaagatttcaactcttgttcagaaaccataactaaaaactaatcaaacaacaaagtcctatggttcaactgttgttcagaagccaacagctaaagacaaatcaagacaacaatcaaataacaaagccctatggttcaatttttatcacatcaagagaaaaaaagagagaaactgacccaataaagaagcttcaagcaagtgtgttctccaaagaacctgatccataggagacattgtcccaagctttgcacctttattctggatcttgacaatgctcataagattagaaaagagaataacagacatagttccagcgattgttttcacagtggcaggacctttacccatcttcatctggtcaagacttttaatcacaagctctctcaaaggaccaatctttatcaacagtaagaatgcaatcgcaccttccacaaatagaactagaaacagtaactgaatcatgtctgaatgagttctccccctaaagtttgttcctttaccacaattcaccaataaggtaaactctaaaccctaatttctatagctcttgtcttctagttttgctacttgggtatggatttaaaaccaaaacccagatcggagaatgaagagaaagcaagcaacgagtttatctaaaactcattagctttttcaagaaatcggtcactgagttcttgataccaccaagaaatcataaaatggagaagactaagagaagaattgaattcaagaaactgaagaaggttttagtaggagagaggaaacactgaagagtgaagaaggatctgagaaaagttcagtagaaagcataaaggtataaatgttgtttagtactaatctagcgagagagagggagatcaatggttgtgattagtggtgtactaattaattatgtaaacttaaaatttaagagtgaactctatactctactctaaagtctaaaactactcatgcctttgtaaaagcaacaataaatttgtccttttgctttacttttaagagagatgacgaagcaatggtaaagttgcatctgtttttttttttccattgaattgtggatttttttggttagtatatcaaatttattcaatatacaaaaggttatttacaagaaaagagaccaaaaaacattggaaagaatttaaggagccgagttagagacttgatccatcgtgggaggagtgcaagctgtcatggtaacaaagggaagtcaccctcaagttctgttacaattgggatggccttaggtaatttctgtcattcactttctttcccatacctttacgaaaccaaaaacattactccgccttgttctataaagtttctctactcacatagttgagaataagtttaacttgtagcttaataaattcttcataaattctttcattttttcataaaagaattttaggcataccatctctaactttattatctatctcaaatagctatatgtcaattactcaattatttgatactagttaacaaaagttatacatggtatgtcacaaatattggtcaacttaacttctttttttatttgtctaatttcgaaattaaccttctcaaatagtagttttttttgtggtcaacaaactcaattaggttattggaccaattaactataatttttatgtgatcggataatacctagtatgcaattattttattttgattaataaaacaagcatgaagcgcgtcgttcgttggaactattcgttaatcattaaggtgcaaagaagaccaactagcaccgtagaatgagtcgtcgttggtttacgcaatcacaagaaagacaagtcaatgacaatgaattgtcaacgccttcgtgtttacacgtctcttacctctctctctatctttcaataatctctctttgtttcagactccttgaagcaattcttcattctggctgcttgacattcagaaatatg

SEQ ID NO: 1490 - DNA, 3000 bp, Unknown
  misc_feature (1)..( 3000): cDNA_ID_2137861_gDNA_ID_1620408_Annot_ID_156199 3000 nt of promoter + ATG
gaagttgcataatgttttagcaaaaactactccttacatctccataagaataacaaagatattattaaaaaaaatcaagcagaagcaaataaaaaaaaagaggattatgtaaaaaagggaaatgatcatcttcattagcttccctttcggctccatggaggaaaacagcaaccctacacataacaacgtcaattgtaaaaaaagaggatttatgaaagaaagggaaatgatattttggttatctaccttgggactagaaggtaatggttgatgatgttggtcgatgatgggtcgagtcggggtgctatgatcggttccattgtaagatctcgcttggttcctatcttctttcactttgtcaaagataagtgtgtaactctgattttccatgttagaacccgttccaggaaatggaggaatagtcgccacctaattgagaaaaatacacttacttagcgatatatatttatgagttgtgacacatattttgtactataaaatggtaaagttatgcataccctttcactactttgccctctaagattgcgtattggccgcgccgggacatgatcacgtgattgccgtctatttatttctgttggatttcccattgatctgccacctccaccatatgtttgatggttgtatgtttctggtgtgggaggaactgatctaactctgttgtttctttcattgtgtgcaggagacggtctgaattcggtttcgtctctgctattgaatctttcatgtcttggtctaacattatggtttggtggttgttggtcaggcctagacatatttcgattttgtgcagcgtttggattcatatctggatattcattcgggttggccacgttcatatttttcttgctcttgcttgctttttcgaacacgaccgtgaatggagcatcttcggtccagtctccgaatttgggcacgtgtggacgattctataaccacaagaaccaaaaaaaaaagattttgagaaacataggcttgcatttaaattgaaagtaggagacataaatattagaaaatcgaaatctcatatatacggtattttggagttgatgccagagatttacagttgaaactttgtttttggctaaatgtttagagctgaatcttaaggtgcaagaaacataaaccttatctctttttttttggttttgattgaacagaaacctcatctgtagaatctaagtataatttcattacatatgaattatattgatgttcagaagatgaccaaaaagaattaggtgatcttcctacgcataaatgtcaaacaaaagaaaatctcatgataccgccgattctaaaacaaaacactatatgtcctaaacaggatgatataggatccatatttagaactacaaatatttgacaattactctccattctcacggaataaaactcagagattgtgggtataataaatactacacttgtaggataataagctttagaaaatcaaaataaaaagaagactaaaaccacacccaaaagaaaaaaaaaaacttactgccatatttctgaatgtcaagcagccagaatgaagaattgcttcaaggagtctgaaacaaagagagattattgaaagatagagagagaggtaagagacgtgtaaacacgaaggcgttgacaattcattgtcattgacttgtctttcttgtgattgcgtaaaccaacgacgactcattctacggtgctagttggtcttctttgcaccttaatgattaacgaatagttccaacgaacgacgcgcttcatgcttgttttattaatcaaaataaaataattgcatactaggtattatccgatcacataaaaattatagttaattggtccaataacctaattgagtttgttgaccacaaaaaaaactactatttgagaaggttaatttcgaaattagacaaataaaaaaagaagttaagttgaccaatatttgtgacataccatgtataacttttgttaactagtatcaaataattgagtaattgacatatagctatttgagatagataataaagttagagatggtatgcctaaaattcttttatgaaaaaatgaaagaatttatgaagaatttattaagctacaagttaaacttattctcaactatgtgagtagagaaactttatagaacaaggcggagtaatgtttttggtttcgtaaaggtatgggaaagaaagtgaatgacagaaattacctaaggccatcccaattgtaacagaacttgagggtgacttccctttgttaccatgacagcttgcactcctcccacgatggatcaagtctctaactcggctccttaaattctttccaatgttttttggtctcttttcttgtaaataaccttttgtatattgaataaatttgatatactaaccaaaaaaatccacaattcaatggaaaaaaaaaaacagatgcaactttaccattgcttcgtcatctctcttaaaagtaaagcaaaaggacaaatttattgttgcttttacaaaggcatgagtagttttagactttagagtagagtatagagttcactcttaaattttaagtttacataattaattagtacaccactaatcacaaccattgatctccctctctctcgctagattagtactaaacaacatttatacctttatgctttctactgaacttttctcagatccttcttcactcttcagtgtttcctctctcctactaaaaccttcttcagtttcttgaattcaattcttctcttagtcttctccattttatgatttcttggtggtatcaagaactcagtgaccgatttcttgaaaaagctaatgagttttagataaactcgttgcttgctttctcttcattctccgatctgggttttggttttaaatccatacccaagtagcaaaactagaagacaagagctatagaaattagggtttagagtttaccttattggtgaattgtggtaaaggaacaaactttagggggagaactcattcagac

SEQ ID NO: 1491 - DNA, 3000 bp, Unknown
  misc_feature (1)..( 3000): cDNA_ID_2137843_gDNA_ID_1620408_Annot_ID_156195 3000 nt of promoter + ATG
taaggtggtccaaaattttgatataatgagaaacatcaagaacattgtatgggaagactgcaagtttttacatgtatcatcatttacacttctccgtttgtaaccacagacaataaggcaaacatgttcaaagcttccgaaaagcggataagagagatgagtggacatactccgataatgaccggtaagggtgaaacacaaccagataataatctagtgcttctaacaccttcatctccattcctaatatatcctttagttcatatttgttgtactcatcaggatctgcaaagatataagaaccgttgtcgtcgatatgtcaaaaaaaagcatattgaaggggaggtactctcatgatttgaaaaataaaaaaacagaagaagaagatattacacaatcttttgatgtaaaaaacaagattcctggcctgcactatgctttcttcagctttagatgccaggtacaagcacgtaagagcaacaagtcgaggctcaaactctaccatactctttctgagatagtatagtaacaaaaggaagatattagacaccaaaactgaaaactttcgtaacacagttaacgtttttgatagcagagatgcaacatagagagacactggcatgacaagaatttaactcatttcattcctcacatacacaaagatgcacattgatgtatacgatcatatcaaaaatacattgcatacctgatataaacccgtctcatatacgtaattgcagtagctacaaccctacataagtagaaaaaccaaggcgacgattcatatacaagtccaggttacaccagatattagagctagttaaatctacagaagcaaaacaaagtaatggaagtactgcaacagtagaatctctttgatatagcaaaaattggacccccaaattgtaaagaaccaacctttgcctcactttaatgtgctgagccaatttcataatatctgaaaacaacaataaatgaagaaacaaagagacataaactcaaaaaacttctctgatcaatctctaatcaaaccagtgcaacagagacaacaaatttgcttaagtaagcaggagaattcgaagaattaagaagaaaaaggatttcgtacgattagacatatggaacttgatgagcttaaaatcatcaattgagattccacgttctttatcgagatcatgaactacgtcgacttcttctggatccaaaagctgtttactgtttcgtacaaacgcaaaaacaaaacaaaaaaattcgagaaattgaaattagaagttgcttagaaggagaagaagaagtgaattttgatgggtaaagttttaaagaacatttactagtgagatgaattccagaaattggcagccattttttccggtagaccgtcgagtctttggtaaggaggagaagcttttttagctcataagttcaacatttttctgttatctgtcaaatctctttggttggtggtctcatgatctatcatatcgttgcttttttctgaaattaaatttaaggctcggcccattatcggcccaataggcaaacaaatgaaagtattaactctgatataacatgttcgttgttttttgaataacagaacatatagatgataaaaattgaaatcttataaatagctaagaagtgaccgaatatatcatttcgacgaggtataatcagtttcaaaaggattaaatttgagtttggtttttttcgtcatgattaaggctataaaaattctagctttatatcatcagccacaccgaatatttttctctcacaagtttttgtatcatgtattgttcaaacgcttgatcagtgattttcttctaaccataagtttgggtgttcataaaagaattttcagaagaacaccacacatttttcgtttgcctaatatacatgttcatttgttttattgagcccatactcctttatcaaaactaactttttttctttaaacatactaaattcaaactaaacttagactaatacatactcaaattaacaccctacatgtttctcacgttcaatatttggtacaagccaaataggtaaactacaatctaaaaacgcacgagaaaaaccgcatgacaaaggaataagccaaataagttgactacaatctaaaaaacgcacgagaagagtatcgattatcccgtgtctaaatttaattccggtttttcgctatcaaaacaattcaagaggagttattattctctaattcaccttatagaattctttgggattatgtgctaacccaagttaaaatctaatgtactcattaataaaaggtaagtaatattaaagttagtggagaataaaatctgttgaagaaaggtgaggaagtgcaacggaccatgtttgacacgtgagagtcaaaaaggcaataaaaaagtcgtcaacacacacactctctccccgtctatataaacatcttcttcacagtccccacaaagtcctcttccgttgccttttcgctttctccgtacacttggccttccttctagcgatcaaaccctaggtcccgccattgttggtcccagacttcaatcgaagctccaatttcactaatttcaggtgaatcttcttctactatttctcttccgtcagtttaatgtcacgatttcgccggaaaaatgtgatctacactgtttcggagtgaaatgtgaagtagatttcgttggtttcttagctagtttgtgcttttctcgaagttgtttctgtgtttatttcatgaaacgattttgggttgcttttgtgaagttgattttgttgttgcctcttagttcgttttcttgcttgttaagtgtttatcgagtcactatgtgtagttcatgaattacgttttctacggaaacgattttggaaagttgtgtgtgagatttagagattttctgttttttacatgattcttgggttgttctgtgatttacattgattctgagttttgacagtcttctatgaattacaggtgttgtttattctctggaagttggcgataca

SEQ ID NO: 1492 - DNA, 3000 bp, Unknown
  misc_feature (1)..( 3000): cDNA_ID_3062652_gDNA_ID_1620408_Annot_ID_156192 3000 nt of promoter + ATG
ccaatggagaacagagaccaggtgaggcaaacagaatcagctgagaagagtcaccgcaaggaaaatgtgaccaagagtgagaaaccaagggatcaagaaggggtaaagaagactgaagcaaaggataaagacagaaataaagagaagaaagaggaaaaaacagagtcgataaataaaactcgtcaggagaaaccaaaattgatacgagggcccaagttagaggaaagagaaaaggactctccggatttaagaaattgcaagctgcctgacgtttcacggacaagcatcaagaaccttcacaccgagggaaatcttggcaaacggaaggatcatatgacaaatggattcctgtatggtgagttattctctgatccaattctctgtctggtgaatgaggagtgtagttgccatattaaccatcgtatgatatatggtttggtacttagaagcatctaatagttttatccaatcatggtatgttttcttaccttaaaagattttttaaatttacgggtatcttactggtttggtagtttcttggtttggagtaatgatgcaagatccgtatttcttggttttggtctgaaatgttaacaatgtagtttattacctgtttgttgtaacattagtctttaattctttcgcagaaaatggaaccacgccacacaagttacagaagctgagtgcttctgtaccatctgtggaaaatggaagaacattaggtgcaccccgaactcctccaatgcctgcttctgaggtgcaaggaacaacttgcaagccacaagtcaaagaagtcagaattaatggttttgctgtctctggagaaaaacgtaaagtctgtccaccaagccctttggctgcaacaatgaaagtgaaagtcaaggaaaatggtgaagcatccgcaaagccgcctcatcctgacctaaagtatctcaatcagatactccatgtacctacaagggagctgttgccagagattgatgatgaccaagaatggctacttggtcagtcgggtatcaaattaaaaagggcgagaacagatcctccagattctggcgaatccttgcaggtctggaaccaagctttcagaatagagtctgcggatatcacagctcttccttatgtagttccattttagctatgactatattcctacgctacaatccctgaggagaagaactatccctcgcacaacgccactttgcagcagcatctattaaagaagaccgacaacagcagtccatggctccccaaagtttatgagcagggatcaaatatgttatacacgcccataatatgaacacccacaaagctctgcatgggtgggggaaaagaatgaatgaggaagatgtaagtagagtaagtttatagagaagttgattgttgtttgacaccatgttgtgttataaggacaaggatatgtgtggcattttgttctgcacgcaattttgattccctgcttgcatcatcaacattagtggataaagtttgtatattacagagaatggaaaaagaaagagtagggctctatgtgtgttactgggcgtggagacggaagaaagtttaatctttccgttataactatagagtatatagtctcgagtttctcaggaatactattgtaccaaatcctgaataaaccaatgatcactagccaatcctagctccatgcctaataatgttgtgtataattttagtaaattcaatcatttctatcctaaaggttaaatctttcataaatttgacttaaaggatcggtctcttacttcaaatatcaaaccatggacttcaatcgtttcgggaaatcttgtaacttcatttttttacggatgtattataccaacttcagttaagttcaatgatcttagtcaaatgatcgaattcctcaatcagaagcaaattggtgaagagagattggttttcacactaattgggagagagcaatttcggttttggttactgtagtgatcaatgcagcgaaggtgttcgatgaaatgcgtaggagagactttcgggaaattacttcactaagagcttttttactgatgcgaattccttttaatgatagaacaagatatcaagcaaagaagccttgtggtcttgatactgaattctagaatacacagtgacgtggtggtcttgtcttttgataagcttgttgtagctgtctcctctctcaatggctatctcctgcgactgaaacggtaaacctttattctctttagattcgtgtgtattcatcagtatctggtcaggttacaataatatattgcttattaactgatcaatctgttactgtcctgccctgcttactatagtagacagtttctgtggttttgtaatacttaggcatgtgttaactattattagaggacttacagtgagttaaggtgtcttcgtgtgtgtttctctcaaaatgatatatttgttactctgtatatatatatatatgctcgtggaatcctgatgagaatttggttacagctttatcaatcctctaaatagttttcaacagtgcaaggttttgtgttcctctcttgaaaatatagtctctgaagtgttaacgagctctatatatgactagtttgcagagttcaggcagcaatgtgaatgagctagagaatccaataagcaatgataggactgggtcaatagttcaagaacgtgaaggttccgacaactaagcaaactgcttcttcaatttggttccgacaacttttatcattaaaaaatatataaaatatcttttattattaaaaaatatagggatatatcttttatttgattaatcattatattattgtagagaaccctcagccaagagattggtagctagatagataaggttgacttggagtcaacttctagcttagagttttgataaattttatagctttcttcatttatagtaaacgttttaactcatttttttccagagaatctgtacccttggcgttcttgtactggttcatcgtaggtgatactcgacgtctagttgtt

SEQ ID NO: 1493 - DNA, 3000 bp, Unknown
  misc_feature (1)..( 3000): cDNA_ID_2137818_gDNA_ID_1620408_Annot_ID_156189 3000 nt of promoter + ATG
tgtaaaattgcagaatccagaaatgtttgaatctttggttgaatccagaaattatgctaatcaatggtttattagtgttggttatcactatggaatggttgtttctgttttatgttctatgatctggcttttatatggagactgattaacgtatttgaatcgatgttttgcagaaggatagctcaacttaaggagagtgattgccaaattgcaattgaagacataatgtacatgttgatcttgtacaaattctcagagataagagtgcctcttgttccaaagcttcccagttgcatttacaacggaagactcgagatctcgccttcgaaagactgggaacttgagtcaatccatagctttgacgttcttgaactcatcaaagaacatagtaacgcagtcatcagtttaagagtgaattcgagtttgactgacgattgtgcgacaacggagatagataagaatcgtctcagtaaagtatacacagcttcggtcttatatggatactttttaaaatctgcttctcttagacaccaactcgaatgctcattatcacaacaccatggaagtttcactaagcaactgaggcattacatttctgagttcgatcccaagatattgcggagatgcgcaaaaccaaggtcacatgaagcaaaaagcctgatagaaaagcagagtttagctctttttggtcctgaggaaagcagcaaagagagcattgtgacatcgttttctagcctgaagaggttgcttcttgaggctgtggcgtttggtacgtttctatgggacacagaggagtatgtagatggcgcgtttaagctcaaggagaatgagaatgcagaggaagaaacaaatagcagtgtttgaagtatgtatgaaccagtttgctagaagaaaacttgaatatcttttttggtggacattgcatataatatatagattaaatcagggtcaatggctatatgaaattatttttgtctatagtttgagtaatcatatgtatagtgtataatggatgatttaatagagagattggttttgtcattttatatatccatcaatatattgcaacttcagaggaaaagaaaatagttaaaaaccacatttattctaggtgtctctcatatttgaccagtttctcatctctcatcaattttcacttgtggacgcatgttagttaattgaaaataaaaagacaaaatttatatgtaaatgcagtatactgtatactgaatatagtaattatgtttttagttactactccttatgtttcacaaaaagtatcattttacaatttttaacacaaattaaaaaaacatctaaaaatttcttttacctattgtaatacactttttatttttaattaataattgaaaaaacagaaataaaacagatatttgattttaaaaacggcatcgaaaacacaaaacaacaatctttgttaaacaaaacaaaaaaatcttaaaacgatattttttgtgaaacagatgaagtattttaaattaaaaattgtaaattaaagtttatagttttttttactatcatttataagaaaatatgtttgataaaacattaactactatgtaacataagtaaaaccgtaccctacaaaaaaaaaacataagtaaaagcgcatataaagatgctactatcttaactttaaaacatcacaaccaaaacgatcagcaaatacgttccatatttttttgttaaaatattaaaatttttaaagaaaatgaagacaatttttgtctttttaactcttgcagttttggtttcatcatgtaagttctcattcttgttcaattaaaaatatatatatatatatatatatatatatatattatagtttaaattttaatttaataagttttcaaaaaactatttttacgtgcatcaaatattatgataaaatctatttcagaaggaaaatctcagttttccggccctgcattaagccctaatattgatccagcagacgaacatattggacactctcccgaagacatgaaaattattttttgccaacaatgtgcatttcattgtattgagaaaaagaagaatatagctcattgtgaaaattctatttgtcgttgtacattggaagacattttgtaagacattatatttttagaataatataagaaataatcattgtgactgattttctacctttacagcctcctttcaatttttaataaaaattaataatatagaattgaaaatacattgagttatacatttttacatatatttaaacgactatatacactgaatctttataacaaagaaaaaaaaatcaaaattgtaatttttgtttgtatcttctatatgtattaagtgttacatgtgttatttataaaatgtttgtgaaggttatcacataaaatttactcatcatctcatggtttgcttttttagaagagaatttaattttagaaatagaatataaaatcataagtcatatatttctttttttgaatataaacaatccgaaaaaatacctagaaactatcttgtttgttttgattataaacaattatatatatatatatatatatatttatttagtctaaattttacgatgtttactaattgcataacaaccgttaaattagaggattgaatctatcaaaaatttaaagacaaaatattataataaaaagtttaattaaatgaggtattttttatcaataaaaaacaaagtaacaattaaacgtccaattaaaaatgaaatatttttttggttttttcctacgtcggtaactaataacgtcacaaagttgatggtatttgaaagaattagcggcaatttattccccccataaattttcatttgtgacctaaaattaactttccctttctctctccgtgcctcttcccattctctttcaatcttgtttgaatctccctcgattttcatttctctttcaatttcaaaattcgcacctcctcctccaaagttgttgaaatcagattttgttgaccggagagtagttattt

SEQ ID NO: 1494 - DNA, 3000 bp, Unknown
  misc_feature (1)..( 3000): cDNA_ID_3062667_gDNA_ID_1620408_Annot_ID_156186 3000 nt of promoter + ATG
acttactgatggaactgtattcgattcgagttttgaaaggggtgatccgtttgagtttaaattaggaagtggtcaggttatcaaaggtagtgacttgcttttggcttttgagtatctcttttcttttaacattttcttaattccttcaatggtaattttcggttttgttgcaggttgggatcaaggtttgctaggagcgtgtgtaggtgagaagaggaagttaaagatacctgctaaacttggatatggagaacaaggctctccacctactatccccggtataaatacgcttcatcaataagcttttaaaatgtgtattcatgtttgtgaaaaaaatacgggatttcgacattataactaaaaacaaccttgcaaacttcaggtggtgcaacactgatctttgacacagagcttattgcggtaaatgaaaaaccagctggtggtgaagaatacggaggggatgaagatgatgagggatatggaaatgacgagctatgatccggtctccgttctttaacgattttgcttcaagagttctctggataatacaaagaaaccatctatgggagggttttttctagtcttttggcttttaggcgtaaagactgcagatgattgttatggtgatatttaacattttcttttcataattggctcaacttcaattagttagccaaagcaaattacacagtacggcttagcgacctcaatggtgatctatgcgcagaatgagaggggtcaagaaaaatcttaggcagtgtcgtcttacaaaaaaaaaaagacaactacaatggcaaaatacaaaagtttaccatcaatgcttttgtgaaactctttgctattattttgacctcaatccaccaaattctcaatggtcagtggatcaatgattctaaacattgaacactaaacatatctacgaaagcagaacaaataaataaatttcttcaaccttcatttctcacaagatagaataatggcatgagttcagctgttgttatgcttcaccattctttttgtatctgtgtcccttctggacattgtttcagctcacttgaagattaagccatctttacctcaaattccagatccgcaaacggtgaaggatgtagagccttgcaccgttaaagtagtgatggtctttgtgtcggacctcgagaaagaatgttctaagacaactagacaagtaaattcaaatttacttcgaaatacattcttttcttgaaggtgaaaatgtatggctaatgaaacattttatttacttcatcttgcatatgtataacagattaagaaagaaattcaagaagagaaaatggatgtcataaatacctttaaatttatgagaactgaggcgggaaagattataggtagccgcaagaaagaggagagcgaagaatccatgaagctagcagctcaacatcaaaaagaaatcaaagaagggatcttgaaatggagacggttattactcggatcacaaacacaattgttgtaaacacaacaaactctttttcaatggaaagttctacaagcggaaaaggaagttctagcgataatagcaaaagctttggtagcttcattagcggaggcgctttcacagacactacaggttcaggctctaacttaggcattcctgtagttcctgaactaccggtagaagcttgctagtgctagtggaagtcctacgagcaatccttctggcagtggggtttcctttacggacactactggtggaagctccattagtcctactgaaagtggaagtgctggatcagcaactcagaaaaacgctataacattgacacaagttgaggctgagacttccaaagaagtcatgatattcataataaacctcgaaaaaaagtgtccaccaaaggaggaatacgaggtcttctttgagaaactcaagggtataatggctgcacgctcaaagaattctcccaaaagcaaaaaaagtttcttctctacgatcaaatatgctgctgggaaactatctgatgacatgacatttatgcggtcaagaattggaaccaaatcagcaaaggtacaaaaaagatacgtctctttctgttgttacttgctacatgttcttctaactcacaatataggtgaagcagtccatggaaacttaccaaaaagaagtgaagactatcaaagagttagaaaccatccatagtagaatagtaagttagaataaaggcaagaaagatgggtatttgacatgcacaacggcacaacaaacagagattaagaagacaatcactaagtgggaacaagtcacaaccaaattcgttgagaccgctattcagagcgagacatctacaacttcttcctcttctcccggcaagatcaagtcaacttgaactcaaaggcataactatacataaactagttagccacaaatcataaaaaaaattgaaccaaccatacgaaatacagatcaattaactagctaataattttagtttttgtgtttattgtaaataaaaccacggctatagatatttcaaaaagataaatcgtttaagtctttatgctctttttaatttttattagtcaaggatgatgaatagtaaattgtataaaataaaatattatttgatttagaataataaaaaaaaatctagtcacaaaaataatgcttctataatcaaattttaaattttaagtatttaaaatgattcaaaacttgtgtgtttttaaaaaattaatttattaattttagattaacgagacccgctcaaaagaaaaataaaaagtgttctaacaaataaaaataaaaatcacgctaacagtcagtatctggaaacatcgggacacatctttaggctcaaggattcaaatgaaaatcagaagtctctagaaaaaccccaaaacactctttcttcactccccctataaattctcatcacaatttctcaaaccatctcatctctgccaacacactctctagaattctctcgtgattatcgatttcactctcttaaatttgatcagaaaatg

SEQ ID NO: 1495 - DNA, 3000 bp, Unknown
  misc_feature (1)..( 3000): cDNA_ID_2137814_gDNA_ID_1620408_Annot_ID_156188 3000 nt of promoter + ATG
ccattgagaatttggtggattgaggtcaaaataatagcaaagagtttcacaaaagcattgatggtaaacttttgtattttgccattgtagttgtctttttttttttgtaagacgacactgcctaagatttttcttgacccctctcattctgcgcatagatcaccattgaggtcgctaagccgtactgtgtaatttgctttggctaactaattgaagttgagccaattatgaaaagaaaatgttaaatatcaccataacaatcatctgcagtctttacgcctaaaagccaaaagactagaaaaaaccctcccatagatggtttctttgtattatccagagaactcttgaagcaaaatcgttaaagaacggagaccggatcatagctcgtcatttccatatccctcatcatcttcatcccctccgtattcttcaccaccagctggtttttcatttaccgcaataagctctgtgtcaaagatcagtgttgcaccacctgaagtttgcaaggttgtttttagttataatgtcgaaatcccgtatttttttcacaaacatgaatacacattttaaaagcttattgatgaagcgtatttataccggggatagtaggtggagagccttgttctccatatccaagtttagcaggtatctttaacttcctcttctcacctacacacgctcctagcaaaccttgatcccaacctgcaacaaaaccgaaaattaccattgaaggaattaagaaaatgttaaaagaaaagagatactcaaaagccaaaagcaagtcactacctttgataacctgaccacttcctaatttaaactcaaacggatcacccctttcaaaactcgaatcgaatacagttccatcagtaagtttcccctgccacataacaacactaagttacacaacaacaaaaacaacaataaacatttcttcatgacaataatgaatcccaattttgttataagatctagcaaaaacttaccctatagtgcaccttgatcgtatcacctttgtgagcctgaacttcacatgtttttggcttaaactgcaaaaaaaagaaactctttattatctctgaatccaatcaagaaccctaagtatcttacaaatttgttgacaagatcacacttgtcaaatccaaaagactccaactaaaccaaatggtcaaaagacaaaccaaaacagaacacagcacaatcaaaaccagatccaaattcacattccagaaaacaacaatgaataaaccaatattatagctagaaacagtatacgagatcgttcatttcctgatcggaaaatataaaaattaccttgacaccgatctgcaattccgacacatctccggtcttcttggcaaaacctataaacagatccaattacaaggaattagattggaaacaaagagatcatgattttagcacattcaataatgagaaagaaagatgaatggagaaccttggagtgaaatgagagagaagaagatcaaaaagagagagtaacggagactcatcttgctcgccataatcgcttctcagttctcactcttcagttttttccttttcttcagtgtatagaggtaatcttattgggcctaggtaggcctgtggggttctgcatttttgtaaaagcccatcttttatctctacaagcaaagttgaaaatttcggtttaagagttttatcatttcactacgttagagtcttatatttctactagcaaagttgaaaatttcggtaagagttttcatttcatttcatttctttctaaatctactcaagagtgttcactatggtggttacaccggtatgcaaagagttatttaacgagcaagaagacaactacattatctcttaattatattagaatgtttcgcatgcatctaattgtagtttaagttgctgtaatgttttacaaataaaagttttattttataatttcacggtttaatatctttgtttaatatagaagaggaagcaaacaaagatgagaagctcacacaatctcatttgaagatttatgtcactatttaaagttatagaaaaaaacagttaatctctattattattatcatattctattctaattttttttctagtatgtcacatattatttaaaagatgagatgagtgtaatttttttttttttttaataataatatagactgcggtacaaatatctagtaacaaaaatatttatggttttttaaccattgtgattttatttagaatatcttataatattatgggacaaatgaagaatcttttaatttttaactaactaagctaaaattttaatttatatctcagaaaatgattcttcatatttttgaattcgaaaattctagcttgatgaaaaaccaaaagccatttcgactaaattcaaagaaaattacaaccaataagactttcatagtttaatgttacaattaatatccaaagaaatttattaaaatgaaaaagtttttaaggtgatccttgaagagtttttatattacccaaataaacgtcgctttactttactagtcaacttacaaaatcagcattaaccacacaaagcaataaacaaaaaagattttttaccatttgcttaccttatccaaatctgctcccactgactcttccttcaatcttctcctctgtaatctcttcacaatcccaaaaaatctcacaatcgttttttgcttatctctttcaatggacacctctctctcccaccacggatctctcccgtttcccccatcgcgccgcaatttcgttaaacaaaaccgcggcggcgattgcgtttttctcccctcgcgtcgtaagttccgatacgattcgttggtggtggtttccgctgcgtcttcgggacagagcatcgacgcgcctctagttccacggtcgcctcagggaaggtttctaagttccgtcttggtgaaaaaacggcagctctttcatttcgccgtcgctgatttgcttaaacagctcgctgatgataaggaagcttccttatctcgt

SEQ ID NO: 1496 - DNA, 3000 bp, Unknown
  misc_feature (1)..( 3000): cDNA_ID_2137810_gDNA_ID_1620408_Annot_ID_156187 3000 nt of promoter + ATG
atatctgttttatttctgttttttcaattattaattaaaaataaaaagtgtattacaataggtaaaagaaatttttagatgtttttttaatttgtgttaaaaattgtaaaatgatactttttgtgaaacataaggagtagtaactaaaaacataattactatattcagtatacagtatactgcatttacatataaattttgtctttttattttcaattaactaacatgcgtccacaagtgaaaattgatgagagatgagaaactggtcaaatatgagagacacctagaataaatgtggtttttaactattttcttttcctctgaagttgcaatatattgatggatatataaaatgacaaaaccaatctctctattaaatcatccattatacactatacatatgattactcaaactatagacaaaaataatttcatatagccattgaccctgatttaatctatatattatatgcaatgtccaccaaaaaagatattcaagttttcttctagcaaactggttcatacatacttcaaacactgctatttgtttcttcctctgcattctcattctccttgagcttaaacgcgccatctacatactcctctgtgtcccatagaaacgtaccaaacgccacagcctcaagaagcaacctcttcaggctagaaaacgatgtcacaatgctctctttgctgctttcctcaggaccaaaaagagctaaactctgcttttctatcaggctttttgcttcatgtgaccttggttttgcgcatctccgcaatatcttgggatcgaactcagaaatgtaatgcctcagttgcttagtgaaacttccatggtgttgtgataatgagcattcgagttggtgtctaagagaagcagattttaaaaagtatccatataagaccgaagctgtgtatactttactgagacgattcttatctatctccgttgtcgcacaatcgtcagtcaaactcgaattcactcttaaactgatgactgcgttactatgttctttgatgagttcaagaacgtcaaagctatggattgactcaagttcccagtctttcgaaggcgagatctcgagtcttccgttgtaaatgcaactgggaagctttggaacaagaggcactcttatctctgagaatttgtacaagatcaacatgtacattatgtcttcaattgcaatttggcaatcactctccttaagttgagctatccttctgcaaaacatcgattcaaatacgttaatcagtctccatataaaagccagatcatagaacataaaacagaaacaaccattccatagtgataaccaacactaataaaccattgattagcataatttctggattcaaccaaagattcaaacatttctggattctgcaattttacagattttgttttcttctacaactcggcgattctacagtgacaacaaacacttgcgattgtgattaagaaaagtggaggttaaaaggaacctgtggagggaagcttcatcggaaccataactaaggaacatacgagataaggaagcttccttatcatcagcgagctgtttaagcaaatcagcgacggcgaaatgaaagagctgccgttttttcaccaagacggaacttagaaaccttccctgaggcgaccgtggaactagaggcgcgtcgatgctctgtcccgaagacgcagcggaaaccaccaccaacgaatcgtatcggaacttacgacgcgaggggagaaaaacgcaatcgccgccgcggttttgtttaacgaaattgcggcgcgatgggggaaacgggagagatccgtggtgggagagagaggtgtccattgaaagagataagcaaaaaacgattgtgagattttttgggattgtgaagagattacagaggagaagattgaaggaagagtcagtgggagcagatttggataaggtaagcaaatggtaaaaaatcttttttgtttattgctttgtgtggttaatgctgattttgtaagttgactagtaaagtaaagcgacgtttatttgggtaatataaaaactcttcaaggatcaccttaaaaactttttcattttaataaatttctttggatattaattgtaacattaaactatgaaagtcttattggttgtaattttctttgaatttagtcgaaatggcttttggtttttcatcaagctagaattttcgaattcaaaaatatgaagaatcattttctgagatataaattaaaattttagcttagttagttaaaaattaaaagattcttcatttgtcccataatattataagatattctaaataaaatcacaatggttaaaaaaccataaatatttttgttactagatatttgtaccgcagtctatattattattaaaaaaaaaaaaaaattacactcatctcatcttttaaataatatgtgacatactagaaaaaaaattagaatagaatatgataataataatagagattaactgtttttttctataactttaaatagtgacataaatcttcaaatgagattgtgtgagcttctcatctttgtttgcttcctcttctatattaaacaaagatattaaaccgtgaaattataaaataaaacttttatttgtaaaacattacagcaacttaaactacaattagatgcatgcgaaacattctaatataattaagagataatgtagttgtcttcttgctcgttaaataactctttgcataccggtgtaaccaccatagtgaacactcttgagtagatttagaaagaaatgaaatgaaatgaaaactcttaccgaaattttcaactttgctagtagaaatataagactctaacgtagtgaaatgataaaactcttaaaccgaaattttcaactttgcttgtagagataaaagatgggcttttacaaaaatgcagaaccccacaggcctacctaggcccaataagattacctctatacactgaagaaaaggaaaaaactgaagagtgagaactgagaagcgattatg

SEQ ID NO: 1497 - DNA, 12 bp, Unknown
  misc_feature (1)..( 12): cDNA_ID_2137892_gDNA_ID_1620409_Annot_ID_156209 3000 nt of promoter + ATG
aagcttgtgatg

SEQ ID NO: 1498 - DNA, 3000 bp, Unknown
  misc_feature (1)..( 3000): cDNA_ID_2137954_gDNA_ID_1620409_Annot_ID_156232 3000 nt of promoter + ATG
gcgccctggacagattcgtgtatatatatactcggggaaagcttgggtttctgatgatccagaggcgttcaaaagtgttttctttcttcttcttcttctggttgtctccatctttgtgttaaagatgtgaatatatgttttaggacagcttcatttttgttgaaagcttaaaaaacagggtcttttataatctctgtgattagtaccaaattgcagatttgcagaactacgtttttcttggtttgtcaggtaatgtgaaactgaataaaatgaatattatttgaatcaactgagattttacattatcttctagagttttgtgtttgagattcaaagaacactagactgagtatgaagattttgggtgagtaaaaacaatcagggtgataatttatcatacaatagttttggggtcaaaatggaataattctagagtatagagcccatgttgaaaagctcgaaaattctttccaattccagaagaaaaggttttgctgtttccctgtgagcgatcttcgatactcgtctgggcatggcgtttttgctcaacaacgcttcaatttcatctcatttacgctcgtcttcttcacaggtttggatcaaatcttgttaatcgattattgttggaattttgtttgatttttgtgacaattttttcccttacgaaatttttgaagaagacgggtgatgctttatcaatatcgcgtcgtggattccacattgagccaggaactcgagagaaagctgtaagttaatctctgtttctgttcgagtcctggatcattttggactcagtttttgtggaattttctgcatctattgtgatttgaagatactaattagggttcatgaaagaattggcttttatatagattccctgagactctcatgtgtgtccctagtaatgttcgttgtctgaatctatttgaaagagtaatttttatgagagttttgagttgttgttgatgcttatgctgttgttatatggcattttcttaaagctcttgatgagtttgtgtttgcttaaattgaaatcctgtgtagctcttggctgaagattctgctttgaagagattcaagtctcataagaaaagtgtgcacaaactgaagaggattggtgatgtgctcactgttgttgttgttgcaggtaaaaacactttagttcataacttttggtcgaagctaatcagattcttgttttgttagtggtctagaaacataatctggtatggttcaggaatcataatgaatctgagtaagagattgactaggctaggcacacttagatattttcaccttgcttcttgcaattaagaaagctgtagattgaatctcataggtttcatgtagagctgagcttattatgtcaaatcaaactaacaacgttcttctctgttgttcttggtaatatgaattatggattcacgacatactcgaaatctaaattgtgacttatctcgtgtcttgcttgtttttttgtcttaggatgttgctatgaaatctatgtcaaagctgtgatgaaaaaagaagctctggctgcagggaaaagctcatgagtgttcttgtctttgtatgcctttttgttttatcctttatacagtgtctctttctaataatctcacaataatgtttgtttactcaatgaaaatggcatctaataaagtagactaaaagaaaaagacattgtccagggaaaccaaactctggttttttctgacgttgtgtggaatctctgctttttcttctttttaaatattccttagcttttcacttatttgtactttgcttaaagatacactctccatttatagataactgcaacgattaatgtcttatccatggattaggtgactgtatttatgtgaaattgtgaatgatcaatcacacttaatggtttacactggacatgaaattgtttcgaaaggattagtagagcgagtgggccggttcggtgtagcctacctctatcttgggcctctctctaggcccaatttgggttcaaaccggttgagacgaggtctcaaaccgaaatctaactttacacccttaattttcaacctaattgtgactcaacaagaacatatccaccactgaccacttgttttccacaaatcatgcaaatttgattaatacctactgagtactgataaaaacaagtacaaagagctttcatgctcccttctgataacattggttcaccaaagatgtaatataaaaaatgttggaatattagttgaaccaccttggagaacgtataacaaagaagcccaacaaatcaagttacttttgcttgatttgcacacattcatgtttgaaagctacaattcatatgttctatattatctacatttatactcatagttgatatgttgtcgaaattctatcaatttatgatattgataggtttgcaatttcgtaaaagaaactctcacatctattttgactaacccacacgtttttaaaaataataaaactatgagtaattacacatcctaaagagcatttactcatcagtcaaaattagttgatcaatattgagtatgattcgtgaagtcatgcatgatacaacgtcgataatttttttggtaaaatgtaaaagaatacgtaatcaattttttctttggaatttttaatactttggaaattacaaatttttttgttgaaaataagatttcaggaagacgaggagtaatattcttcttagaccaacatcatgacatgttccctggcgtgattattttcgcgacacctgaagaaacggcatcgtttaggtcaaagtcatcatcatcattctctattttgcaatctcataaagacggttataaaaatcacagagacacacccacagacgataaaagctctaacggaccgaccaccgccaagtttttaattttacactaatgctactgccacctcttattccgccagatccaccaccgtctccgccgcatcactgattcctcaaccgtcaccggagataaatccttaagcaaatagaaa

SEQ ID NO: 1499 - DNA, 3000 bp, Unknown
  misc_feature (1)..( 3000): cDNA_ID_2108842_gDNA_ID_1620409_Annot_ID_156214 3000 nt of promoter + ATG
aagtttttggcaaaagaactaaatctgaaattttcaaaattttcttttgaaataaggcatcaagtgtcagcatattcatcttctgaatctccctcctctaccaccaccacgaccgcctcttcttccaccaccgccaccgcgacctccaccatgtccattgccgttagctccaggagtcttcatgttttcaggcaatgggaggatttgatcaacacacttcctgaagctgaaatcgtctgcagtatcgtcttccctaaccagaaagaagcatctgcttttccacattgggtgggttcttacttggaaggttttgattcctcctccaatcttcttttcaggctcagaatggcccttcttaatcagatctagcagcaccatgtgctcatactgaaatgtacaatccagaacaaagttcagtacaacgagttagttagttggaagctcaaaagaaactgcaacaactgtaatatattacatgactatgcaatgttttatcttttatttgtgccctcaaaatttgacattaacttcattcttctaaccattatatgacatcaagacccaaaaaaactttctaattcacacacaatccacaatcatataatcagtaagaacacgatacatttgaacttttcaactagtaaaaaagctgcaaaggagtccaatttacaagctatctccacttcactaatcctctccctaaacataatacaatatccacaatcatctccctaaacataatacaatatccacaatcattgtaaacaaccactaatttgagacaaaaacaaaattctaacaccaaacactgaatccaaaatcaaatcatatgaccaatacaaaggcgaacccaattctcaatttcttttagtttaaatacaaagcacgatcatcatcagattcattgataaaacatcttcctaaacacatcacagaacttaataatcacaatcagagctcttagattaacctatataagtctcgagcaaaggaatgaatatttccaaaaaatttgaaactttacaataaacaaagccaaaagacaaagacgaagagtaaacccaaatatgtattaccttattaacatcgagatcagttggccaaaagtgtaaaaacttgacaaagtaatcgaacatcgccacagaggtaacaaactccttgggaccaagtttaaccggacctgacttctcttcctctccaaccttctgcttcttcgattcacctccgttctcttcttcctctgtctcctctctctcacgtttctcatcgccggtctcggctttcggggtcgcggtttcgacttccatgtccactttctggtctgggttcacttccgctgacagggaatcgacgatctcttgttcttcagccattgttaagctagtaaagcttccgcctttttttcacctttctacgatttctagggtttaagcttgagggtgtgtgacctacagaaatcgtctaagcggtatatttatatgactttggtttccgattgaaccgaactggttcggtctatttgattttttggctcgacggcatacactacatgaaaaccaggattttcaatgtagtaactaatttgtcgtcattgatctgtccaattattatttttacgtctcttaaatcttttcattttaaagtctacatttttctaatatatttttttattaatcatctcaagatatttttttagtctacaaattacttttactgttgtagaaaatttggataatagtcagtaattctaaataatagaataaaaactcaaatcttaatataatagtttaacaaataaatcatattatactttttttggataaaaaatgttgatataatttacaatgttattaaaaataatttttgggatacctaaacgttttagatgttcagtctgtcgggatatcttggagacttaacttattgatcaatcacaatttttgccaaagaggaaaatgtcaaagtcaaacgaacatcttttgaaattatttacatctcgtggaattaatggaacttcttaaatttttcaaaaatttgacataattggaatatattttttttgcttctagtcaatcttaccatattatctatcaacagtcaaacacctcaatcttaaattttctaaaaataatggaattattttatcgtattttggtaaagagttatttttgtaatattatctaaaatctaaaaagaaccaagatagataggtacaaaaaaaaaaaaaacttttttttgtgaaaatctgattatcataacgttaccgtgtcaaatcgtcaacctccataactccggttttgtgtatttaattatatatttatctgtttacacgcgcttcgaaattttgatttacttatctgaatatttttccagaccgaacatcaaacaagaaaacacatttgtccgaatttcatcttgagagctgtttgtgcccttcaagaaatcgaaagagagcttctttcccccattttctgcgattcacgatatttcttcttctataggtaatcataatttgatcatcttctcttttatctctttttttctttcattttcttcttgggttatggttggttgattctgctatttgggaattttgatttctgtgacttttggggtttcaatttcattcctgaattgtgatggaatcgaatggtatctctcttttgttttcatggttgagatgtgattctgaaatttggggattttccgattaggtttatgtcttgaaaatttggggaaatttggagacaaagacatattttaaactcagatcctaatctcttccaccaagacattttccctgaattgttccgctttaatgaaatgaaatcgattgtctgagctcaattatgatgtttcgattcaaagaaatggagatttttgtgttgatgatggaacatttatcattataagagttatgagatttttattttgaatctttggatctttcttggtttttaacaggacaacgtttttttacacattgaggctaaaagagag

SEQ ID NO: 1500 - DNA, 3000 bp, Unknown
  misc_feature (1)..( 3000): cDNA_ID_3062704_gDNA_ID_1620409_Annot_ID_156225 3000 nt of promoter + ATG
cagaggttgttcaggaatccgaagaagggctccgtccatcagcagatggtgttcagatcgtgactgttgttaaaccttcagacaagaaacgtgccagaaaggagactgttcctaagaacaacctgccggtgaggacaaagaaatcactagcaaccaactctgctaattcaaaaacagttcaagtaaacaaggatgataagtctcagaagaagtctgagaggatcactaaacccaggactaagagagttcaagaagagtcaaagaagtcaattaagaaatctactgctaaagaaggtaaaaggaaaatcatataaatgtctttgaatagcttgtgtagcatttgtggctgatcgtttttaatgttcatatgtgtaggtgaagttaaatctctgaagcaaacagagaaaatggagaacaaagaaaacacggtgagtgaaaaacttctttaagttcacaggatcgaaattgttcttgtagctaacacaagctttttctcgtcgcaggttgttgttggtgcaggagaagacatccaggtttaaatgaagaacagagaagcgtttcttcaacatatctcaaacaatctttttcttttggtttgaatgatttgttcaagtacatagttgaaaaacctttgcaagtttgtttccaaagtgtggtttgaaagacaacaaatgttttatttgcttgctctgtaattgttttaagttttactttcatgtcttcatttgaagtctttcttctactgttgtctcttcaaatttggttattcactattatcaaaatatatatatatttatagcagaaatctcatttccgaaatttaaacatccatgtaaaataaactcaaggcagataataaatactattcaacatccaattactcattagtcaatacaacaaaatgaatcatatttatacatagctctgctccacgatctcgattactttcctgttatattctcttttattctcactgaacaaccttgcagcctctgcgttcgctggtgagtcagggtttgggtcacagagcaaagactgtaaaacaaaaggtcttggtttagttcatgcataacctccacaatgcaaaagatacaaatgaagaattcagaagtcaaaacctgaattgatgtgagaactgcagcaacgtcgtagatggggctccactggttttgcaagatatccaagcaaatgcttccatcagcataaactgcaccaaagttcaattatcaaagtcgaatttcctaattggtctattactatgttgttcactgaatgcttgggcttactgtttggatgaaacatccgtgaaacaaaccgaacaatcgggggtttgttcggataatcctcggtgaagtgaagagtcaacttgaaagtacctgatgaacacaacagactgattattttagctataagtttaactcatgacaatatctcggtctgcagcaatagccaataagtactgaaagataattacctccatcccatggagtgtcctcaggtctgcaaacaaagacaatgaagaaataagtttacaaagccatgctttgaagagaaaacaaaacaaaaagttatacccaaagatgagagcattccaatgcatgatattgttatcttgtggagctccacttattcccacaggaggatctttctgcagtctcttgaaatcccacatcagtctcttttttgctggagttgtcattgctgttggaaattcacagactgcatccaaatatgaaagatttcaactttactcttacaaactcatttcataagtcacaaagtaagagcaattgcatgaactaggctttaaatttctgattaaagtttcaattttttttcagacccaaaaaaagtagaagcagagaccaagatctacatttctataacctatcatcatagtttaacaaagacttaagcttcaacaaccatatagcccaaaaggtcagagaacaagaatcaccaaacttctagacaagaaagcttgaagcttggattatttcaactagcaaattaagttcgactcaacgatagtagctgtgtataaattctgaatttaaattctgaatttaagtagatcaagagtacaattatcgatttcaacgagccttaggattagattatacaatcacctatgaaagatttgatcttccgatgtcatgcatcaaatgaaaaagctcgattaacctaaaattacctgaagttcaaagctgcaatgaaaagtgattcgcaacactaggaattagggtttttccaatgtttttcatagaccgaaagagatgatgaaactattatgagtggagaataaataaagtatatatagagggagagagaatcaaagttgagatttttctttcctttttcttcaccaaataaaggaagagaagaagaaaacacaaagaaagtttaaaatgaaaaaatcatatactattttaagaaaataaaatacaaaacttgccagaagaaaaaaacatatatatattttcttccaaagacgaaaaaagacttttataattttaatacaattttaatattattattttttatttgtcggttcgtgtaaaagacaaacgtatacgtctattactcaatgggccaatggcccaagcggacgtgactcagcaagctatcaccattttaatacttatttatctatcaagatttatttatctattttgtaattgacatctgtgttcatcttacaaaattccttggttgatccctggatttgatgtcaaatatcactaatactattgattttccaatttaaatttcaaaagagtaaaacagtagataataatcataaatctctttttttttttgtaccaattttcattattagtttcccttgatatttaactaattactattccattagtcgaattgattagaggaggtctttaaaagagatttactattatttttattttttgctcaacttcttcttcctcatgagtcatgactcatcacatcagggtttataagaagccattagaaactatg

SEQ ID NO: 1501 - DNA, 3000 bp, Unknown
  misc_feature (1)..( 3000): cDNA_ID_1384565_gDNA_ID_1620409_Annot_ID_156226 3000 nt of promoter + ATG
tgcaaaagaccgtgccaggaaccgcacctgataaaagaaagtgaagcgaaatcataaacatacatttaaagatgtaatttcggaaattcagccacaaacatgaaatgtctatataggcatttttgagaacatgccttcaagaattactaagttgttgaaactaatagccaggaaccaaaataaaaaatggtgaagagagtaatgtacctgatcaccacaaaagttttctaaaaacttccgtgtgacaaagacttctccagcagcttgctggtaactctttggagcaaccctttgaattaacctcgcgaagaaatcagcaacctaatagtgtatacacgcatacaacagtagctcagtatgcatgttattcagaaaacaaaaccttttgaattcaagactcgagattcaacaaaaaaagtatgtgttaccttaggtaaggcgagcatatgagctgcctttgtcgagatatctccatataaaaggtatctgtagaaaacaagaccattactatccttcatatatgaaacaaaatgggaaatgacaaaacaagaagaaatagcaccaaacctcaaccaaatcatacctctctggagatttgaaagggttatggagaccatgtttcgggcactgggataagctgtccacaaatggctacaacatagaacagaggaaaactgaaagttagaattgacacggataaacaacattgtgatacgatcaacggtttttgataggctcgtacctgagttcctgattcatccacttccgcaactttgataaacggttctccatttagaggatctagaagcgtgttatgatttgacgatcctatccactttccctgcactatagacataacaatgaaagtagaactcagagacttcacaacagcatttaaccaacaagctattactcatttccatagcgtcaacgcacaatcagtgagaagtaaagacataccaaagctctgtacttcagcaggatgagcaccagagagctcctcggcatctacggtagcaaaaggtatggaatgattcaatctgcaagatccataaacacaaaaattaaggcaaaggaacactcttttaaatggatcacattctcagacatcaaagagtaatcagaacacaaatacataaagtaccatttcaaactctaatcagctaacactctcttcattacatagagactgagcagatgcggctactcgatgatctaaatctcaaatttttaatacaccaacttgctaaagttttctcttttatttatttatatatatatacaaatggaaagtctattactttaggcaaaaacatgcaaccccaaaagacgaagagcaatgtttaacacaaaacaagaaataatttggtgagatcaggacgtttgaaaaacctggagagagtcaaagaagcaagcgaggtggatgatttgtcacagagagacttagctctcagtgctcggctcgcaaaaactctatacattgcgtaagatccacaagtaacggagaaagatgagaatcagacgattggatgagaggattcaagaagattggtgataaaatagcgaattctcgagtgatttgtgtttagcagcttattaaagaattaaatgtttttcccctgattgacgagaaatacattaatgatttaaagatatttacagataatttcttatttctaggttattatcttttttaccccatagtttctaatggcttcttataaaccctgatgtgatgagtcatgactcatgaggaagaagaagttgagcaaaaaataaaaataatagtaaatctcttttaaagacctcctctaatcaattcgactaatggaatagtaattagttaaatatcaagggaaactaataatgaaaattggtacaaaaaaaaaaagagatttatgattattatctactgttttactcttttgaaatttaaattggaaaatcaatagtattagtgatatttgacatcaaatccagggatcaaccaaggaattttgtaagatgaacacagatgtcaattacaaaatagataaataaatcttgatagataaataagtattaaaatggtgatagcttgctgagtcacgtccgcttgggccattggcccattgagtaatagacgtatacgtttgtcttttacacgaaccgacaaataaaaaataataatattaaaattgtattaaaattataaaagtcttttttcgtctttggaagaaaatatatatatgtttttttcttctggcaagttttgtattttattttcttaaaatagtatatgattttttcattttaaactttctttgtgttttcttcttctcttcctttatttggtgaagaaaaaggaaagaaaaatctcaactttgattctctctccctctatatatactttatttattctccactcataatagtttcatcatctctttcggtctatgaaaaacattggaaaaaccctaattcctagtgttgcgaatcacttttcattgcagctttgaacttcaggtaattttaggttaatcgagctttttcatttgatgcatgacatcggaagatcaaatctttcataggtgattgtataatctaatcctaaggctcgttgaaatcgataattgtactcttgatctacttaaattcagaatttaaattcagaatttatacacagctactatcgttgagtcgaacttaatttgctagttgaaataatccaagcttcaagctttcttgtctagaagtttggtgattcttgttctctgaccttttgggctatatggttgttgaagcttaagtctttgttaaactatgatgataggttatagaaatgtagatcttggtctctgcttctactttttttgggtctgaaaaaaaattgaaactttaatcagaaatttaaagcctagttcatgcaattgctcttactttgtgacttatgaaatgagtttgtaagagtaaagttgaaatctttcatatttggatgcagtctgtgaatttccaacagca

SEQ ID NO: 1502 - DNA, 3000 bp, Unknown
  misc_feature (1)..( 3000): cDNA_ID_2137946_gDNA_ID_1620409_Annot_ID_156229 3000 nt of promoter + ATG
tgtttcgccacggattcagctagcttgatatgagtcagccaataagtagaggaagacaagtcttcaactttctttcgagtcactgatgatctgagattactagagacaggtgttgttgtttcattgaagcttctaggaacaatgcgtgatctctttggcttgacttcagaaagagaagtgacgctgctgctcactgatttaacagaagaattgcttgtgggcttgtttggaatcgaaagtcttcttggtggtagcttggttcgatcaacactcttcttcccagacaaatcaagaactgttgtactctgactaacagcagatacaactcgtgccctgagattcaaattcacacacataaatataatccataagacaaattacattgcaacgtttatataaaccataactgatcatcttaaactagcaattcaagatatgaatcaggagaaaatgaccaaaattctgggaaaattttcatcttctctagaattcagaaaatgaacaaattctagcatcatcaatgtctcgttgaatccggatctaggatcattattgaatcaatagtaccttctgggcatagaagaagcagagaaatcaggaacaggaggcttcccttccttggatctaagagccgatctgagaggatacctcagcttcgagtttattgaattacctgttcagaaattttcgaatcagaaaaacattacgaaaactgaaatgggaagtgataatcagatagaaggaattgaagaagatttaccagaagcagcagagctcacgcttttctccattgatttctccattgatgaacttagaaacttttaacgcttttttgttttgtttagactgagagagaaaaaaaactgaagatctcaatttgaaaaactgtgagagcggagaaatctctgacttataataataacaaaacaatctgatttgtttctaagaactcgtggatgacccctacattatttgatatttctcttatagcctcattattttctattaaaccaattctgacccattttttactctacccaataagggtaaatttgatgcttcatttgaaattgaattgattaaaagtttaaacaaatttatttgagtttatatatatttgaaaatattcatatatattagtttgggaacagagataaaggttttagtatgtaaaaacattagcttgggattaaaaatgaagatttctaaagttaaagggtctactttttgaataatccgtaaaacctaaatttctgttgcagtttgccttgagagcgggaaattggttgaaagtctctttgggagaagatagagagagagagagttactctgagccgtccgattcgattgatttaggaatctgagggacctcatttttccaaacgctccgttgtctgtggggtcttctttttgttttgtttatttttcgaaatttcaaattcaaataacgccgttgactgattgattaaccgtttgttatataactgttaagattgaggggcttctttaatatctgacgacccattaatgttttctcgatactgggcttcatttgggttcggtccaatacttttagtactgtgcttttttaattagaagaaaatggatctctaaagtctaaacactcgatcatctaaaaaaacagagggatatgagtcacaacgcttaagctaggttttgccagtttacaagtttatcctctgtctatctatttttgaccataacaaacaaataagaattttaataaattaaacatttctaatcttgtttgtattgtttagtgtattagtgtatatagtaaatcaaaagtgagatttttaaaaaaaataatattctatcgacaacatgcaatatttgaatttgaataagatggtaacacaatgacaatactaatataaaccataagcctatgttatagtcaatggaattttggtcaagctgctcaaaatatgttcttctttatttacgattattgctgccaaatcatatacctaaataagttttcaacaagctatccacataatgcttccttaaaataactttcataaatattaaagattttaagcttacatgaatggtaaaagaaatttcaaaataatataagaaactatcctacctattctcattgtctttgttcacatgtaaccaaatacaaagcgttggtaaaataaaaacatactcctcttagtgcatttgaaaggaaaaaaaaaacacatctgagtggatgtcatgttcttgttcttttttttttttttatctaatcgatagtgtcgctctattccgactttatctcactagaaacaatataattatttgtttcacattataaagaacaatattattaagaatgtatatttaaatatattctcgttttctgagtatgtcgccggtaattaattatcatatggtgtgtgcattactcagtctacttttcttttgtcaaatttctaattacgattaacttaacaaagcttgaactatagctcataatttttgcgtaataaattccttgcaaaatagtatatcctaggttggtaaaattaaatgtcaaagatacctttttggagtatttattccctatttgtaagttcttgatttgatactgtgttaaatgagaaactatttatggctcatggtgattattattaggtgtccattaatgatgatcatcaattcatcacctttacaatattaattcttctcaaaaaagtaaaccatgaaaaagtcaagaatgtcagagtcgttactatcagcgttaccaattccgttttgttgtcccttgatttagctaataaacaaaaatcaaatagatagttttccggtttaatctaacttggttcggttgatttttccggttaatctattggttcggtttaatcatccaaaaccttttggactgtatcaaagactgaatattacgagctttgatttttttagctcggagccgcttcttctttcttcatcttcttcctcctctcaataacccaagttttttcgccg

SEQ ID NO: 1503 - DNA, 3000 bp, Unknown
  misc_feature (1)..( 3000): cDNA_ID_1378800_gDNA_ID_1620409_Annot_ID_156222 3000 nt of promoter + ATG
cagaggactgagaaatagagaaatgtgagattgatgaaatcgaacggtcagaaaactaccaccaactttacttatttaggtttcagatcaagccacgtggctaaattacctattgactcctctcatagtcacggacacgtgttcacaagccctgcttacttcatatagtagtcttgcccaaaacacaaacagagaaagctaagaaaactcaaaaggcggtggtgagtactggtgagagtgtgagtgaaaaaacaaaaaaaacaattcaactgcaaaaatgagttccggaatcggaagtttagtgaaggtcatctttaagaacttcgatgtcatcgctgggtaatttaattagtattatttagcctgattatgattttttttctcgttttattttctccattaatttgatccttcttggtgtgcagacctgtgattagcttggtttatcctctgtaagtttcatacaagtatctctttattttcctgagaatatattatatatgtcaaatcttgagttctttttaatttggattttggtttacacagatatgcatcagtgagggcaatagagtcgaggagtcatggagacgacaagcaatggttgacgtattgggctctctattcacttatcaaactctttgagctcacttttttcagactcctcgaatggtaactttcacacaaaatctctaaacctttcttgattacgcaagctactacttatgaaaagagagtaaggtcacagtcacacacaatatgtttgtttctagggctcttaaaatttgtgataaaatcgatgacttggattttacctaccgaccttactatatgaaatttattaaaaagttggtttggggggtacatagatttacctttcttgtagtccaagtaaggtacttcaggtaacggatgagcttatgtttaacattcctagactgacttcaggagataaactgagctgtatgtaacggtggttcattgattcaattatatagactgaagtttcgagatttatggtatgatcaggatcccattatatccatacgcaaagctagccctaactagttggttggtcttaccgggcatgaacggtgctgcttatctctacgagcactatgtgcgttcattccttttaagcccacatactgttaacgtatggtacgtgccagccaagaaggatgacgacttgggagcaaccgctggcaaatttactccagtaaatgattccggtgcgcctcaggaaaagattgtgagctcggtatgacctcttaactctctattactctataagaccctatttgtgacctaatgttcgatctataaggcacatcaatctcttgaacgtttatattttcaggtggatacatcagcaaaatatgttggtcattcggcttttgatgacgcctatatctactaggctagtagctagtaaactacttccggctagttgtagctgagcatcctgatcttagtgtatcgaaatacttgttttctcctctttttctttgttttcgggttttatgaagtttgttgttactgctaaggaattttaatatcaaaataaatgttaattgagtgagttatataattatgtaataaaatctgagcacaaaaataatagtgaactaaaaggtaagagtctagactagctatgatcaatttagtatcgtatattgctttcttcctcgaccaatgatgagagaattcagaaacgaggttttgatagcgtagctcaccgctcagtcgctcacgggctcggagtagatatattttctttcaatattcgtcgacttactcgactataaacaagcagtatgaagaagagttgacactaaagaaatggtaaagccaaaaatcttatagctgtaaagagaataagaatgagtaggtgtactagccatatattcgttttcttaccacgttaccaaaagcattgtgtgtttgaaccggagctaattaatttgattctattcacatattgtatttacatacatcatgtgaagtctgtcatggaaataaatgtctcttttcatcgtcacgaaaatatgtttaatttgatgttgtcattcttaaatgattttctactttattgttaacaaaagaaattgatttcctaccttacacatatcttgttggtaaaatagacaactaattttaataccctcatctcaataaatgctatttacactaaataaagtctgatatgagaaatgttacagaatgcaataaacagaaagaaataaaaaaaaattgcaacaaaaaatcattctcaattggggaagaaaataaagtcgaaatgataagtttcataagaaatgtatattttaccatgtttactaaaaggcaagacccacgtgggaaggcgttacatattacacagtccaaatcagcatcgttattattgtgaactctcacattagctgttaccgaaactaaccaacaacaagtttttgcctctttgaggacatttaaatatagagaaattgtttctttctttgattttttaaaaaataaaagaaaaatcaaaacttagtctattaagcatcggtcattatcacaaatgtaatcctaagcatccgtatctaataagttaagagtaatttatccacacatagagttttttttttaaaaataattatttattttctttaagtgtaacgactaataaaataagttataattaaattaagaatcaaattctctctatcttttgcactttttcttctttgtctatctctctctctctctatctctaacctttgcttctccgtccttttctctgcttcagttttctcttcctaacaagcaaaacccgaaacagatcgaaccatttttttcctttagaaattaaacaacaaaaatcatttttttgtttgttttcggtttcacctaaccaaattgattctcttacctttttatatcacattgcatctgggtttccattagaaacaacaacaaacgaaaaaagaggcttctttcgtttcagagaggggttcaaaa

SEQ ID NO: 1504 - DNA, 3000 bp, Unknown
  misc_feature (1)..( 3000): cDNA_ID_2781806_gDNA_ID_1620409_Annot_ID_156211 3000 nt of promoter + ATG
aggaagaagagaacggaggtgaatcgaagaagcagaaggttggagaggaagagaagtcaggtccggttaaacttggtcccaaggagtttgttacctctgtggcgatgttcgattactttgtcaagtttttacacttttggccaactgatctcgatgttaataaggtaatacatatttgggtttactcttcgtctttgtcttttggctttgtttattgtaaagtttcaaattttttggaaatattcattcctttgctcgagacttatataggttaatctaagagctctgattgtgattattaagttctgtgatgtgtttaggaagatgttttatcaatgaatctgatgatgatcgtgctttgtatttaaactaaaagaaattgagaattgggttcgcctttgtattggtcatatgatttgattttggattcagtgtttggtgttagaattttgtttttgtctcaaattagtggttgtttacaatgattgtggatattgtattatgtttagggagatgattgtggatattgtattatgtttagggagaggattagtgaagtggagatagcttgtaaattggactcctttgcagcttttttactagttgaaaagttcaaatgtatcgtgttcttactgattatatgattgtggattgtgtgtgaattagaaagtttttttgggtcttgatgtcatataatggttagaagaatgaagttaatgtcaaattttgagggcacaaataaaagataaaacattgcatagtcatgtaatatattacagttgttgcagtttcttttgagcttccaactaactaactcgttgtactgaactttgttctggattgtacatttcagtatgagcacatggtgctgctagatctgattaagaagggccattctgagcctgaaaagaagattggaggaggaatcaaaaccttccaagtaagaacccacccaatgtggaaaagcagatgcttctttctggttagggaagacgatactgcagacgatttcagcttcaggaagtgtgttgatcaaatcctcccattgcctgaaaacatgaagactcctggagctaacggcaatggacatggtggaggtcgcggtggcggtggtggaagaagaggcggtcgtggtggtggtagaggagggagattcagaagatgaatatgctgacacttgatgccttatttcaaaagaaaattttgaaaatttcagatttagttcttttgccaaaaactttaaaagttatgatcttgtctaatgcaactgctttttgttggagaaaaattgtcagtttatataacccattattgctgaagaagaagaatattgtccctactatcttgacaacatcagaaaaaaacacagacgcgtcaatagaactaaaaatctggttgatctagtttttaaaaaccaataattcaaaaacgaaaaactcaaatcaaaatctagatgaaaaaaaaacactttccattgatagtgtagtgttgatctggttgctaaatgataatgttaaataaaaagaattggggaagttatgaaaaaccgacattttgactttggtaacttactgtgtgtgacatgttcaccgtttacgacccttctaagagaaagacaatgccctcaaactaaagctgtcttaaatcttaaccctgctaaaaaatgattacatgaagtgataacactggttggcacacgtcttggaataatggattattttgaaacacattatgaattataaagaaacattatccgatattcggtattcggattaatattccaaattgtcttcttacacaatatacaaatagacacatacacaaattgtcttttgaagatgcaacaaattttgttttgttaagccttcttagatttaggaagcttcttaactacgatcttactgcaacacaatcagtttgtgaaatctatgatctgaccaagatgcaggtgagtaagggacctacagtagaagttgacatggaaaaaaggcagagtttggtaaatcataaaatgtggcagagacctttttggtaatagccaatgagagagcacctcatatctattaccttcttctgcagtcttcttatcttaacgtacaaccgttcacttaatgaaattcgtcaatggatgttatatggttgtgaagttttttttttgtttttttttttataattgattttctattaatggttgtgattaatctttgtgtataaaagaagggtatatgtttctccaaaccaaaaagtgtagatcgttttcaaatgaaggatttttatccttctaccaaccaattaagaaattgcacgtaacaagacagctctcgtgtgagctgcaccaaagccatccccgcgatgctgacatttacctacccaaaagtttctaaacagtttacataattgtttttttttcttcaattcaacaatagatagataattgttaagatatgttagaaatcttatatcagtattatatataacgaagcgtgtttataaaaacactttttctgaaaactttattgcatcctcgtaggagcacttcgttttttatcgttcaaacttgttatgcatttgttccatgtatataactacataagacctttttgatctgtttggttaacggaaagtttagtgaaaatctaaaacatataaaaaaatcgattcttcgaatagttttgacaaagtttaaagaaaataacaaaagattatatgctatgggttttaatggggtttgggagaaaagtaaaatatcagaggccacataaacttgtggtctagaatcaaaccaaaatgctgacctggcatccacttcactttttaaaacgtatcaaaatcccaaatctcacgatttccaaaccaaaaatttccaaactacccaaaccccccacaaaacatcttcgaagagaaacaaaaaaaaacaccctgaaaagaaaggaaaagagacacagagagtcagaaacttacgagtaaaaaagagcacatcttaggaaaacgataataatg

SEQ ID NO: 1505 - DNA, 3000 bp, Unknown
  misc_feature (1)..( 3000): cDNA_ID_2138015_gDNA_ID_1620410_Annot_ID_156243 3000 nt of promoter + ATG
acatgttgtagtatttaaagtcactgaaactacctaacgctttttaaagtcattttcaattttatgttccaacatgcaaaataatacagactttctgttttgcgcatgtttttgaacttgaaacttagtggtagggtctccccaagaaccagttacactgttacaggcatataagcgtataattaattaatatatttaaatgttcaaaacaaattgaaatcaaaagttcttttcatatatatatatactagataaggtccgcctatttaggcgggtgtacccgaaattttcaaatattcgaacgggtctaaacttcaaaatctgaaaaactcgaacccaaacccgaagaggtatccaaacatatttcaaatataagtatatattagttatatttatacttatatatagaaaatattaggattttttggatattttagttatttttgtgtatttttagatatattcaagcaaaactactcgtgttgttttgggaatttttgaaattttaagtaatttaatagatttgcacacaaaatttgatatttcaatatataaataaactcgaacccgaacccaaacccaaaccgaacccgacccaaaatcttaaattacccgaacgggtcctaaacttctaaacccgaaaacccgaacccaaaatactcgatccgaatacctaaacgcctagggctaataatgaataaaaaaaaagaaatccacaaaaatatttagaaaccaaacattgttgaaaatatattttctatatatgccgtaatctcgtaagttaattttacatcatgcaaattaatattaaatgagttaaaattaataaatgaaaataattgaaaagttaaatcctataaactaagctatttttctcaaaatgttctattttcacttatgattacatgagttaaagacaaatttgttaattttctttttgttgaataaatgttaattgtttataaatatatagacatataaattagtatatgtaaatttgtttactttttaagattttctattttttagagaataaaataaataaattttgaatgacacatgtaaacatctaatcgtttgacttgacacgtggtacaatcctttgagttagcaactttgaaaaccatactttatataataagatatttatttttccacaagttcttttcttataatgaactggactataatataaatttgaaacaatatgttctttatttgtgggcaaaactaaaacggtaaaacctatgaagccgtttattttagaaaaaaattgacagggtcctccactgatggctgttggtaacacattcatggttcatggatgtaacgtttgtcctctgacccaagtcatggcctctcccctttcttgtccttttcggtctttttctttccttttcacacagtcagctttatccttgtcctcactttacatttacaactttaccctcgtcttgattctcgtctaaacgggtccacaggatggacttttaaagcgaacaagaaggcccatgaaactttttgcttcgttttccctaaaacaccctataatcttagacctacaacaagttatacacgtaattaacggcggagattagggtcaatttcgtcatttacataaataattattgtcccaggaagacttataaaaagtcaagacagttaagttttgattactatatgattatatgaatcatatggctgaatattcagttaagttcgttttcaaaatacacatatagttataaaaggagttgttttatgtaaaaatataaagccttttgttttatgaaatgtataaatttgcagtgtaccatttttaaattgtttctgtcatttatgtttacgaaattagaaatataaagttttttggttaggcaatgataagacaaatcaactttcattagtgttaactgatttaacgatttcgttatctaaacattttttagattgaagagtgttttgtggatcatcttataatcagtttctttctgtatttaatcacataatatgtgggtcatctttctgtcaagtgtcaatgtggtttcatattttttaaggaaaatcttgatttgagaatgagtaaaaatatcttacgaaacctaccattttaacgaagcatttaatgtgttagccgaaaaagttgctcaaattgaggtcttatcgtatctatgatccgttcatttgtgaacaaaaaatgcttgtacacaacaaactgagatcctagatatataatgaagacatactttttctcctaagaaatagatcctaattaaatgttgacaaaagaccggatcaatggggtcggcgaaatacttggttataaaaaaaattaaaaaataatactactaacacaaattttaactatacaaacagagaaataaatatttatcaaaagtcaactaaaaataaaaaatcctaggatataacccctacattttgattcaatacgtatttaatttaaggtggatatatatacttttatctatttaaaccagatataatcgaatgaaataaagagctaaccggatgtctgaatatatcttaaagggagtaatttgattaattaaaaagttatgcgtaacaattttaatgaaaagaaaaatacatgttgaagaactcaaaatagaccaaaatacacacacaaaaaaagttttgttttttaatatcctccaggaaggaaacgagagaggaaggtggggctttaaagagagacccgtggaggctctactgaagcgatgcgtggaacaaagctgacacaaaatggccacaccaacttctccttctccttctccttcttcttcttataacaacaagtgatacattctcaatctctgattcttctgattctcaaaaccctaatttccacacgctttctatcatttccacccaaaaggtaacgcgctttttatttcctttcctgcattcataaatttgtctcctgcatgttgaaaaaaaaaaatttacatcgagattcgtttttattttttagagagagat

SEQ ID NO: 1506 - DNA, 3000 bp, Unknown
  misc_feature (1)..( 3000): cDNA_ID_2106824_gDNA_ID_1620410_Annot_ID_156247 3000 nt of promoter + ATG
ccaatcacacattttcatttcggttttaacatatactacaactttaccataaattacatagaaaacctatgagcactcaactttcttttccccggttaatgttaaagatcgaattacattttcggtcttcttttctttttgttctttttcgagttggtgatagttttgaaaaatagtgtccttattaggtgtgtctacgaaactttgagacagttggttggatgggagttctctcttgtcctatgcttcatgccctctcccgtcttgtaagttgttactgttttaatatattattcctaagtttttggacacatttgagttcatataaactagtacatcatgtacttttatattaatttattatttataaaaatatgaattttaatatatgaaatcaacggtggaggatatatgagtcgaaccattgcctattcgagaaaacaaattaagaaataaagcaacaacctaataataatggatatgaaactattttaagcgtgttgttgctaaagtaaaagacaaaatctcgttagttttcagttcttattgattagcatatattaagccgattatattgaactaaaaatctattgatttatttctagatttagttaagccatatacgtacctacatttgaaatccatagagggtaagtatatttggtactatatactattaatgctctttatctagttactgttcagctacaggtgaaaatcaaatgaaattagcattgttttggtcaaaaaaagaagtttagtttatatgataacgaattcgataggtaagtcaacatatagtgaatgccaacccatgacatcaatgcacacattaccatttatttccttttactcttttatggtaacgtaaagccaaaatttatttctttatttcttgtagaaaatttaggcattaataagaaatttatattaacatcaatatagtcgtcgtattcatgtttttattgtgcatgtgcgtttgatgcgacatcccattcaatattagttaactaataatacatgcatgaacatgtgtttgagaattttgtgatcatgatacggggtgcttcatgcatcatcatgatgatgatcatcatacatgttagtttggaagtccaactttcttttctaggaaagttacattcgagttcgaggaaactaatggatttatagataaatctcatagaaaagtaacttaaagctttcaacacgctcataaatctcatactctttatcctttttcttacaataaaatattgcctggatttttttttttttttgtagacaacctttttcactttacaaaaataaaaagtttatcatattccgttaatttagcgtgtaagcagctttctttgtattccaaagtgcattgaagtttttaaattgaaataattgaactaaataaactaaatagtggtggtttagtagacctagtcattcgatttacgaagttccactgctaattctacattttgaagattcattcgtttataacatagttaatttgtatagtcggacaggggttaaaagagtaaaagataaatctgtagattaattgaaaatagtaaagcaagaaagaatggtataattcaaaggaactcactaaatcaattattgtttgctgatgtaataagagtttggtcgagagagataagaaaatggttcacgaagaagacacatgattttcctcatttacatcgtttcgtatcaataattaaagttagttgcaagacaagaggtcgttcttcatgatacattttggttaatgaaatgtctagcatattttaaaatttcaaatggtttagttaagacaatattaaaataaattatggatcaaaatgattccctttgtttttttttgttgcataggcttgatgattgtcgttggttcttaccacgtgggctttagtagggcatgccaagaaaagtggaccaaaagatcataaaagaaaaaagataaaagataaaaggagaagaagaaaaaaagataaagaaaaaggtttaaaaaaagagaaaaattaaaaacacattggaagatgttatagatttataatgcacatcatcaattggataaaacattaaaacgaaactgtaaccgaatattcgaggattctttactgcatgcatatataatttgttgttttcatgaagcactttcttcagataccttattattacatgcagctatgcaaaattatacgtttacaaatccaagctagaacatataaaatattcatttacatggtacatttttttctttgggtaccatggattgatcaagaacaaaaagttttaggcacatgtttgaagattatcattaaagcatatctatatcaagctacatatttgaagattaccatctcataaacaactaacacggattaaagaaagtaactaaagatacattgtgactataaattttgattgagtctcatattttgtagtgtgtaaaacttttctccatcaacattttgaagataatgtccatcaattttgtatagaatggaacttcttttcaataaatattcgtttgagtgttgttttcctttgatatgaataataaaaatgttttttaaaaaaaacttcaatctgaaaaatcaattgatagttaataaaaagaaggtcttgcgaaaaacttatttgatatgtctattgccaaatgttttcaatatgatgtgtctcaaattgactcatcgatctttagtttagtcctatttcttggaccatatagattctttggatttgttggactatgatatgaataaaagtatactaattagttcccttaagttatggaattaaaaacacattacaatattagagatcaatttaccccatacttacaatattcagaatttttattattatttttcattttaggacttatatcatccatcatgttaatccagtggtcaacaaaaaaataaattttaatcgattagattcattcaaattatcgattgaactatcatcatttctaaacaaatttgaccaatg

SEQ ID NO: 1507 - DNA, 3000 bp, Unknown
  misc_feature (1)..( 3000): cDNA_ID_2138062_gDNA_ID_1620410_Annot_ID_156257 3000 nt of promoter + ATG
ggaactggccgttttacttatcgttgtatcatatttgataagattttaattttctgggatttttttttggttttcattgatgtatctaataaatttatatatatattgattgggcatacaaaaacctcttgtcttcatgcttcttagattatgcgtttttcttttgatttaatcctttgttaatgtgtttctgtacgtatgactcattagtcatttagtagttatgaacaggttcagtgtagctaagctccgccgtgttagcacttaaataaacaatagtaaaatcaatttcttatgataccttaactatcttcggaaacatatgataatatcgaatataaacaactatttattccacatcaaaagcatgcactaggcgatttaaaactaatgatatactattatagcattagttaatttgtattaacgataaattaagataactcgaaagagtaatcttaggtttgttgatgataggcttgagatatgttagtggcgaattagaaaagattcagagggaattgtacggaaaacgagagagccgtgccgtcgcgtaaaaacagtgcaaagcaagaatagacgagcgatttgcgcagaggacccacgtgttagtgacgagtctcatgcgcgacatgtattccacgtggcttaagatgtgtcccacttcacgtgtcgtaacgtctatggctgacgtacttataatatcgaagtcggttcgtcgtttactctaacaccaatcgctcgtagacgatttcaaagatctatctagccgagagagaacgagtacggattctctgattgtgggccgttggatcaaagaaaactcactgctcgtattggtcgttggattggattggtgacactaggaatcaatggtgatgatggagaggggtccagattaggtaggtggtggtcattgtagggaaaacacttgagaggggagtaggtccattaggacatgtgcataagttataaaatctcatacaaatcatacacgggaaagtttggttgggcggttgggagagtttgggattgtctgtgggttggtgtatgactccaccatgttcccctaatcatttttccttttattatttcatgatttcttacttgtattttctgttttttttttcatcgatcgactcaattgtttgacaaattagctagaagtagttcatggacatttttattcaaatgcgggtttagtcctatatctataatgatggccctaagagtgataggtttgaacgttttaatagattttttcgatagcaagactctttacacttcgccatttttaacattttttctttggctattttgtagaatcttctagaactcttaaaatcttgtaggatggtttagagattctaaagaagtgcggaagaattcaaatgatcattagcacttttcagattctcctaaatcataaatcataattaacttcgtatcaaacacatttactttcaaagatcctaatctaagccatgttgatggaaccattgtgatggtgcgacttggtttcatgcatgttatgatgtaatacgttctcgacacgtgaattatgtctgaatgaccactggtcaaagtgttttttatgttgaatatgcgtatagaatttggggaaaactgttgaaaaatggttccaccaacaaaacctatttttaatctcacattgaaagccatacgtatcaatggacgtcgatatctaaatctaagctccaaagagccgatccgaaaccaacacatggctgaagtgatcacctgctaagatagaaaagattagtgtaggaatctctttagtaaatgtcgaagttgaagattaagtcaccatcagttgacaatgaactcagagaactccaagtatcatgagacaatgacaattaatgaagaaattgaaacttgaaagttggaacggttgacgtcggtgggattaatgtcacatatgtgtaacatggcaatagaaaatactaaaacttaaaatgaatattgaaaagaaagtctcaattagtacgtatgtaaattgttcaattgtgcattatcaagtttacattagctgaaatgacaactaaatgaaatggtgatgcgatcgtagaaaagataagttatagacaaatttagagatttaacatttgcaaagaatcacttttaacatacaaattttgtattgtggattatcaaggtaacattataattgattagctcaaacttgtatttaggtatagtaggttgctgagctgggattacaatgaaacagctgtattgaaagacttggtaagtggtccattcttagtctttgaatcgaaggcatggttcgatcggaactcgtcctaaccgtatttcgcattactatttgtatgtaacagagtctaatctctcttaacttaacaacacaaatcccataaaaatggatagaactagcaaaataaaaatcaaagaattttactgaagttactgaactttatgattgtaatgatcaacagtatcgtctttacacaaaaaaatatatgaagaagatgatacacaacacatttcattacaccatctgatccatctccatcttcaagtataaactcattcttatttagtttacaactattttttgtcttttgggaatcttataaattatttcggggtaattaacgtcaataaaataacttacacctaccgatataagactaaggtgaaaaagtatacgttaagaaaagtgaaaaactttaacaaaagaaaaaattcaaatcagaatcactaacccggtaaaaatgtaaaaccgtttcccggacccaaataaggacctggataacaacccagacccgaaattaagtcggatccggatctccttgatttattttttaacatttttgtctttcccctggaaatttgaaactctctcttctttttttgttcttcttctcattggttgatcgatacgcgctaaatttctagaaatctcagatccataaaattttccgaggagagattctctaatcagagaacctcaca

SEQ ID NO: 1508 - DNA, 3000 bp, Unknown
  misc_feature (1)..( 3000): cDNA_ID_3062724_gDNA_ID_1620410_Annot_ID_156255 3000 nt of promoter + ATG
aaatgaaaaggaatgttgacgccatctgtacataggtgcacacatacaggtgtccttagctaggactaggagctgctggttatttcacaatccatacggaccataccgtcaaatacatgtatatatagacccactttttcatcctatctatataataaattccaaaatgtgtgatacgagcatctatctagaaaaattttatgagtgatttgtttagcatttagagctataataaaataaaaataaaaagaatatataaaaatagtaagagcagtaacatactatttttgggcagagatactatactcttaacaaatatgaagagtgtttgctaaaacgacgagccatgtcagtgagttaagtggaaaggtcaccatcaatgctcaaggttcagtcgtcggtggtcggttgagatagcaaagtcttcttaaggcccatgggtcctagaccgttatatcatcatcacctctgtcacgtgatcattgggcccactaggcccatctcccatcaacatctcacagctctcgtctatcatacttccatttattgtacaaaacacacgcatactcacatacatacaaatacacacacatacggctggataacaaacagatcgtgagatgttttgattttgatagagatatgaaaggtcgatgtgttttgtgtagaaatgtgatttatattgaaaatatcgcagatagttgcagatgatgatctcgatagatcatcaattcattgtctaaaagatcttatttgtgcgtaccaaataatttgtgatattgaatgctttcttttgatgtaccaatttatctttttgtcgtgttcaacgatcctactatattatttggaaagtacattttaaatgtaaccttaatttttataattaattacatgacaatgccattagaaaaatttaatcaaaaacaaaatcttttaatgacgtcattaaggttaccaaaatcatttaacgataatattcatctcttaattatagggtttattggatctaaagacggatcatcaaagatttcttaaactgaagcaaaatatactgagtattcaaatatctgcctgctaccaaattataaacaaataagttcgtaaaacaatttaatattttatatacgaaatcaattaaatcttaatcacataaaaattagcacaaaaaaaaaatattcaacaattgaaaaatttatcaaatctttgtgttatataatttttgatactatattcgaataaagtgtaatataccttttcaatttgtattctttaactaatttaagctagctaatatatttgctaatcttatacctatcaaaaccgactatcgttttttatctctatagtatttttgcaagacttttttggtggatttgggtaaaagtgcattcgggtcatatagtacattcccctattaaataaatatggtgcactcctatgttattagctaaaatatttagattataattcagagtcatatcataaattaaattcatattaataaaataaatgactttttggcaaaacggatttggagggacgggtttttgaatcaacattaataaaaaagtaaaatataattaatccaccgtttcaatacgggttaaatctttaatttattattttttaagatcactaatattaaacctatcaaatcatcctaatttagaaaaaattatataaaaccaaaaatgttatgtggtatgtataatgttactatatataaaattaaactataaaatataaatatattagagaatgatacaaatttgaaaaacttttatatataataaataattcttaaattttaaaaattactacttaaaaaaaaaatcacaggacgggtaaagaattacagaacgggttttattttggaattgggttatatggtagatgtatttgaattaatatttataaaattttaaaatactattaatatgctgtttttataggggttaaaacttcaggttttttaacaattttctcatggattcgtggtatagcgttccttaataacaattataaactgtaaaatataaatattttataaaaataaaatttgcaagttttaatatatattattttaaaaaaataaatcataccgcggtataccgcgggttaaaatctagttaacatatataggagtaccaggcggtacatatcttacaataatatgattttatggaaacataatcatcatctttttgattagaaaaacaaaaaaatcatcacgccatatgaattttactagattatcatgtttttatgccctattttaatttattgaatgactttttgagtacgggccttctgatgtataaagtttagtaagatttgtaaacctattcactcaaattcaaatatatcgatgaatcgatcacatatttatgcaatgcaacaacagcaaacgctaactatcatggttttattgactatttgaacttacgggagtcgtattttgggtgggtcttaggttataagagcgccttattttcctttaacgatgataacaaatgaacgagagaaaagctttaactctgtttttgtaatctttgttttttaccttctttttttagcaaagtttacagacttaggttcaacattttgcaaaaccccaacacttcattctaatgaaattcacattcctatcagaaaaaaaaaagagctttgatttttttccatatcaaattagaaggcccgtactcaaaaagccttctaaggtccaacctcaatgtttgaggactcatgacttctggttcatgagattgactgtatatgaaggggaaattacctaatttttttatataaatttataatttttcaaaaatacaaaaatgaatttaatatagaaatatataaaaagacaaaaacctagtcttcataaattgattctaatataaaaagttgaaagaaaaaaaaaaccaaagatagtacaatcatatagtcagagtcaataatagattgagttttcaaaaagaaaaaaaaaactgaaaacgtatg

SEQ ID NO: 1509 - DNA, 3000 bp, Unknown
  misc_feature (1)..( 3000): cDNA_ID_3062738_gDNA_ID_1620410_Annot_ID_156246 3000 nt of promoter + ATG
atgagaattaagtcagagaggagacgtaccgtacatcttccgcatcctaaggacagaacccaatgctgtgatctgtacggttataaaataggagtactactttaacagataagtcaattaagttatcgttaatatatttattatttaagcaagtcaataattagcacctatcataaatttttatatgagcacgataagcatcaaccactttattggtgaataatcccacgttgtttcgtgaaaattgccgtcattggagcgcgactattacattatacaactaaaactttctgaaaatttacaaaaaggagtcataattattcacgctgaataaaaagtaaatctgtttttaacctacaacttttgactccaatctattcacaccgtttacttttcaattaatccacttgaaggtatatactagtgatgttcacttcaaaagcccgtatctacgaaatccaaaccaaattgaaaaatccaatctaaaaacttatctgaatctttttatctgtcgaattcgttgtaattttccctatatcaaacaaattacaacctgaaccgggcgaacaaaaaaggaaaagacaaaaactgaaatattttttttgtatagctttttgctagtgctaacgttaagaaattctcaacattgtttgttttgtctgttaaagttttttttatatacaaggagttccactaaatagtattatgaataatagataattaagttttaattatggtaatttgatgaagaactagactctatttgcattgtagttttacgtatacatgaaaagtagaagtctaccaagttgagcaataaacattctataaacttgagaagtcaatgagccaataactcctgtaatgaaaaatagttagagacaattttttttgtttgacctttccacaattttcgattcttaacctataaacattggacttttttagttgccttcccctacatgtaaaaacaatatatatatacatttttgcagccattttgtgaaataaattctagagttggaacttatttacaatggctgccactggattttaatgtttgtttttgataattagaaaaaaaatcttcaaattaaatatttgacatttaacaatcttccctaaatctctccacattaactacacggttagttactaaaattaaacttccaaaatatttaatatcatttaattactacacaattatcatttttgatattgtttttctccatgactataacaattcgattataatcatcaaaccgtagagatatttgatagcatttaattactacaaaattataaaatatttagacaataattcataaaaatatcataaataagatcaatattaataaaataaatggtttttttacgggacgggttggcgggacgggtttggcaggacgttacttaataacaattgtaaactataaaataaaaatattttatagataaatacaatttgcaaagttttatgtatagtaactttaaaaaataaattgtttccgcggtgtaccgcgggttaaaatctagtatatatatatagaactaaaaccattacaaaaagaaaagatttcgcctttttaatgatggataattctaaagcctataagacttaaacttttatttaaaatctacagtttgttgcccaaataaaatgtgataagtatagagataacaaaatataaaattatttcttaccaaaaaaaaatatatatatatatatataagactattttaccgtaatttattgatgattgcagacaatacaagatatctctagtttacaaaaatatcatcaacaatattcgagagaatagttcttttgagtatttgcggatggccggaaacaacaacacttagaaatcatatttagtaaagaattatgtttagagtttagactttatagcttatatattatattgagatgatagatgattataaggaaaaacataaggaagtcaacttatcataacgcttcattgtaaggatatgcgaatatcaaaggcggaaagatttagaataagtgaataacccataatttcataaacgttagagcatttttttaggaaattattttaagatagcaattatttcatttggtgagtcgaccacatggaatcctcaagagacaaatgaaaaataattagactttttgacgatttttgccttcattgatacgtacggcctcttaggctttttagctatttccaatgccaactgtcaacattcgtatctctttcgccattttagtgaaattccacaaagtcattatctttgatgtatataacttgccaggctgctactataccaaatagatttataaatattatttttagatttcttttccatactttttaattctcaaacgaaactttatgcaaagttgaaataaagttttcttctgcatttcacttaaaattataatttgtcaaacagaagtgcaaacattgattttctgactgaaaatttttcaaccttacaaaagttgcttgaactttgtttagaaaaaagaaaatactaatacttgataaaccctcacggttcctattttaaaaccaaaaccttcaaatcaaagactcaagaatcaattcataaatgtgtgagacaaaactcataacccaaatatggtacacgtacgtatgaaacgtacttaaatgctacaaaagaataatatgtttagttctcaaatttaaataattttttccttctatcattactaatcaaaattacaactcatatctatactaaatgctattatcagctaacaataataaaattttcacaaattggtaaagtccttattaacttttacttatcttattcaaatctcattattggacccacctaaccctacccaccatatgatattggtatcccctctggcctctatataaactttgcatttctctaatctccaacttacaccaacaaaacacaacaaagaccattagccttctctcccactcagagtctttcatctcactctcgccttaa

SEQ ID NO: 1510 - DNA, 3000 bp, Unknown
  misc_feature (1)..( 3000): cDNA_ID_2137973_gDNA_ID_1620411_Annot_ID_156263 3000 nt of promoter + ATG
gaagccttaaagatcttgtgtcaatgtgctttcggaaaaaactcggcaccagaaggatacaatgatctagctgttgaagttgtggaacttgcaggatatcttcctttaggtctcagcgttttaggtgcatctttgcgagggatgagtaagaaagagtggataaacgctctaccgcgacttagaactagtttgaatgggaaaatagagaaactactaagagtatgttatgaagggttagatgagaaagataaggctatctttcttcatatcgcgtgcttattcaatggcaagaatgttgatcgtgtgaagctgttgcttgctaagagtgcattggatgtagaatttggacttaaagttcttgttgacagatctcttatacacatagatgctgatggatatatagtcatgcattgtttgctacaacaattgggtaaagaaatcactcggggacagtgtctcgacgagcccgggaaacgtaagtttctagttgattctttggagatttcagatgttcttgcagatgaaaccgtaagctttttgagacatgctttccatccaagtcctactcatcacaaaatccacttttagctaactaattgccttctttcttaattgtggtacatttgcagggtacagaaactgttttaggaatatcattagatatgtctgaaattgaagatcaagtgtatgtaagtgaaaaagcctttgagaaaatgcctaatctccaattcttgtggctatacaagaatttcccagatgaagcagtcaagttgtacttacctcacggtttggattatctaccacgtaaacttagattactacattgggattcgtatccgaaaaaatgtttgccttctaagtttcgacccgaatttcttgtggaacttactatgagagatagcaagctggagaagctctgggaaggtattcaggtagcttcttattatatatcttaattcttggtctcctcttataaaatgcctttctatttatacatattgttttgctatctatgttctcagccactgaaaagcctcaagcgtatggatctgagtgcatccacaaagattaaagatattccaaacctatcaagagcaacaaatctggagaagttgtatcttaggttctgcaaaaatttggtcatagttccttcgtcttgtctacagaatcttcataagctcaaagtcttggacatgtcttgttgcataaaactgaagagtctgccagacaacatcaacttgaaatccctcagtgtccttaatatgagaggatgctcgaagctgaataactttcctttgatttcaacgcagattcagttcatgtctctaggcgaaactgcgatagagaaagtgccttcagtaatcaagttatgttctcggcttgtctcattggagatggcgggatgtaagaaccttaaaacattaccatatttgcctgcaagtatagagatcgtggacatataagacaggagtggaactactatacatcgagcatcttcatataccatacattactgaacatatgtatcataccgtacgtttgtgtaattgaaaaagtcatattttcagtcaatagattgaccagaagcagaggttttacgaaggaaatctttttttttttttttaagcaaccgatagagacagagaagaagagagaaatcgaagcaaatgatctcctccacgtagactgacacatggcagcacataattcactactcactagtttgactcttttggagaagttggaaggtggctagaaacattattggccatattcttcgagttctatttagggtttctaattattttctcgattttctttattggttttggcttcttcaacgatttaggttccgttgatttatgtttaggtaccagcaaacataatacagtaacagcaaacaccgccggaggtgctaataattaagctcctgttttcaagccattgtttttttcccctttttgtaagggttttactaatatatttaaagatttttctaaactcaaggtctatattcatgaatttttactttctttcttacaatataaagttaaaaagttgaaagtaaacttcaaccatgggatatatatacccttgtagtccacctataagttagaacgttagacctttatttcagaagaacatgaacaacattgaagaaaaaacattcaatttgttaaataggaactttgcaatgaacctgaaaacaaaacaccacttgtaagacttaagcaattgttttaaagaatattaaacccatatcaaatgttggatgtgaacttaggagaaatagtcctgctttgtttgttagcattgaatctcacaattaatttaactgacgtggtcttctaagcaaatgcatgttcacttattggatgcacattttgtcttttcaagacaagtcttgagaagcaaatggcctagcgaagcaagcttgcttgactcattgcatttactgtcacttattggagccaacttcacttacaaaatgaaatgaagatcttatctgaattatcgtgtcaagtctctgactagtcaaagtgaacatgtgccctccctttgcgaacggagatcttgataaagtaataagattatgtatttggatctatggctaattaacagatacttttaatcaaattttatccattggttgctatatctagttgcactaaatcatcttttattgacgacacatcaacaaagttttctttttgtcttctgccatattatgtaggttgatgatatgctgaatgcattttctaatagtaattagagatattctttcattcaacagactttcacaatttgacattttaaattattaagtatgatgtggatctagatctgatatgtaaaaaaacaaaatagtgataataccaacggagatgcaatattgcaatgtatgaaattgtatatcttgagtaattcttaaagtgtatatatattgggtggtcttcaatttgtagaaacatacatcaaacctaaagcagaaaagaaatg

SEQ ID NO: 1511 - DNA, 3000 bp, Unknown
  misc_feature (1)..( 3000): cDNA_ID_2137985_gDNA_ID_1620411_Annot_ID_156266 3000 nt of promoter + ATG
agatggtgaagatattgtgcttgagtcagaagatacaatgagttgggcttcggcgccgcgatcaccgttaccggaagttatcatttcaagatctgtatccggttccatacccgaaaccaaaaacggaccacaaccactacggagaagcgtatcggaaactgcaagctacacatcagagatctccgacgtatcaacgatcgaacgatccacgtttgatttggtggagaagatgcattacgtcttcatccgcgtcgtgaaagctcggtctttaccaacctccgggagtccagtcacaaagatctcactctccggcacaatgattcaatcaaaaccggctagaaaaacctcttgcttcgagtgggatcaaacgttcgccttcctccgtgactcaccggatttatcttcctctccaattctggagatatccgtgtgggattcatcgacgggaatcgaaaccagccaattccttggtggaatttgcttcgacgtgtcagagattccgctccgagacccgccggatagtccattagcgccgcaatggtaccgtctcgaaggtggtggagctcacaacagtgatctaatgcttgccacgtggacaggaactcaagcagacgaatcattccccgacgcgtggaaaactgatacagccggaaacgtgaccgcacgagcgaaggtttacatgtcgtcgaagctgtggtatctacgcgctaccgtgatagaagcacaagacttgttaccgcctcagttaacggcgtttaaggaagcgtcatttcagttaaaagctcagttaggttcccaagttcagaaaaccaaatccgccgttactcgtaacggagctccgtcatggaacgaagatctactcttcgtagccgccgaacctttctccgatcagcttgttttcacgttggagtatcgaacatcgaaaggaccagtcaccgtcggaatggctcgcgtgccactcagcgcaatcgagagacgcgtcgacgatcgcttggttgcttcgagatggttaggattggaagatccaaacgacgagaagagaggaaacagatctagagttcacattaggctttgcttcgacggaggttatcacgtgatggacgaggcggcgcacgtgtgcagtgattaccgacctacggcgaggcagttatggaaaccagcggtgggaatcgtcgagctcggtataatcggttgcaaaaatctattaccgatgaagacggttaacggaaaaggatcaacggacgcgtacacggtggcgaaatacggttctaaatgggtccgtacccgaaccgtgtcggattctttagatccgaaatggaacgaacagtacacgtggaaagtatacgatccgtgtacggttttgactataggagtcttcgatagctggggagtatacgaagtcgacggtggaaaagaagccacgcgtcaagatctaagaattggaaaagtacgtatacgtatatcgacgctggagactggtaaagcgtatagaaatacgtatccgttactgatgttagttaacggcggcgttaaaaaattgggagagatagaattggccgttagattcgtgagaacagctccaccgttggatttcttacacgtgtatactcaaccgttattgcctttgatgcatcacattaaaccgttgagtttgtttcaagaagatatgttgaggaacactgcagtgaagatcttggccgcacatttgtcacgatctgagccgcctttaaggccggagatagtacggtatatgctcgacgccgatactcatactttcagtatgcgtaaagtcagagcaaattggcttcggatagtgaatgtagtcgccggaatggtcgacgtggtgcggtgggttgatgacacccgtttctggaagaatccgacatcaactttactagttcacgcacttgtcgtgatgctgatttggttcccggatcttatcgtaccgacattagcgttttacttgttcgtgattggtgcgtggaattataggttcaggtcacgtgctgctctaccacatttcgatccaagactctcgttagctgatgcagctgatagagacgagctcgacgaggagtttgacgtcgtaccgagcaaccgaccaccggagatggttcggttgaggtacgataagctacgaaacgtcggagctagagttcaaacgattcttggtgaagtggctgcgcaaggggagaagatgcaagctttggtgacgtggcgtgacccacgagcgactggtatattcgtggggctgtgtttctttgtggcgttggtgttgtatcttgtgccgacgaagatggtggctatggcgtcagggttttattacttccggcatcctattttccgtgatcggaaaccttctccggtgttaaatttcttccggcgactaccatcattatctgatcggctcatgtaatattgtttttttttttggaggggatgtatatatagtttgggtcgtttaaccttgttgggccttattgggttataatgggccactaaatggatttttatatgatttcctattataggtgctgtgtttgaccatgtctaaaacaaagaagtgtttggtatgacaaaattgatgaacctactttttgagcagagtggtaaatgtgcggaaataagcacacaaggaaatcgttgttggtgactaacaaaaggagttatccactgcccaagcattaccaactaccaccaaccaaactcaatttggaaatttcaaaggtccattagtcaaagcagcattaagtcattcagtaatcaacaaatatattcatatgaaacccaaaataaaataaaataaacacttttcaagaaaaaaataaaatactgagtactaaactggaaaccctttataagcaaaaagaccaaaagttaaaagttaattaagatttggtttaaggcgctttgctttattagagaggaaggaacgaaccatcatagaaatctctccttcgttcaagtttttctctactgtgttggttgagcaatcgagtg

SEQ ID NO: 1512 - DNA, 3000 bp, Unknown
  misc_feature (1)..( 3000): cDNA_ID_2137993_gDNA_ID_1620411_Annot_ID_156269 3000 nt of promoter + ATG
atctcttgtaaatcttttaaacccttttaaaatctcttgtaaatcttttaaacccttttaaaatttcttgtaaatcttttaaaacccttttaaaatcccttgtaaatctatttcctgccaaaaacaaaaattttacgggaaaatattttcgaaaaaaaatttggcgggaaatttttttcagagaaaatttttagcgggattttttttccgaaatttttggcgggaaaaatgtttttgaaaaaaaaatttggcgggaaatttttttcacgaaatttttggcgggaagttttttcccgaaattttttggcgggaaattttattttagaatgttttaggcgaaaaatattaatacttcattttattaacctaaatcaatttacaaataggggtaaaatggtcattaaaatttaaagagggtataaatgaaaatagtaaatagaaaagggtaaaattgaaaagagatagtgtgaaaagtgaattagaaagaatttttctaaattaagacagtgggtaagaagattaataatgctctcacttgattttagaaagtataattaaaatagttattcagtcggcgttgtcctttatttttccggtaatcgatccaaaatgtattaacatggaccatgatctcgtgtctattgaataaaaaatggcatccactttcaaaactttgagaacaactctttcaagaagaaagagaaaaaggaaagaaaaaaatcatctatttacaaggatcaagtctatctctaactcagaagaaccaaatgtcggatcatcatgatcattggagccgagaagtcacattgatgaaggtatcttcaggacaagggatcgttaagccacccattggatgatcaaatccaaactcttcctcggatttactgagaagagcttgaaatgaaggttggctcaagtatgagagcggcaccaaatatctcttcttctggctctctcctacgtacaccgcaagaaacccttttggtgccgccgatgcggtggagcggcttagaatcttctttgcacccaatagacttctcaccaaagccatatctgttatttttgtacgaaaaggtttttgaagcttattaagatggatgaaaagattcaagttattggatatattgcttgttgttggttgatgatagaacgaatgtgtttatgtgtgtatatatagaaagatcaatgaaggagttaaaacctctttgaaaaaatcattgaaacttgtggtcttgaagcgtgggacagactagaacagagctcacatggttctgtctttacaatctagaaaagaagcattaatgaaatttgtcttgatgacataattaattgagtttgggccaataaacgaaaaactaactccatatgcacaagggactgtttcctcaatgtttttaagataagacatgctattgtcaataagaaggcccagcaagtttctttccttcatgttctgtgatgatcatattacctcatgtctgtggtgcaatttaataagaacttaaaattgggacctgaagtagctcaacaatagaacaacaagtctttgtctagggttaagttgttcttttttgatatcctcaaataggaggaccacacatgacagttacaagtaaaggattgaatatctcctttcttctctgcatttattataaaaatatggagaaaacagaatcatgtgaaacgtaactctgtttgtgtatgttccatgttggtttgaagtccatcaatctatttatacatctaaagatagaactaactattcaatccgaagcttgaatctgagcatctaggtttttctctaaagcttcaaatttagattttccaaacacaagaaatgtttttgttcagaggtcttttgggtgcaaagaaaattatcagattttctatagaggctacaagcaaaaggccagtttcagcatcaagggggtttcttgcggtgtacgttggcgaagaccaggtctaaaagaaaagatatttggtgccagtcttatatttaaaccagccttcatttcaagctcttcaccgtaattccaaggaagagcttggattcgatcatccaatgggtggctagcttaaaaatccattgtcctgaagataccttcatcgatctgacttctcagcttcaatgaagatgttccgcaagaaggaataactaacagtagttagtgagagatagattattcaatgtaaatacttcatcttgctgtcatagatataatgtgtaaatacattccttatcaccaagaggatttgcttaaaataatgaagattcttgatcttgaccttaaggctaacatcatagtgattttctcaccgatgtttacacttaggtacttaagttgcttcaaagacaagcaaggcatggaggatctcattactgtaatactgttgcaagaaaactaaaggggtatatattttgatgatgttttctttattcttttacttgattttcgtgtgtggttctatttgtgtatatcataaaaaaggaacagcttaaagagtgatggagacatgttgttctgttgttgagaaacttcaggtccccacttttaagttgttattaaatccatttagaccacagagaatcaaaaataggatcatcacagaacatggagaagagaaacttgctggtcttttatctaaaaacattgagaaaacagtcccttgtgaattgcatatggattttgtttttagtttaatgtcccacaatcaattaattatctcatcaagacaaactgcattaatgcatcttttccaaatggtagagacagaaccatgttctctgttctagtctgtccaacacttcaagaccacaagtttcaatgattttttcagagaggtttcaactcattagtagttgatctttctatatatacactcataaacccattctttcaatcatcaacaaacaacaagcaatccaataacttgaatcttttcatacatcttcagaagattttaaagaatttaatattcgaaacaaaaacaatagatatg

SEQ ID NO: 1513 - DNA, 3000 bp, Unknown
  misc_feature (1)..( 3000): cDNA_ID_2046235_gDNA_ID_1620412_Annot_ID_156282 3000 nt of promoter + ATG
agtcaataaattttttattatataaagcttggtttttaaagtttagtaatttataagattgtgtcacatgtcaactttagtgatctcatataattttgacattgataaaccaaaatatctttctattaattttaaaaatataaaacataattataaaaatttataattttaaacaatttaaaaatgtaaacaaatatttacaaggaaactatacttatatatcatacgtaaaacaatttaaaaaatgtaaaatggataattataaagaaacaatctgtattttattatataaaaacagaaattattatatcatttacttattctgacttaagtttaaaaagattactttttccttcaaaattaaaaagagatttaagaaattatacaattaattaataaaatactactataattaaggtaattatacagtaaagtattaatcttagaaaaatggtgaggtagctgagtatctttcgcaacagttcttctaagtagttagcaatttttttaccacaaacaaaactagttgtgcctaaaaaacatttttttctcctccgttagatcttcagtccgatctctgccatacctgtacctagctcaagatgtgagagcccatttatttacaggctttaacccatttgtttaacacaattgccgaatcaaataactattgttttgttttgaggtcgactaaaacaaagtaattagtgagttacaaaaataacagaactgcactaaacgaccataattttaaatggattaagtatatgaactttttagtttacagtatacactaaatgacataaatttagaaaggacccatgacttgtagtggtgagtctatgtaacacaacttgaaattaaattggtatataacatactgttcacagaatttttttgaaggctattcaaactctaacaacaacgacattaaagatgatattgttatgttatattaaactatatatatttcatcttggattccatttaacaaaagacatgagtttagaagaaataatatgaatttcgaaggaagaacatcatatatcttaatacaagtttatagccattatgttcatgaagggtggatgagtgaaactccatggaatttacaaaaataaaaatttcatcattctacccttaaaagaaaatcttgtggatctaccactttgagaaagttaaactgaaattataggtatgttttggtagtcgtctaaaaaacttgtccataatatgttgtggtcaatcaaaaggtggccattaaaatctaccaaacatatcatttatggactagttcttgggggtttagctttgatggacaaattttagtgaacaagtggtaatataccaaaacatattatggacaaatttttgatgaattaactaaaaaataccaattttagtactattttgtagaaatggcaggtccataaaattttaaaagagaagatagaatgagtaaaatatccttagaaaatctaagtctaacaacaacaaaagtttcttaaacaacatcaaagaaaatttagtacaaaagtttcttaaacaacatcaaagaaaatttagagcccatgttctagtggtgattgagaattgaagaaaggttgaaaggaactaatccatgtttggtccaccctcgaaacaaaaaaaattatatttgtgtgagatgtctgggtttgagccaaatacctaaacatcttatctggtagtcactaatatatgatctggtcgaaaaatagtccaaattcagaacaaacagtgtagtggcccttttgaaaaaaatgtactttaaagcacttcttttttatctgtgttaatcggaccagctaataagattaattttaaaaaaaaacacaaattatcatacgaatttattcgtgtgttttgcaatatatattttcgaaaacttgaggatacttggatcatatatagaagcatgacgacgaaaataacacaatatgtacaatttgatacaagaaaatgataataaaatttacaaaacaatttgccaaataacatgttagttagagtatagcacccatccaattaaatagcttttgcaaatgacataagtttctaaaatatccacttaattaattttcttttcttacgttttttacatcctaactaacactagtatactcaattaatttttcgtaacattggttacatacctaactaactagctctagaaaatatattaaaatcgggacaagtcaaccattagacatgtgtaagctgaaccaaatcgagtcatttattttcccagtaacccactctcaccaagaccagaaaaaaagcgtagatccagaggcgacaatattcaaacacacaaaaagtcatcaatatatataaataaataaaagaaaatacaattcctcttcatataattcatattttcatgttacgaaaacaaaaaagatcaccgacacataaaactaaaccaaatatttcaatgaaaaattaattaacgactttgacgctttatttctctttctctcttcactctctcattatatctctttcgctgccgcttttgttactttttgttcgttcgaatcccaatatagaccaacgaagaagaagacgaagaagcagtctctcaaacttcttctccagatccgaatctcactctcatttctccgatctctctatttgaatgacctacaatttcgcatctcttttgatcttgatctctgtttctctccttctactggtaagtgatttccttaatccgtttctctgattttcttattccttcctttaaccttgtatctgaagcttcctccggaactaggtttacgatttgtttaattttggaattcgatatcgatattttgttgtgcgttaattgtgtgtttttatcgtagctttgtttctctgtttatcagatccattgataagaagctttttagattgttaatggcataagcacgatatgtttgtttgttttgtagaatctcttgttttgagtaatcactaatatacacaacggcggcg

SEQ ID NO: 1514 - DNA, 3000 bp, Unknown
  misc_feature (1)..( 3000): cDNA_ID_3062814_gDNA_ID_1620412_Annot_ID_156285 3000 nt of promoter + ATG
gtgttgtcattagcattcttaacataagagtgtctttgtgttttgttttctctccagatgctctcatccaaagacataaactttgtgggttatacttacaagaacgttgaaatcgtaaaccatgatcaattaccagggataggtagatctcacttacacaacaaatttgacttgtaagtaaacatattccatgtttgctctgttgtaatttgtgattgtgtttactgttgcagctgagctgaagaagaagagcacaaagccaaagcggccatcaattaaatccctctttggtacttatctaaaagacatttatcacaatctatttcaactcattgtctgatattagcatatggttttagcactaacaagaattgttataaaaacatttggcagaggatgaatcagccagtagcaccacaagccaccaaggaagctttatgaaactcttgccaacacaaatcgaagttccagagaaagaagacaaatcaagctcatctagtgaaaccctatcatcttccaccacacgtttcgacaatgccacatcctaaaccagactctttgctacactttggtcccggttaacacaccaaaacacggtttgaggtggcggatttacggttggagatagtacagtttccattgtggcggtgaaggctattgtgtgagaagattaaggatttgttcaacagtttctacataggataatatttggttgttcaaaaggtttagtttgaagcaaaaggaagtaaatagtcattttcagaatgtggttttatttatttgtttgattgttttgtttgggtaaaaatcaaatttggtttgtttaccacacagttctaaagcggacaatgggaaaaatgtcaaaaaaatcatgaactttcaaatttgggacgaaaaaaacatgaacttccaaaatgccattaaaatcgtaaacttttgtttgacttttgataaatagtcaagttttgttgactttgccattttgaacatgtcgttaagttttcgttaacaaaaagataacgtgattaattttctgttaattttttctgttaaaagcgaaacgacgtcgttttgaaattaaagaaaaaaacaaaaaacaaacaccaagtagagttgaactggtgaccttttaggtgctattgaaggactaaaaccattgagccacgttaactttttagaagtatagtaaacatatacatatatatatatatatacgtaactaattaaaaataaccaactaaaataaatcaataatatagaaaattacctaaaatttacacaatccttctcatatgaatataggattaatctatacatgcacatagaatttcattcaacttcactttatatataattttatttataataaaacatatattttataaattaatttgataaatatttaataaaagaaaaatataagatcattattccgtcttcaaatcaatttttttattcataattagatggaaagtatataaaaagttattttttggtaatatatttataggtgttatatttcacaagtttgatttttatataatttaagagaatttttttttaattcaatacgtttaataaaaaaatttacattgttatttgagaatatatattaatggtaggtgtatttaatatttttacatgtttagttattgtttttatagttcggtttttatttggtaggtgcatttttataatttacatcatttttaatatttttatttgccattttggttaatatggaggatttggaagagccggaatgatttagtcttcaacaaaaaagcaatcgctgtcgctgatgtgataaaccaagcgataatggacacgaaagaatggctggatgttaagcataaaaatgatgacaacgtcaaagggggccaaaccaagtcctcaagaacggacaaatggcaaaaaccaggagcagaatgggtcaaatgcaattatgatgtctctaaccatgcgggaagacaagactcaggcctcagatggattattcgaaactcacaaggaacctgtttggactgcggctgcgggaaatttcagggtcgacaaacaataaaggaagctgaatgcactgccctcatatgggcaatacaatgcgcttgggatttgggatataggagagtagaatttgaaggcgacaacatcacagttaatcgccttattcgaaacaaagaaactaatccacgacttcgatactatttggaattcattcaacaatggagcaaagctttcaccactgtgaagttcacatttcgacaccgggaacaaaacgtttgtgttgatgttctggcgaaaaaagcagtagctaatcatataaatcatactctatatcatttttgtcctagatttctaatgtcgtttgtaaacaaagatgctgaacacgtgaattaataaagttattggaaggaaaaaaaaaaaaaatagttcggtttttaattagttttgcgtatatatatatatatcagttttcattaatatcgaaatgttatcatagcatattggttgagcgcttgtgataatttaggaggttcacgagttcaatccattcttggcgcaaattttaatatatttttattttgaaacgacgtcgtttcgcttctaacggaaaatgttaacgaaaagttaactccgttattttgttgttaacggaaatttaacgacatgcccaaaatagtaaagtcaacgaaacttaatcattttatcaaaagtcagacgaaattttataattttagcggcatttcggaagttcacgttttttttatcccaaatttaaaagttaatgatttggtttgattgaaatgtccggttctggtttggttttcttttgtaccggttctcataataatagccacgtattaaaaatttattagtaatggatttgggccagacccattctcaaagcccaatcaatttctcagtgaaacatatataaacctaattaaagtgaagcagaagttgtattcttcttcttgcgaactcgctgaagtctgaaag

SEQ ID NO: 1515 - DNA, 3000 bp, Unknown
  misc_feature (1)..( 3000): cDNA_ID_3062797_gDNA_ID_1620412_Annot_ID_156296 3000 nt of promoter + ATG
aaatttgtgggaatcagtggagccaatcagttgcctccacgtcatcgtttgcacgccatgttagccaaaatgtggtcatgcatcccatctaacaagtcaggtgtaatcgaagcatccgagatctcgtcagacaaaaaaaactctaaaacgataactagtttttagtgtaatctaagttaaagtatgattatttactaatatatattctgatcccaaaggtttggttagaaaatttcctcagcatgggttatcggtacatatataattgcttggtgataatgatatgtttcagcttaaccaaataaaaaatgcaaaataataaataaattttaccgtggtggatgagctaattagagtgtacgaggtacatatatagtgcgttgttttgcaaaaataataatattaaaaagttcacaaaatattttttagtcataagttactttttcacacttatttataacttagaaataaaaaatcacttctctgaacacttatttataacttctctgaacacatgttatgttcaaatgttaagactattttccgttaggtgatatcgtaattttatgactacaatatttcaagttatatggaccatagcattccatttctatgattgaggtacactttgtgattattatttatcgaccaaatattttcaatggctccaaagcttaattatatattagttgtagacaaaaacaaatctctaaaacactgtcaaaatgacgtgtttgcgtaaaatccataaaacattttcaagctagccgaggcatcagcaacaaaatcttcttaaaaccttcatggcttgtaaaatattcaatcgggtacagtgggttgtttagttgaattattatgtgtcactgtgtaagtatagcttctaaaaataaaatgtcattatagcttattgtttaaaagtcaaaaaaaatgttgttggacgcaattaaagatgtcacaagttgtcattaattaattaagcgataatgtaaagtaaaatagcgataacaggttatatacggcattttcaagataaccccactttgtagaccttttccgttcatgttactttctgcccagttaaaatcttgtgttaaaaagtcataataccatatttcctttagttaagtaaactatacgcggatactaaaaactaccgatattttatgcgtaagttatctttattatcatgtttttgttatataaacaattttgctacaaaaagttcatttcgcctttattagattcacgagagacggcatttctttcgttttttttatgcttttgatggagaatttcaatgatggctataattatatatcgttgaagatttcttatacacttgtctccataaatctgcaaatctgataataaattgtagtatctgagactcgaaccaaagacctctttatgtataatcattaatgaatttttggttaaccaataaagtgataaactaggggttttcaatatctttattatcatatttattattaaattactatataacttcatgtaatcgtgggacactgcaacaaatactaaataattagaaaaattaacaaccaacatctagttagaatatttaatttgcaccaatgtcttcgagtatagtgaaaaaaatagaagatcgaatatcgaatagtacgtatagaatcatctagatccattcgaactaacgtctacttttcttttccagcattaacatgtagcttgtcattagcatttacatgttgcaaataacacaaattgggaaattgaaagactaaaaaaccttgtacagcagatggtttaacacgtggattcatggacacaaacagaaaacggcagaactaagcacaaaaacgtcaactaagcatatcaaagcttttaatgcaagcctaatataaacacaagtggttatccataatctgttcttaatctcttgcagtagttatcttttcattattcgcaattcgcaattctatattcttatatttcaacttgttcttcttccaaattgtaattatatctacatcgtcttagcttgaccattatagctccagtaccaagttctcttcttaactttaatatcagctactattctcatactgtaaatatcttttgttcaccaaacatatatttcgaaccaaactgctaaaagcttatcataaattgcagttctagccacacaattttgcagttccaaccattaaatgccacaaaatttggacgatttcttaagacaagaagaacatagcaaccaaaccttattgattaaatatgaaatgtctccataaaactgggagatttccccaaataaagagaacacggcaaatgttcacgtaatctccaagatgaatgtttaattttttctttcagaaaaaaacaaaaaaacttaactcaatatagacaactagaatggataccaactaagcaaaagaaattcaaaagacaaatatatattggatatgaagttacattattttcaaactttatatactactaaaagcctaaaaatttgttctaaaatgatatccaaataaatggaaggcatgaatgtcatatgactaaaagagaaaaacacacctgtatataagtattggatcatgctgcctccgagtgacaaaacatacgatgtgggtctttattgggccatacttaaatggaaaaaggagaaaaaaaattgggcaatgtctatggtcgaaatttatatgttttacatcaataaaatcaatatttaattttatatatgtgggtcttaatctagtattatctacatagattaaaatcaaagtactgcatatggtccataataatacaaccaaagcaaattaaaattttgtggcacaaaacgacatcattttactcagaaagtaatatgcaatttcgtttacgcacacacgtatacgcgctaataacccgtggtgcttctcaaatcacataataattaaagtcttcttcttcttcttcttctctacaaattatctcactctcttcgtttttttttccttctcaacaatg

SEQ ID NO: 1516 - DNA, 3000 bp, Unknown
  misc_feature (1)..( 3000): cDNA_ID_2025109_gDNA_ID_1620412_Annot_ID_156298 3000 nt of promoter + ATG
agatttgcagatttatggagacaagtgtataagaaatcttcaacgatatataattatagccatcattgaaattctccatcaaaagcataaaaaaaacgaaagaaatgccgtctctcgtgaatctaataaaggcgaaatgaactttttgtagcaaaattgtttatataacaaaaacatgataataaagataacttacgcataaaatatcggtagtttttagtatccgcgtatagtttacttaactaaaggaaatatggtattatgactttttaacacaagattttaactgggcagaaagtaacatgaacggaaaaggtctacaaagtggggttatcttgaaaatgccgtatataacctgttatcgctattttactttacattatcgcttaattaattaatgacaacttgtgacatctttaattgcgtccaacaacattttttttgacttttaaacaataagctataatgacattttatttttagaagctatacttacacagtgacacataataattcaactaaacaacccactgtacccgattgaatattttacaagccatgaaggttttaagaagattttgttgctgatgcctcggctagcttgaaaatgttttatggattttacgcaaacacgtcattttgacagtgttttagagatttgtttttgtctacaactaatatataattaagctttggagccattgaaaatatttggtcgataaataataatcacaaagtgtacctcaatcatagaaatggaatgctatggtccatataacttgaaatattgtagtcataaaattacgatatcacctaacggaaaatagtcttaacatttgaacataacatgtgttcagagaagttataaataagtgttcagagaagtgattttttatttctaagttataaataagtgtgaaaaagtaacttatgactaaaaaatattttgtgaactttttaatattattatttttgcaaaacaacgcactatatatgtacctcgtacactctaattagctcatccaccacggtaaaatttatttattattttgcattttttatttggttaagctgaaacatatcattatcaccaagcaattatatatgtaccgataacccatgctgaggaaattttctaaccaaacctttgggatcagaatatatattagtaaataatcatactttaacttagattacactaaaaactagttatcgttttagagttttttttgtctgacgagatctcggatgcttcgattacacctgacttgttagatgggatgcatgaccacattttggctaacatggcgtgcaaacgatgacgtggaggcaactgattggctccactgattcccacaaatttgttgcaaaatcaaaagtagggccagactaattatattatttttttgtggatgtctataatatgaaatttgaatcaatacgtaatttatcgattctttgtctaatcgatgtcaactaaatttaacaaattatctggaagtcactcaacattttccttgataatgctagtttcttcgaatcttaaatgaggcaacgcattgtccattgaaattttaagcatatagtgtatatatgtatttatttttctagcaaattcaaaacggcctgggatcgtttggtttgtaatcaatatatgggttttttttggtcaacaatcaataattagtatttttgagaattcatgaaatactggatgagtaaatgagataatttttatggatgatcactagcacatggttgctaaccagtgaagcacctaaaaaatcactgcaaaaaagtttgtaatcaatttcgttgcagctaagcaacatttatgactaatttgagtaaatattaattgacgatcccatgaatttcacctaattgacgagtccctagatttgttttagagtaaattttacaacttcatatactttacattataattaacaaactaaaaaactcgtaaaccaaataagactttgtctaatggtccaagcatgacctctccaaagatataatatgttttgatatatacgtgataaccgatcagatgttgtatatacatattaatgtgtattaatttcttcatataatatttacaaatttttgtgagaagatatcaagtacacgtatatcgaataagaaaagctagattgtgtaaaacgttacggggcttgtgcattaactcacaagttggctatcacaagtttcaaattgtggtgtttagagcatcgcagttgtcaaacaaaaaaaaaaaaaaaaaaagaaagagtatcacacgtgattgttttccataactatgagaacttttctgactattttcttcttttgtgcctttgttatgtttcttcaatcattacttaattattaattactaatcgattttcgttgcctgtagttttcacatgttgtaatctagaaaactgaaaaagactttccccataatagtctctgctaactacatactagtccctatattttgcaattttaagtgtttttaaccactatcttagagactctaaacatgaggaccctaaaaaataaccatcatcttaaattgtacgtaagaaatatattcaatctacatcagatgataccaataaaattcggcatataagtagaatttgaaagaaacaacaacgtgggtagatatgcaccatttacaacaacaaaaaagaaaaatcaattttggtccaactttttcatatacatttaaattgtcaattatcatcataattagtaatacgacaaactgtcgtataaactagaaaaatacatacatctactatctaaaacgacagataaaaatacgtaatcatcaaaaagagttaaaaacaagttttggggttctcttagcaattttgttttatatgtctatttttatgtaacgcgacagctgtaacgttgtgtctatatatatactaacagagtttgtgcttcgaaatcttaagaactttcccagttttgttttttaatcatatcaaagcaaactgtgtg

SEQ ID NO: 1517 - DNA, 3000 bp, Unknown
  misc_feature (1)..( 3000): cDNA_ID_3062789_gDNA_ID_1620412_Annot_ID_156299 3000 nt of promoter + ATG
gagtaaaataaccccaattttccaaatagataacaattacaataattaatttttctgtataccaagaatttatgtatacgaagattatatgctaatcaaaaataatattaggatggagtgaagagaaaccaccaaaaataaaagattcttgaaaatatacagaacataaatgatcgaagagtctttcaaattttttgatatatatctaattgattttttttaaagaaatctgttcaccccttttggagatttcgattcaagagggtcaaggacatttgatcccatttaaggaatattctcttcagatgattcctcatacaaagcaagatgctttgtgttttgggaaaaagaaaacaaaagaaaaacctttttttcgtagtttatatttggcattaccactaaagtggtgatatatgcatgatcagaaacaattgccatcctaagagaaactccaagggccatcatttgttttttttgtagtcatttttctttatccgtttttgttctcattgaaaattggttgctaattatttgtttgttaatgatagttattaatccacacacaaaaaaatgtagctagtggttcttgcaatctctagttcttatgaactatcctgttacgatatgaattgattcaacaaagaagcaaagatcaagttcgtctatttttatgttccacatatgcttccacgagttgtaccgtctcacagctattggctcacgacactcggtttacttattttttcatagaaatacttacataactttaaaaatgtagttaaagtaagttaaagttatgttttcaactaattttctttaaaattaaacgttttaagttttaacgtataagtgacaataggtttctaaatttacattcacttgctactgttcagaattctttcagttttagcctctattattcctatatcaacttttccttacgagtgagaaagaccatacactatgagattcagaaaaagagttatcaattttgttaaaaaaaacaaaaaaaaaaagagaaagttctcaattttgttttttcttattttctctatatccaaatgtgttttttaataataaggaaaaaaaagatgcaatttgtttcagattcagtcacttcaacttatattccaccataactaaaaaaatacacgtattaaaagaattgtttcattttcccaattctaaaacaagtacagaaactcctaatatattttccattttgtttttttctccaaatcttgatgattctttgtccaagtatatatagccaatcccgactaaattcccgacagatcaaatttctttggaaagttttgaccgatttctgacatattttggaaaaatagatatccaccagaaagatagtaccgttgaaacgttttttgttcttgttacttgcttgttttcaaaatcatttttaaacattttctccccttttttacattttgagttctaaccagcactacgaatatgttcttctagactttagttccatcagccttcttagctccgactccaacatttttcttgtctataagttccgctagttgcatcagagttgtcatattagtcatttctatatatcatattgaatagatatgcttttggtaacgaactaacaactatatgacgctaacatgtgaaaatagaaaaatcaatcatcaatttgcactaaaacaaaatgttgcatcaattaaattgtatcagaaacatgatattaatttgaattagttactgataattaatgatacaaaatatataattaaaataatctgttatttatttatttgacatcattagttcattgaaattgatacaaatctatatcagtttgcatcactttttttctttgcaaactgtccatatatagggtaagcagatgaaaacagtttgctttcaaatcagttattgaaattaaatatattttctatttaaattaaattaaatttattttttattaaactttaaatagtttatttacaaattatagaaatatttaacttcacttagttataactgttgtttttattgtcaaaaaatagattgacaacatatatttgatggaaaagtgaagatgtttatcttttataaattgaaatttattaaaaaaaattttaaagaaatcgcaaaaaagtgttattaattattacgaaacttctgtatggttttgaatgtaataggaatactttcatatttgttaagaatatattcaatcgaaactcatattaatctttaataaaaaaagattttttgagcaaataaaaaatatatatggtacaattttagtgattaaatgtatacaataataccgaaactaaaaatatggtctcgaacttgacaaaaatatatatatatggtctcgcttaacataacaattacaaagcgttaaactttttttttgtaaggactactagtcacacgtaatattacatcacggatcatggtatatataaagcctatttgtaaaatggatttaaaatatactatttttggaaaagaatgtctgcaagagaaattttaatattatccttgttgaatgcaatagaagtgtgtttgtgtgtgggattcgtgacgagttgcactactcacacaccaatactaacgagtgcgttatattcaaatctaccaatataagtgagtgttattaagctaagcataatggccaagaaatttaatattaaaaaaacaaaagtttccattttcccatttgagttactttacttataacaaatcgcatcaaaaagttaaattcaccttcccatgtgtgttaaaaatcatttatttccattaaaatagttagtgaccaaaaaaaaagaagaaactaaattcaccttctctacacgtctttctctctatatatacaaactttcttctttccctcttaatgcctcttgtaacattagcctctctctctgtctttctccttcctcacattataatttcttccaagtcactattagcaattaatcaaaacggaagaaattatatgcgacgatg

SEQ ID NO: 1518 - DNA, 3000 bp, Unknown
  misc_feature (1)..( 3000): cDNA_ID_2046209_gDNA_ID_1620412_Annot_ID_156291 3000 nt of promoter + ATG
tggatcattttcgattcctctccactttccaatacgttgacaataatgggtaaactattattcccaaatctccaaaaaaaaatttgttttcatatttttcttgttattgctatcatgcttcaatttatgttcgcattataggtttgattggggagctcaagttcaaaaaaaggcagatcaaattcaaacacttctattagggaaagaagaattaagagaagctcgtcttaaagctctcaaaatcacttcccaaatcaatggctttggtaactccaccacattttctccttctcctaattctctatctaactccttctcttccttgaaaacctccaattcaacaccaaccaaaagaattgatcttatatccgagtcatattcgttaatcgacgacgaaaacaagctctcggagaaggatcaagccagcaaagagacgctagtcagcggaatctgcacaaaactcgccggatttagccctttgaacaagtttcaaggcggtcgtactaaggcggcaaaatttcaaactttgtctaacgttgagagagtttcaagtaaatgttacgatcgttgcaattctattggttactaaacaaaaaccggttcggttttaaattgtaatttcgttctgttacaaaacatccggtttagccaaaccgaattacaacgcaagaaatgctgcttttgctaatcctgtttaaagcttctttagctaaacattttgcagcttctttaggatcctctatgtgtcttattaggttaatcgcttcttgactcttcatcacctgtaaccaaattattttgctaagtgattgatcagtttgtattttgatggatcttgatcttgatcttacctcccaaatcccggggctaccgataatgataaattctgtatctgaattaatcttttctgtaatcactacaagctctgaatttcttggatctgattcatcttcttcttctccttgattacaaactgagatattacatttaaagaatttaagtctcatttcattttcttgtcacacaagtaacctaagaggatattcgggtttgaaggaactaaccagggaaaataaattgtgaccaatgttttgttgaggctttcctatctctgatttgatgagcctcaccatctttgcaaaccactactctatggtccccaatactcgctatagctagcttctctccgttcaccaccataaccgaagcggctgagccaccggttctctcttcctcaacgtacgctcttctcatagtctctttacactttctcataatcccgagctgaaaatgtcccagatacattttgttgacacacattcaaaaataaaacgatgatcacactaacataaaccattagggtaaattttcaagtcatgatttaattacctcattggggagcttatcaaatagatggttttgcatatatttgacaatctctttccctgttccagcatttgagactccaaataaccaaatctcaagctcatcactttgttgctctctctgaacaaaaaccgaatcatcattcgatgaattgtcggcatagcttaaccggtcaaccgtatagtatccatgagaaaccggagttaaccataatggtttcttcttcttccttctcttcccatcttcaactacaagtcttctaaaccggaacgcctgttggattcaacgatctttaaaatccataattcaatacaaaatcttgaattaagaaagattgaaaaaaagatgaccttgagcatgaaagggagatctaagaagcccatcgtcgttcatagcttcttcttatttgcttactatctttataaattgcaaatatcttttgataaaaacaagaaaacttttttcgattctcacaattttaaaagaaacagactttttcaattgcaagttacagtttcttaagtcatttttccatattgtaaaattacaattctgatgtatatttattaagtaacggtaggaaactataaacaattaataaacatttagaatgttgtctagaaaacgcttattgtgaacagttgaacaaagcctcatatagtaacgtacgcctttcgtctttagttaactttgactatgtttacgtttcatcagaagaagaaaaaaactacgtttacgttccaaaaccttaaaagacaagcattggagatttggagatgttatatattttattaagttttttgcattttatatgataatgagaaaattaagaaaaatagtctatttcctcacaataattatcacatcgtatagaatccaaattttatccatgatccttatgtttatgaagtgataattctattctagtttacaatcatcatgggtttgagaactttcatttcatggacataaggatcgaggttaaagtttgggctctatatgttatgatgcgatattcatcgtgggaaaataaaccatttttctgaaaaaaatcatgatagaaaatttaaagttatattacacttaaaaaaagagagaggctatattacactttaggaaacatctaatgccttggcaagtgcatgagtagtatgtatcttcagaaaacgatgaaactaagcttaagaccctagacagcttttacatgtgcatttgtcaactatcgtgtcaattgtctctctatattcggttattgcgaacagaatgaaacagatactgttttttaatttgatgaactgtaacttacacatacccaaacatattgttgtgattaatcactaagacgctaactagctttcaatcgtttaatttagatttgattattctccttcatcttttatgaaaagaagatgtaaaaatgttgtggatgagagaacgcatatttctgaaatcaagcaacgaattaaaccagtgaaccaatcggttaattactaaaccgaaatattctctgacaaaaaaaaaaaactttatttaccggttccaggcatctgccttcttctacctccgtctcctcttaaacctcaaataagggtttttgaggaaagtttctcgaaa

SEQ ID NO: 1519 - DNA, 3000 bp, Unknown
  misc_feature (1)..( 3000): cDNA_ID_2046231_gDNA_ID_1620412_Annot_ID_156283 3000 nt of promoter + ATG
gctaaattatatttacatgcgaaatgataagcatgaagattttgtttaggtgacatatttgctaacatctctttaaaatgtatattaaaaaaaacataaaatattttgggcataaaacttaatgtggaattttattagttgtctcatttaatatgtttatttaatatatctgtatttgtggtattataatgaataagacattaaatatgaataaaaattccaaaataatatttgcacgtttatgatagaaataataaaagtctatttaataacttgaaaagaaatgacatgtagaaactgatttcaaatgttaaatacttatatggatactggatacatcatccaaaacatttttcaactaattttaataaataatataaaaatacttttaccatttccttacataccaacttaataattttcagacaattaatcatgacgaacacattgaccgttacatcatatgaatgataaaacaaaaatagtggtttctgttttggttttcctattactaattgttggaaaccacttcaattatacgcgttacgtagtttgatacattgaatatatggtacaatatacattaaatttattttcgaaaaatatgaatgtgatacatacctacaaagtttggcaaatacaaaaatggtccccaacgttactctcccccacctcaaagctgttcatatcgcccttcaaagattgtgaaaatcaaacccttatcctcttaaaacccttaaaatgttttcttctaaagaaaaagttgctttcttatttttatttttattttgaattctggttttggcgcatacatattagcgaaaattagagaaaaaattcctgtatatgcaaaaaaattaacgtttttttcctacaaaatttagtataaaaatcaataaatatattaaaattatcacacaagaattaactttgaatttcttttccagattagcttttaatatattttgctttgtaataaagaacatactgtattgaaatatgttctactattaactaatatgaagattaccggtaaagaattactaatgtttcatctacattaatttttgtgtgcccataatttcaaaattttgcctagagtgggatcaataattttggtgaagattgaagaaaaaaactaaaatttggggacaacattacaaaagagcattcagtatttggaaagcttaggaccatggtgatttagaagcgccacgggcgtgatgcatactgcatcttcggcggacatcaaggcttttgaaacctttttctaattttgttatctatataattcacatcaaatagaattagtgaactaatgtttacaaaattaggtaaaacataaattatatgtatgaattaacaaactattagtttaaaagtaacatatagtcttatttttttgaaacaaaaagatttactttaataatatatttttttttttttgtgtgtggatccagaagaattgtgaagaaaaaaaattcttctaaactgcatactagtcacaccctttactttcgcgtaaattcagatagttcggctgaaaaaaattggttaaccctcaaaaaccgtcatgttaattaggtttgcacaatccattaacattaggggatgccaagtagtatcacattagtacttcaagtcctcgatgaagtgttgataggcttttgctttgtttccttaatcgtaacataaatgtcttcatgtccttaggatatatacaaacctatccttgcccaattgattattcatctgcattccaaactaaacacaatgcttcttcatgtaccattcatatcagttgggtcacactccaaacatttaattttctttcatttccatataaaaatacataatccgtgaatagttgaacttctctatatttgacttgagaagttaaatagagaaattaacaactataccagttagtacagttggtaattaccaatagatattcaaaaattagggagagaattcaatgatttgggttagtaaggtggaataatcaatatatgtctacgtctagataaggtaacatatgttttattaataataactcgagatctatataattaaaacgcccctaaatcctaatccatcattaatgtcaaatatttgaagattgaaccaaattctcaaaaagtgttaaaaactatttgcaacaagagagagcagttgggttgtgttgtgttgtgttgtgttgggttgtgttgtggtctctttgtaattttacacatcaaaagcaacgcaaagctttacactttcctttctcctttctctttcactgcaaatttctcctacccttaaaaatcgaaacttcaagagaagaaattgaggaatcaaaaattccctagattcgagggttcttctctcacttgttctatcttcctgcttcatcggaatcgtttgatttgtgttctttacattttctccgactcaacttatggtctgaattttacctagtaagtacatttgtctactttctgtttattctttcgaaatcgatgctttatctggaattgatcatgttattgagtttggcttgggttaactaatcatggggaattctcaaaatttgttttttttttggattatgtgtttgattttgggaatatactgttagggtttggctagtgtgatgaagtttctgaaactggtgatagtaaaggtgtaaactttatgctcattttaggttaaattctctgtatcaataaggcactaggcatttagtttaacaattcaatgctcagaattttgatttgagtattttgttagagttcaagtgtttagtttagcttatcgtagtctcttttggtatttgaggtcactattggctcatatatgttatcttgttgtaggtgcaaggcattagagaaattggtacagtcgtgtgacatgtgaagattgttgttgtacatatagctgaaggaactctttgctgatttttacataaaagagtgtatcttgatatttggtttgcgatcgagttaagtggaagcg

SEQ ID NO: 1520 - DNA, 3000 bp, Unknown
  misc_feature (1)..( 3000): cDNA_ID_2138093_gDNA_ID_1620413_Annot_ID_156315 3000 nt of promoter + ATG
cactccacatatgggacaaggatgcgacgacgttttcaccttcttcatcaatccagacgacaaagcgtcgttgttaggcttcttgtgactcgcacggtgacctcctaaggcttggaacgaatgaaactgcttcaaacacgttttacatgtgaaaacgcgtttttgatcgccaccgtcaacgttttcttgtccaactctagataaaagcatcaaacaattcgccgccgtgacatccaccgtcgacttgatctccgatatcgcaaccatttttcttctgatgatgatgattaaaacgaaacaataaaaaatgaaatgatcctcttgtggtttgtgttttttgagtttggtgtgatagtagttgtgatgatgtgttcgtgtccgtttgggaactatatatagataccgagtttgtgtggaccaaagacgtgtggaaagtgacgaatatacccttgtgacttggtgggtaaggaagtggcagcgaagagtgtaggtattaacgtaaatacgtggaaagataaggggtaaaagaaggaaaaaacgggttatgtggtcacgatttgcgacaccgcgtagcttaagagactactaaaaacgaaagagtcgtttcggttggatgagaatcttcctcgtgttttctcgaaaccatttattattattattttctttttaaagatattttatttggatatatacacatcaaaaactaaactcttttgagtagttgacgtcaaccaaaaaaagctattaaactctctgagtttgatgcattccccacgcgcggagccgtcttctagatatattatacggaatagtttaaaatcaacaccttctagatataataataatacttcatatatgaatggtttgattccgtttgaaatgcttctaagttttttgattgacttcatataatataaggatactaattcataattttaatattcattggtatggtataggtatgttatatgaataaatctcttttgaagttttgaacaatatcataaaacatataaaaactctaataaatattggttaatatggtgtaggttggtttcacttttatgaatttgaaatatgttaaaaccaaaaacctatggtttgcttttcgtttaggtgttttggtttatttaaaattcatttctagaattctaatttggtcaggtgtattctagaaagtggaataactagaaaacaaagttcgtggttttgttagaaaaatagtttctttctagaatgttctctaaaaactaccgtcagcaatgagcatctaacacaatcccagcaaaggcatgacaacacaaatacgtgaaaagtacgcgttgaaagatcgcgtggatcagataacaagaagatatgtacggaaacttgatggaaacgtgggaagcaagtagaagaagagatacgaaaatcataaaataaaaagagagagtgacgtggcacttttaatgccttttccacgcggaacaaatcttcgttataccttaagattcttgttttcacactccctttactttcttcatttgttggtagtttcataatcagtagataagtcgagtcaataattaacaattatattatcaatggagtagtttacataattggacaagtatacatatatgattgtttgttggtttttaggattaccaaccaacgtatgaatggataaacatatgacctacttcttttgtttttttgtttgactctctccatcaaatttttgttttgctttgtaagccaaagaaaatattatacttacacacttccagagtatacggccaatcaaatgtaattcgttgaatacaataattaatactaacaaaaatataattcgtttgttgccaaaaaaaattcaagttttaatcgtaagtgtattttggtacgcttggaaatatatgatttcaaaaccattactggtctcaaatcgggtccatttgctttattttattgagttcatatgtacgagtccaattatgtagacattgagctattactcattcattgcgttactcatctccattgcttcttgcttttttttctttttcttttcttagtttgaatgcaagacaatctcattttctgataaacttgattcccggatattaatggtaatgagagtttgacatgagccttgtagtgatttgaggtggttacccacatttggctatttagcgggtcacatgtaatagcctaataggttcaacccacctcttgttcataggggttaaaatgtagaaagatagctaagttagttacgttttatgttgtttatactaagattaaatcatcaaattatattctttacgagcctaaaaggttcaacacacctccgttcgtagggttaaaaatgtagataaattacacattagtttacttcatgcaaactaattttaagtgagttaagaatatactaacttctaattaagtaattgaaaatttaaatcctataagatatttttcaataaaaaatttagttttcacttatgattacatgctttaaacattttaaaataaaacataagtgtaagtttgcaataccacataaagagataataaacatctgatcatgaaagtttacatttggcacaatctgtcagttactaactttacaaaccatatttaatagaataaaatatctatattcaaaaacttacaactacaaccaattaatataaacaaaattctacagctgcagtcaaacaaatcacccacaaagtcaaaattttagtttaattccaaataatagggagataaatatggaaagaagattatgaagatcctcttaccttttttttcgaattagataacagttgaaggaagagatagagttctggctgaaatcactcaacaaactttaaaagtaattaagttgagactgagactgagcgtgattcgatctatttagcaaatatagcgagagagggagatttatggagaactagtattttgtatatgagtatgacgagaagatattcgagtactcaatactcaaacaaaatg

SEQ ID NO: 1521 - DNA, 3000 bp, Unknown
  misc_feature (1)..( 3000): cDNA_ID_3062842_gDNA_ID_1620413_Annot_ID_156333 3000 nt of
tgatataacattagactgaaatctatactccaaacttatgtgttaggttagatttgcaaatgaggaaacttagatctcgtacctgattttgtgtcattgttattttcagaggattggacttgggcttggtgactagcttcggtttcagtcttttcaaccttctcgtcttcaattgttaactcttcgaccttattgtcttccattgttatctcaaaggtgttgtggtttggaactgatgcctcttcctcgagctttgtctcatcggactctagtcttgatgcttcgtcatggtcttgcacaaccgcatctggactgagagatttacctgattcacttagcaaatcggtagtctcagaggataagttaggaagaataatcttactgtcacctgtttcatgcatctggtcttccattgtgacctccatgtactcgtcgtgatttgcttccgaagaacaatcaattttcatctcatcagcaatggatgtgaggtgttcaggctcagggatatgcttctcatcatcaatggatgcgtggtgtccagactcagtgatatgcatctcatcattactagcatgaccagtagtagctctttctttgctgttttcgtccactgaggcttcttcttcaaaagcagcatttcccatgttattcacttcaacaggactttgtgggatcccatgatcgctttttgacggtgacattgatccaccttcggaagtcgactcaatattcatgctaacatccgacgctgcttctgactttgtacatcttgtcagtgtaaagggagtagccgtctgattttgcaccaaaatcccctggccatggctggcactgcatttccttagggcaaatgcttcttctttgaggacatttgtagtaggttccaccttattgtcatcttcagacatcagcatgtcaatttggcttatggtttcaatttcccgaaggttatcatcagatgaagctgtggccatacgtagttcagaaacttgattactactgtgcacctgagtgtcaatcaccttagctgcagaaggctgagtcactgattcagttcctacaatatccttaacccggaaaccatgttttggcaagccatcaagaacagaggtgaaatcaatcgccttcgaggatttgtgcgccacaacatttgtggcatcaaaagcctttgcaagatcatccaaaagcatgtcaccttcaccgctcgaaaggcgatcccatttcatgcaatcttcagacagaggctgttcgaggctaaaagtatcaccagcagaaagtaattcaaccctgacagcttctttgtgaaaccgttttttctttaaaaccttggctatcatattcctgaaagcaatttaaaatccattctcaatgacgcttagcagcatcaaataacacaattgctagacgaatttgatacatacctacaattttttgaaatggcagctctagctctttcagcagagagtccaagtaagaacatgagatttatgacatcatttggacctctaagttctgtgactgaaggagcaccacttgatataattagattcttccccctagtccaatccaccagtaactagatacaccatatcacaagacagtataagcaagttctcataaaactttcacatgatcaactaattgacaataaaattttccacagaatctcaccttagcatttgatataacttgtctcctcgtttgtgcatccataaggatatcagagtacttaatctcaaagtaaatccctcgctgcagataagaaaattcattaaggtgaagcaaataaaaagaataagatacacacagattcttctaacagtgaaatcacaaacctgaatagcagctttaaccatgggatgcttcaatcggaataacatcttgtccgtaaaatctatcgaaataagatcaacctatgaaaacaaacaagctaagagttaaatcctaactaaaaaaactccaattgagctacaaaaactaaagattgaatttttaacagaaaaagagagaaattcaaacctcagctttctcacaggcataatcgaaagcgttctgattcatcggcctaacagcaataatatcataactctttagaatcggattcccagaattcaaactctgacactgagcattactctccacatgaactgtgagacgcgtgtactgccgaaacggagtagttcgcggaacaccgagtaaatcgcgatggaatccgacagaagaagctaaccgcggagcgactttgattagagacccaagagtgagaagagggatcgtacaagagtctttgtcagacattacgcctttgatcgaacggttatgtgcgatcccaacatagcctagctccatggctttcgtggcgagctttaatcgtaaggttttcccgccggcgatttccttaccacctgatcgtggcggctcattgtacggaatgctaagatcgaagaatcccattagtgagtcggagagaacagtggcggagagattttccgattagggtttaagcattaaataacgggtttttagatacttcaccgattttaggagaagaaatataaatacgaccaaaaaaaaaaaaagagaagaaaaagaaataaatttattttactatgcaaccgacgacgtatgaggcagttaccgaaacgcctgcgtattcgaaaataagagaagtttggtttcgatccataaccggcccattaaaaagtaagccagcccatgcaaactagtaactacaaagcgaagctctgaagaacacttatgtagttatcatgcggatcacaattaataaccgttgattaaaatcaatcgacggctatcatgtcatatcagtattgacaaggattgagcttaacagccgttagatgggttattaaatcggatggttgaaaacaaaagccctcttatatataaacaaacacgtccagtcaatatctgaaaatcaaaagcaattcttcttcacacagtagcgaaaaaaagaaatctaattctctcgagaaaatg

SEQ ID NO: 1522 - DNA, 3000 bp, Unknown
  misc_feature (1)..( 3000): cDNA_ID_2138160_gDNA_ID_1620413_Annot_ID_156338 3000 nt of promoter + ATG
accaccgattatattttcgatttcgaatctagtttttatttactgtcattcattacattgaccttttttacaagttaggattttaccatttacatatgacgtacaaaactattggtaagaaataacatttcaacgaaaaaaatgtcacgactgattgtttaggtaaaaaacaagaatttgtgcattcataaactctatataaatctgaagatcaaaaccaaatctaccgtaaattttatcatcgatagaaccaatcacttattaaacctcggattcggtttatgattccaaatcatcctaaaacatacattttggtttttctatatttataatttagagcactctcaaattaatatatttagcaactaactgagatatatcgagacaatttatttatttatttatcgaaagcactaattcttgtcaagtacatacacaagatcactatcaaatattcaaatcaaaatttgaaggaaggaaaaaaaaagggtgcgaagttgactaacagtgacaaagaaagattggtgtggcaaaatgcaccttctctaagataagccttccccatcactgtccttttctttctcttccctttcttcacatttttagtccttaattttagtaatttttatctatatattctaattattctaccaaagaaataagaaatcaaataatttcttttctttttttctcatgaaattacctctatcttttgtcataaaattatttgctgacagattagcttataagagttaaacaaataatatacacgaataggctaggtacgtagttctaacattataaagaaaatgtgtcaattcattttcttttctagtaattatttaaaacactcgaagtaaagttgaagagtatcaagtctacttgattctgattgataaaaacgtgtgggcaagtcaactaagatctgaccttatagtggttaattggttagatttgagctctttaaaaatgtgaagggttatcaaatttatccgatctgattatatatatcctactggtttgtatatatatacttatgtcttagcacttaaaactttaaaactgtgaagggttatcaaatttaattaacttgttagatccacaatttggtaactcatatgattgctacatcaaattaaatttatgtttttttttgtaaattaaatatcctttgacctttatcataatttttctgttttaaaataaatatagttaaattttttaattttttggacataaatacctaaagcagaggatcgacttgcaaaatcttctctatttcaaggttccaaatttatgtatcatgtctatattccacatttgatgcagaatattgtaacagtttagtacttgattaattaatatattagatgtttcaaaactaaactaaaattcaagtcaacatttagatcagaatatcaaaattcaatttaaattttagagatataataaaagtttatatacatatgttatataaatttgtgtgaaaatgtcaaacaacactatttataatgaatatagttttggtttttccatttgatatgacaagttgaatttgcgttaacgatgcatgtaacagaatttgataacatccactagctttatatcaaaaaaattttatatgtctttatatcaatatatatagagtttggcaagttcacactaaacttgtgtgaacattgaaaaagccaaacattattggagcagtgtacataatgctagcatcttataatatctttttaattttgcatagttgttatttgttcaacaaaaaaattggtaataaaaaatataaatgattttttttttggaaattactttattcattttcctgatgcctcaaacataaggtaccatttgaaaaatataaatgatttagttccaaatgatcggaaaaaccttgtcccagattctcttattgttgttccaacgataaaatccatcgtctttgacaacgacgaaacatgagtttttagactccgtagcatctttgtccgaattgtacaaaacgtacggtgtctcgtgcatcccgaaatgtgcttctctgtaaaacgttcctatgcaagttcttggctgccacggtctagatccttgcgccttctcatcaacagcattgtcgccggtagtggttgggatctctatcagcaacttctgacctaaaggtacgagtttggagagccaaggggttcggtggcacgtgacgaagacaggaacatcaccacgtctcttcagctcgttggacacgagaagagtggcggcacgtgtggttgcgaacgtagaaaataacatcatagtcatgatcgagaccattataagagtgtccatgattttgatttttgtgttgaaagtatattgtcgaatggaaatatatcttcgatttctcaaattaggagtatcaatattttcattacgtttttttttgttgtacgtttattgacagatatgattaatagcacattcagttacgattagagattgtcttggtctactacagtagtagcgagttccgtatcggcctatcaaaagcccgattcaggcccaaaagcaaaacacttatttttcttatgtaactgttttttatcttaacttggaaacatattttgcaaacattacatcagccgcaccttcacggtttattttaatttcatatcatttctttcaagtagcactaagtcaaattcagaagttccattctttttataggtctttgattggtctacgtatgtttgacctcaaaaaaaatgctttccttagaactttctatgtttagtaaacttttcatgtgtaactaaataaacaaaacacaaatgttacaaacgacacagaaatcaatgcctctccccctactttttctcctcatctaataattccatcaaaccaaggaaaaaaaaacaaaacaaaacgatctaacaggaataaacaagatagaattataagatctccgacgatccttagcttcaatcaattattggtggcggagaaagaataaataataatact

SEQ ID NO: 1523 - DNA, 3000 bp, Unknown
  misc_feature (1)..( 3000): cDNA_ID_2138145_gDNA_ID_1620413_Annot_ID_156334 3000 nt of promoter + ATG
agctcaacctcaaacagctgagaagaatatagaagaaacacattaaacattattgactcagtcgacaaactaatggactgaagacaatgcaaagaaccttggggattgaaaataacactaaagcaaaatcgtaagatttgcaatacccatttatggaacagtagagagaatatatgtgatgcaaaggactggctccacagctgcaccatcaaatcaagtatatccttccccctctcagacactttcacatagtaatcagcaaggacatcgaaaaagcataacggaccatcagcatctgcttcatcagaagtaatcaaatcctcttctttgctaaggatcacatctgcttcaaattccagctcgaaaagttaaattccagtggtaaaaactgatttgaattcaaaaaaatggggacatgaaaagtgtaacctttggctcgatcgtctacttcgagagctatatcagcaaataagtcttgtaacaagttgcgtgtttgtgctggagagacaacagcctatacaaattccaaaatcaattttatagtctcaaattgaagatgacaaaatccagaaatctagccgtgaaaaaagctgaaaacaggtatataacatttgttgattgataaacattaatcagatttgctgcatgacattgatctcaatcggaaacggtagattcaaaatgaatcaaaaccaaaaaaaatcgaagaaaccatttcttaatcagaatttcgtggaattatctaatgcatgtgtctcgaattagagaaatcgtgttttctgggcaaaatcgaaacccgatcaatacaaatcgagaataacgaagaagaaaaagagcaaacccgtgtaagcttcttcttaatctcttgtgtaagagcttcaagataagcagacctccgtgaaaaagaggaagacggcgacgaaactttctccatttcaaaaaccactgatccaaaaaggaactaccacatgcgatcaacagcgtcgatctattatcgctagtatgagaaatcgagagaatgataatgattgcttcttcgttacgaattattttattcaatcaatcaatgaatggggtctcctctggatttaaaaattagtcgtaattaggcgtgaacttcttttctcttttgctactgtgaactccgataaagacacgagaggaaaaaacgaagatatagtttgtttcaaaacgacttcgttgcattctggatcagagagatgacgtgttggttggctgaagacacgtgtacctcttcaggcccctgtttatttttcttttaatctttttttttttctaaaagtaatcaacgtcgttgtggtagaatagtttcggaatgagattgattaatgtcgttttgtatcttttcagaatttgttatgcaatacgacaatttattcatatcaccttcttttagatctgtatccaattatagaaattggatgatttgattcatcaaattcaaagaacccttaagataccactatctcctttttaaaatggatcaagacctcattatccactaccactcgtggcaaaatgaaaactatataaaatcaacacaaaatggagggaaactaaaatttacgcgctaatgagtaaagttggttaaagcttctttactctcaacatttggacctgacgtcttgtcgtcgttatttatgggcttggtgatgttttattgggcttaaattttgtacattttagtgcaaataaatatttcgttctaaacaataataacgaatcgaaaagcccaagacatgttatactcgagagccaacagtcaagctgatttcaacgtatctcgtcacgccacgtagttgattaacagccgaagatcgccgctgataaagaactagattgacggctgacgagttaatacgtctgctctactgtcaaattcacaattcaaagcgaggtagaaaattagagtcagagtcataagagattatgagtaatcaaacgaactttcaccaaattgcgtgtttccattgttgagaatttagcaaatgaaaacacattacaaaagcgaaatagcaaaaaaaggaaatcaaatcttgctacatttactaaaatacctacattgaaattctcaaatctaatttccagaaacagatctccaaacacaaatctgaaaaaccctgattaaccgccgaatccgtagagagtccttccttgcctcttgagagcgtagacaacatccatggcggtcacagtcttcctcctagcgtgctcggtgtaagtgacagcatcacgaattacgttctcgagaaagatcttgaggacgccacgtgtctcctcgtagatgagaccactaatacgcttgactccacctctacgagccaatcttcgaatggcaggcttggtgattccttggatgttgtctctcagaaccttcctgtgacgcttggctcctcctttacccaagccttttcctccctttccacgaccagacattttctcgagagaattagatttctttttttcgctactgtgtgaagaagaattgcttttgattttcagatattgactggacgtgtttgtttatatataagagggcttttgttttcaaccatccgatttaataacccatctaacggctgttaagctcaatccttgtcaatactgatatgacatgatagccgtcgattgattttaatcaacggttattaattgtgatccgcatgataactacataagtgttcttcagagcttcgctttgtagttactagtttgcatgggctggcttactttttaatgggccggttatggatcgaaaccaaacttctcttattttcgaatacgcaggcgtttcggtaactgcctcatacgtcgtcggttgcatagtaaaataaatttatttctttttcttctctttttttttttttggtcgtatttatatttcttctcctaaaatcggtgaagtatctaaaaacccgttatttaatgcttaaaccctaatcggaaaatctctccgccactgttctctccgactcacta

SEQ ID NO: 1524 - DNA, 3000 bp, Unknown
  misc_feature (1)..( 3000): cDNA_ID_2138164_gDNA_ID_1620413_Annot_ID_156339 3000 nt of promoter + ATG
catacgcttttctaaagtttaccatttttaaatttcgaggttttttcctcctaaatcggataagtttaccattgttagtttagaactattttgttgttgttgttgttaaatgcttaattagaactaattaatctgattacattgttaataaaaagagatggtttcacctcgagcaagtgaaaccatagtgattaagacatatttgaaattaataattggtatgatcgtaagagaaatacttttttttttttcttattaagaaaattacgtaagaaatattttctttgggtgtacttatactctgcttttttctttttgacgttattgaagattggctaatctttggcacttaaggtaaagcatcttaattaatcatcattgatcccttctattcaaaggttaataaaaagaaagttgattatttatatacatatggcttagttctaatgtcgcagtaagattctttggttcctcctaaattatataattggtggatatatacaacacttcctgatataatataggacatggacatacatgatacatttgtacatgcataggcagaacaaatagtataatataatataacaataataatgatcgcgtggctggctaacataacactttctttttaattaacattatcatatggacacatcacacatgcatatatgtcttcacgtggaactcaaaagttttaagagaacttttgtaattatcaccatctttttatattcacctaaaaggtggctagttactgtccgtactaatgtccatatatattcgtataagatacgttctatatatgtatacatacgtgcatacattatagtactatatattgttggagccttaatcagaaatcaagggttggtgtaacaacaatatatgtacatgtgaaaattttaaataagaaaaaacatgtattaatacttcctccaatctaatcaaactcacgtacatgtatgtcttacgcgtatatgtgtgtgtataaagactacactttactacgtagtaattgatatatagtatcaatttaatatgtgtttataacatatatctatttttttaaacatatctatttaagtttaagtttaagtccaataatttcattttactagtaaagatcacaatgtcatttaccgcattcacttaataattgctgaattcacatagtgcctgtaaattaagactaattttaggtttcaaataatttttcttttttacataacttacgatcgatattttaaatggtattggtaagtttaaggtatatagatagtgtgtctaaactagagttcgttgaaattggtctgaggtataaatacctaaaaggttatatatgtttttagtttaatgtaattcgataaattttagtcgaaaccgttaagagatatcagaatttcgttttcaaataatatgggatataattacccgggattaaccgtacctgataaaatatagctctcgtacgtgtcacatgcctaatgcctagttaaacttaaaacgaatatctatatttactgttattgattgtgagttaccaactaaaatattgttaaaagacattgtaaaactacaaatggttcgaactgtatactaatgatgtaaactcgtgtttcatcgttatgtccgatatttttttcattcaaccattattcaatttcaagatttctttattgtctttttttctttctagaaagcctatatatttaattacccactttgcatattcagaggataagttgatacgtacttgttagcaacctgtctagatcatcttttgattgtagatttgactttaaatttctcacaattataaatatgaaaaataacaagcaaagaatttacaaatgtatataattatatacacgcattgatgaataaacatatttagaaaataatgtgttctaaggaaattttgtggcattttttaaaaaataattaaacaaataagaatagtgtaaagttgtttaaatatgtatgtataagtggcatgcctttgaggatacgaacttaaaagggagttaggtaacttgcttgggaaataaaatagccaaccttaatttgaggtttcctcaatgttcttatcaaaaagaataaaaatttcggaaattcccttcatggattttgatatctaaccctaatcgtgaccttctttgatagctacaatctccctctctttgcttattccccaagcaattttagcttacgaatgttttgactaactccacatcggtttatctcttaagttccccacctacaaatatacaaaaaaagaagtaaaataaaaataattattaacaaaccgatgaagtacttatcatttataaacatgcttatgaaatgtattttctaaaacataaccgctaaccagagaagtttcctagagttctgcttcagactcttttggtcgatcaagaagtctccaagagttgtttttgttgggtctaaacaaaacttggccagggaacaaatcaaactatattattaatcttctacatctggtcctaagttccttactatctcatgttaaaatttgaagtctaatatactcaaagctgtcaaagaagcagaacatggaagaggaactgtcatatctgagaaaccaaaattggcaatcttgcatttcatatttagaatctacgccatagtattgagatggaaacaaagagttttcgaagagggtcaaagagtttgacttatctttgacaccactcatacattagctgttcatataatctaacaactagtcaatatcaagtgtctccaaattacggagagtacttctctaccaattatctttttgtttttcataaacattttactaattgttttttctatatctcctgctcaagcaaacacctaactctcctttcctatatatacactaaaggttgaaaacaatgaatccacaatctacagcaaaacataagcgaggcagagtcttcagaaaacttacctgctctaaacaacgcctccgtgtccaagctcacttca

SEQ ID NO: 1525 - DNA, 3000 bp, Unknown
  misc_feature (1)..( 3000): cDNA_ID_3410227_gDNA_ID_1620413_Annot_ID_156331 3000 nt of promoter + ATG
aattcgaatattttgattttgactttaaaataaaaatattacaatcctgatctggaaactctgtatcatatttgttggaagttggatgggatcaaaatttctctaacctccacgttcagcttccatttctcctaaagaaaaagagaaaagaaagaatctcattcacatacatcatacatggatacaggagcagtaaagctacccattcacgagcaccctatatttccttcggctcggatcgtttttagtacatgtaaaggctgcggtgtagaagatttcgtctacggcgggtacgtctgcaatgattctgactgtaaagctcggtttcataaggagtgcgctgaggccccatctgagatcagccactctttccaccaacaacatcctctctttctcaccaatggcctgggagatcttccatgtgatttgtgtggacaaaagcgattggaagccgctggttatagttgtcccacatgtgagttcaagctggatttgacttgtgggataaacccatcaccgcctgctattgaacatcctatctgtcatgaccatccacttgtctttttgaagaaacgagaggagaaggccccttgtgaagtttgcaaggattctattggtggaccttcctattcttgtcttggatgcgatctgtacttccacgtggattgcgtccatctctcaaaagaggtaaatcatccttgccaccctagtcatcctctcaagctcatcgcatctgaatcacttacggataatgctgagaagatttgtcttttatgtgaacaacaaccagaaaatatgctttattattgttctgtttgcaacttcacatcatgccttggttgtactaaacgcccaccacctctttttatcgagcataccaagacccacaagcatcaacttactctctttctaaacggaatttcatatcaaggttccgcgctgacatataacagcagagcttatatgtgccttccttgtggtttcgttgtcaatgggaatggtatcaacctacctcaagtcataaacatcaaccgtcacgaccatcgtatctcttacactcatcagcttggccctggatatttgaactgcggagtttgccgcgaaattgttgacagggattgtggggcatatgcttgtgtcgtttgcagtaactatgcagttcactgggaatgcgcagtacatgataatgtatgggatggtgtggaattagaagggacatctgagatcacagaagatattgcaccattcaaggtaatgggtgataacttgataagtcattttagtcatgaacaacatactctaaggctgcacaaagaaggcatcattcatgacgcgtacgcactatgtgaagcatgtacatatccgatcggatttgatccgatctacagttgtgaggaatgtcatttcattctccatgaaaagtgtgctaatcttcctatgaagaagagactcgtgtttgcaaccacaccattcaaattagtgggagcaagtagtcgtgttcgtgatgtgatagactgtgggtactgtggtgaatgttctactggttttaagtacgcatctcaaagagggtgggagatagatgtacattgtggttctctttctgagccgttcgttcataatggccatttgcatccactatattttgattctaaggaaaatcactcttgcaatgcatgccataaggtaacggttcatatgctttgttgcaatgcttgtgactttgatttgtgtttaagttgcgctagtttgccattaaagataaggcatagaaacgatgagcaccctctcactctatcttgtggtgaaacggcgaatggaaagtattggtgcgatatatgcgagacagagttagatccaagtaaatggttctatacaagctttgattgtggagtcacattgcatgtggaatgcgtactaggagatttctcacgtctcatgccaggacgcatggttgatactgttgggggaaagaaattttatgtggttcttaacaatcacaacactcgaccattatgcagcatgtgtcgctctcgatgcaaggtctccgtcatcttaaaagcttgtgatgaagacaatgtatacatatgttctcgttcatgtttttctgatatggtttcagctagatcatgttgattgagtgtttaatttgtttaattttgtgtggaaaggatgaaacttcgataccctttatattttacaagatgagtgaattattcatggttgcattcgctagctgccctacaagtccaaattcaatatctgattttaatttgaacttctttactttgctcgtcttgcaacataactgagttgtgatttaaattctaatagatactgttaagggtttccatgtctctatattttatctatataaagatatgcctaagagtttataattccatcactcataagattaatgcaagaaaatatcttagagactacaaggttcaaagatatttgtttattcttagttatgttttctaagatttctctaaattttgcccgaattcacaacacagctttaattatcattatactcttccagttttatctgtaagaaactagaatgcaatcagactcattgttatgcgatagcatgatcacttatagttatgaaaatcattgttatacggtaacatattgaaaatattgaattgctatacaccgaatggccaagtatatataaccaaggtaaaaatatgtcaaaataatggcttcgcccgggttcgaaccggagaccttcagtgtgttagactgacgtgataaccaactacaccacgaaacctacatgcttctttctaacctcaacaatatatatatacatatagataactgtttaatattgtaacttgtaaccagtgtcggctaatttcgacttttgtagatctttttctgctctttctctctctctctctctctctctctctctctctctctctcttgtattatttctatctcccccgccgtcgaaagagaaacgtcgatcggagaacctttgaa

SEQ ID NO: 1526 - DNA, 3000 bp, Unknown
  misc_feature (1)..( 3000): cDNA_ID_2990403_gDNA_ID_1620413_Annot_ID_156318 3000 nt of promoter + ATG
tacattggattgttgtagatttatctttctcatgtaaagcaacatacaatgtatatttcatacttcatttatacatatataacttcactaagaatattttaatacatcaaatcattttattgtcaaaatctttcacatattcattcatagaagtatctcaagctcattattttaggcatcaagcacaatcttaacatttcaagatattgtgtctataaggataatcttaagaacatgatcaaggacatttggacgtgcctttggagttcttcatatcgcggtaacaagggcattcatctttgtttccataagtgcctgaaggaacacaatagttacacttctcgcaacatatattacaatacttgagacacctatcttgtcttcctgcctttgaacatctcacgttgcattttcctccgcatggtgctaattaatccatcatcacaatacaattttattaagaaagctaaatttctaatgagaaaagtatctaaaataagaaaatgcattgtgtatacttacacgaatccgcggttgagagtatgaacaaagaagatgtgatgagaagagagataataagaacttttacagccgggaatttcatcgtagttcttgatgagattgttttaataataatctgtttggagaaagtttgttactttgagaagatgaagagaaaactcgaaggtttcacacaatgcaaaaggagtgatggtttgggaagaaaaggaggttacaaaaagagttacttatagggaaattttggagtaggtgaaacgcttgttatctagtccatctgtcccaatttataagatttttgtggggcttaagttcaaagattaagaaataattaatgttttctcatttatagaaattcaactaataaaaaagtacgtcagaattcaaatagtaaaaaactaaggggttgttattggtttatgatttcaaaagagttttagtgatttaaaatgtcatgtagaatctgttgttattcaatcaagatttgttaaaagtatgttaaagttttgtgttattcatttaagatttataagaagtattctaaaatctgcataaattttgggttattggattcatactcaagtcattaaaagttttgtgttattcaattaaaacaaaaaaatttctcattgttaatgatttcaattattatgttattggttcatgactttttacatttttcttcacaaaataaagtcatggaaagtcatgaaaagtattattaaaatagagagattgtttgaaaaactttacaaaattatgaaaaactaatcaacaagattataaaaaactctctaacaatactttaaaatactttatagaatgtgattgaaatcatctaaattccttgtaaattaagaaccaataacgccccctaataaggtaataatattgacttgcacgtcaattcagttaaactattgtcaatatatactggtaaattgttttaaaacaatatgtttacaatgtttttgaggactaatactctgtttatataccttttaccatttattaaagaaatggaattgacgttagcttctatcaaatcatgttccaaacttttgtatcatatcatactaatagaaatgttacaaatatggtaaatttgctttaaagaatatctactaattctgctgtttgcgtgccgttgtataattgtattacagattcttgttgttgttatcaaagttagatatgtatatataatttaaaaatttgataaagaaaaaatacacatgaaatgatcattatttttcttagtgggacaatgtcgttcacgttgagcgaccatcgcgttaaagctataaaaagagtgacacacgtaatccgaatctaaaggcatgggaacttctacatctttctcctctttttttttttttttttctcttagatttcatttaatacttataatcaattttctaaaataaaacccttagagaagttggaagaaaaacaatccataagaaagtattggttgtttaaagctatgcatcaattttaaggatatcaatcaaagttaaaacgatggaccaccgacttattcactatcaaatatgaatgatgtgtgttttgtcacgatttaactaaagttagtagatcgttaatagatatcttcgttcgacgaatcttgtctaatcgagtgacaaatgggatgaattcaacttcatattttgtttggtaaacggtctccggttcttagaaatctttttagcaataggtttttgtctgcatgcttagatatattaaatcttctttttgatcattcacatactgtgtatatacacatatatgtaacctgcagagaatcgggaaaaaagtattttaactttaacttgattcattgtacaactttcaacattttcttcccccatcaactgattatagttctagaaatcattgttgcgaatttgttggcaaagagtagcttataagcatgtatatacttcagccaagttgccatttattttccatatatgctttgtgtgacatttgagtttttgactttcattttgcggaactataactatccataccacgtgtctatttctggttagtccataagattgatttatatttacgagcgtatcagaaaaggcccacaaggactcattaaagaagaaaggccaataaaaggcttcattctttctgggccatcggactatgatcttgctaacttacgctggaggtaatatcgtgcacgcgaagaagaggccagaagagaagttaaatcaggactggcgtattttagccgtccgccatttccatcgctctctctcgtttcttctctgctcatttactataaccaacaaggtctcttctcttctcttctcctctctgcatcattttgatccggtacgcattcttcgctgattcctttaggttcttcaattttcgatctctgttgtcttcagatgacacaaagcaatttggtttttgatctctgagtttttgtttgtttgttttcctcatttagattcgatg

SEQ ID NO: 1527 - DNA, 3000 bp, Unknown
  misc_feature (1)..( 3000): cDNA_ID_3062820_gDNA_ID_1620413_Annot_ID_156321 3000 nt of promoter + ATG
accaaatcggtttcgaaatcgatgaaagccggtcttcaattcccagtgggaagaatcactcgtttcctgaagaaaggacgatacgctcagagacttggtggtggtgctccggtttacatggccgccgttcttgaatacctcgccgcagaagtaagtgtttcccgatctggattttctagtaagattttttttttacatttcaaaatcaattttctgattcgaatttattgatctcaggttctggagcttgctggtaacgctgcgagagataacaagaaatcaaggataattccgaggcatcttcttctcgcgataaggaacgatgaagaattggggaaacttctgagtggtgtcacaatcgctcacggtggtgttttgcctaacatcaactctgttctattgcctaagaagtctgccactaaaccagctgaagaaaaggctaccaaatcaccagtcaagtctccaaagaaagcttaatctgctagagttttcgttgctagtttgtgtttgagctctggtgaatgtagaaatttgaagcttttggatcttagtttctatgtatttggtgatttagaatgttgttcaaaatccttttcctaatcataagaatttatgatctatctattatacgcttcgtctaatcttttggtccactcgtcgtaatgtcattagtgaatatttaataaacaactttgtcatcgacattaacgaacccttttattcgctgtgctaaatttttcttttaggtgaagccaaatctaacatgttctcttctctctttgttcgttgtaattccataacatctccattacgatgttttgcgattcgaggatcttgttctaaattattcgtcggaggtattgttgtctctcttcaattcggttgtttaacttgacttttgtgtcgaatgtcattagaattgttttagacaatctgtctaccgtagaacacaaagggtctattatgtttctttccgtgatgcgaaattgcactctaagtgtttgattaaatgcgtgaaggagaacactgaatgtgataacaccattgcagggctatcttatgacactaatgaacctgttttgaagaatgagtttgaaaagtatggtgagattatagaaggtaggattcgccaagaaagttattagtcttctacgaaattcctccatgcttaaaaccaatgcacttcctgatttgtatttgttggatgtgaaagttcagtgaaagtaatatgcgatcacaagagtgggaaatcaaaaggttatggttttgtgttatttgattcagaagaagctgctgcaagtgccttagcttccatggacaatcaggtttgtacacaaaaccaatccaaaaaaatacattttatcgaaaaaaaagacatgttcatacaataatcttgctgtcttttgttcagttattagaaggaagaaacatcagagtcgaatatgctcaacctaaaagaagtttataccagaatccgaaatgattcttctgattctcgaattctcaaggtaattggtacttcagatctctcaggaaatgcatttactttttagagttgtgacagtgtagaactctagaatgatttggtgaagagtctttagttgttgtgtaaggacagtgtgtgtgccctcttcaatccttgttacttttcagacttgttgttggtgcttctacttcctttgcagtttccacaaatattagtctgccattaacaatctgaaaacaaacaaccaaatgcaaagctcagtataatttccaaaagagctcaattaattacacaccaatgctgaatattttccttactttttccgtgaatcgattacgattatgccaaacaagcgattttctgatttaagattcattttgtttcatatcaaagccaaagatacatactacatttcaagagtgagtgaagattgaagaaatggatcttcaccttcccattcaaagctttcaaagccttttgtgcatcatcctcagactcaaaagttatgaatccgaaacctttaggtctctgcgtttgctggtccttaataagacgagctataagacagtagcatacaaacgacacaattagttcagacacataatcatagccgtaaaacattcgattctgtaatctgaccaaaaggcgcaaacagttgcctcagtgattgatctgtggtgtaagcagagagtcctgcaagagaacagtttgagaataaaaattcaaaaactgagaaaagcagaaaaactggagatgtgcaaagttgtagcatactgctgacgaaagaaagaaacctgaatttgaaacacaagtgagagtcttacctccaattaaacgacggcgcttggatatagacgatctaggctgtgataatgttaacgagatattaagaaaggcccaaaataaagcccattataatgatccattaaccagtctagtaaagtttcataaggcgccccaataaaaagcaaaaaccctaattcgcatcttgtatttagttctcttgttaaactttgcctcttcgtcttttgctccagagtttttgtgcggctgccattttcgatttccaaaggttagagagatctccacagctacgagctttattcctgtttcctttctaggatctgctttcatttctgctcaatcatgacgtgaaatctgcttttaaaattctctgaaaattctcgtagtttcatagtttgagctcgatgctatcgattaacattagtttcttggaccagaatacaattagatctatcgaaagtttgcttatagttctatgtttcgttgattgccatttggttattgttgtattcatttcaatattagaatcaagttcgttgattgtcgatttagctgccactatagttgtgcatttgaagcatgaatcctctttttaacacaaaagagactaaatttgattagtcaatgtttattggtgttagcattagtacgtttggtatcggctcagatttgttgttaatttggtatcaggttttgagctttgaaaaatg

SEQ ID NO: 1528 - DNA, 3000 bp, Unknown
  misc_feature (1)..( 3000): cDNA_ID_2138131_gDNA_ID_1620413_Annot_ID_156330 3000 nt of promoter + ATG
tggttattgattatgaaatccaacttgcagtttttttctgaacaaatgactattgttgtttgctttatgtactgttttatccgctgattttgtttcagtagctgagaattgtttggtattagacttgcaagaatattccggtatttttggaatagatgactattgctgtaagctttgtctacttttttatccactgcttttgtttcaatagctgagaattgtttgtgttagacttgcaaagatgctggtttagtttctaaagctctgttccatattgtcaactatgattacattgtatgtttcctcactcttgatcattgctttagattgacatatgtatatatgatgcatgatttgttcttaattttggcttaggttttgtaaatagtgtgacgtgaagtggagtacatcaatagtattacagcattcgatttgccataactgatttgtattctgcatcagtggatctatcttttaaagataagatcctttacaaaggatgaaaaatcattgaatgtgttcacttatgaaaaatcctctcaaataaaacattacacaagaataatcaatcattcttacttttaagttttcaagatttgcatcatcgaccatcaaaaactcccaatacacagacaggggaatctaggcaaacatgtgatgactcataccagaggtttcacttgcatcagtaaaatcctatacagaagataagcgacttcattagaaagagaaaccatcatcccaagcgcaagtgatgcagactgtaaaatcaaagagacgacaagtgatgcaattaaggaaaactaccaaacaattctcacagaaaatgcatcaatatgtttatacatgcattttcaagaaactagacagaatcaaacctcattgttatactagagtgtgatcggctatgaacatgaaaagagttagatggcttatgtttgctaaaaaaagtgtgatggtgtagaacataattgaatggaatccatgagaatgacaaagatattgctctgttcaagttggtggcttggtgattacttgataaagaaattccagccataaaaaacatactaaagctcaagaaggacgaaagtaaacgatctgaagcatgtgttcttcatgtcttttcggatccaatatatagctgtgacctgtgagcaatgttttttcattattaacacataacctgcgctaaaattttcaggcttgagattcacaacattcactttctctaactagtaaatatggatccatagtttagatgggcttaggagcataatcatttagtgaacggtttataagcccatttaagattcatacccttaaaaatggcttcgtccacgctattcgttagtagataaggattcaattttactctatttgccatttgggcttctaggcattttccttctacatcagcaatgtattttgtacgagtctaggtttcaccgtcaacatttcacattatggataggatctggttaattagcaagatttgtttaatcacaacgtgtccttgttccctgggagctacaagagttgggggcatgatgagaattttttcatgtgggcacgaaaattcaggccgtcagcacagcttgccgcacttattaattcgagaatcgtgattaacatcagattaataggaaatccacttggtttattaaacaaaacagcattaagtaatcgcatcaattagaagatgattgaagactaatctcttagctgttcgctagtttgacctttcatttaattttcagtgacaaagaacgattcaaattctggacgatatgacgacttctatattcaagaaaaataaattaattaagacttaatttgtggaacaattatttaaagttcaactgcctttgagaaattaaaaaaaggactatacacatggccggtcctattttgacgtggccaaaacgttttaaaaataaattggctctaactgttgtttagataaattcatttgacttctaggatgttataggattttttatatgttttatttaattagatgttttgttattttctatgtaaaatttaagtgcatttagtagtcatttctattttttgtcaaacaatagtcatttctgttatgtaccgatttttatgattggttgaaattttataaatttatatatgggtattaataataaatattttttatttaaaacaaaatcaagatggattattattttagtagaatctactagttattgaacattttagctgtccagctagagctagtaatttaagtatttaactgtatgtatgtatattaggaacgattcaaatcttaatgaggaaaattatattccaaccacgactaagtcaactaaattatagaataagaaacgatataaaaaattaaacaatgtttaatgtatagtatttaagctcttcgtacataggttattataattaacaaaacagagtatttttttttttttttttttgttaaagcgtacagagtattttcagaaactaacgttagcagtcgaagatttattcacatcgagttaataagaaacgccacttgagttattaaacaaaaccggtattaactagttgagatccacgacgatattttctttaaaaaaatgattcaagcttcaagcatgttagctgttagcgaaaaaagcctcctaacttcacatgtgagacacagaggaggaccttgtatggcacggaacggacaatatgttccggtatactatataggattagataaacctctataccaagattttttttaaaaattatacaaaaaaccacgattaatatctaaatcgctagaaacctttccaacttttttttttttttttatccccacccaacaccccaatttgtttttggtttgcgaaggcaacatatataacatacatttttcatatttttatttatttatatacaagaagataaatatattgctgtcttccggttcgacttcgtgatctcaccaaagaaacacgcaagatcacttccatcgatcaatac

SEQ ID NO: 1529 - DNA, 3000 bp, Unknown
  misc_feature (1)..( 3000): cDNA_ID_1388464_gDNA_ID_1620413_Annot_ID_156325 3000 nt of promoter + ATG
aatggtggttgtgttgaactggattggttatgttgccgaatataaagtgagatttgatttaaaatggattagaagagttatcatcttaaaaactaagacgaagttaattttgagacgaagttcatgaacattataactaaccttaatctgtttctgtttctgtttctgaagatgattacctaaaatcctaagtctcatacttgatacttatctaaagtatactactagaaaacaaaagtttaccctttcaatgaagatagagttataaaaacgttttcacgagatatcgctttgatgtgagatagcaaagagtcttaagacagtaactcttttgagaaattcctaaatgcctttcgagataatgatttttttggttcatttatcttagagattgaaaacaaattttactttcttgtttgatcaattatatatgtttggtttttgtgagatttgatatcaatgtcatgtagagaatcacgcattccaagttttcaactaagaaaaatacagatgggcttgtgtccataatattctttggacttggaattcttgacactatatctatgtttgtttttaatatctatatatacatttttgcagccattttatgaaataaatcttgtagttgggacttatttacaatggttgccattggattttaatatttgtttttgataattagaagaaaattcttcgaattaaatatttgacatttaacaattttcctaaaatctctctacattaactacacgattggttaataaaataaaactttcaaaatatttaatatcatttaattactacaaaattatcattattgatattgtttttctgcatgactattacaattcaattataatcatcaaaccgcagagatatttgatagcatttaattactacaaaattacaaaatatttagacaatgattcataaacatatgataaataagatcaacattaataaaataaatgaattttttttacgggacgggttagcgggacgggttagcgggacgggtttggcaggttgttacttaataacaattctaaactataaaataaaaatattttataaatagttacatagatagttacaaattgtaaacttttatatatactacctttaaaatataaattgtctccgcggtataccgcgggtaaaaatctagtaacgcctattatggtttgaaatatgattcatcacatattatatatatttttatttgtttgtagttttgtatgttttggggttttggctatgtttttctataaaaatcaacacaatactaagttgagtaaaataaattattgaaccagtcagcgatacaaaaatatctaataaggaagaccaaataatcagcatgaaaggtcgacaattaatgaagaaagtcattttgtagaaatgcaagccttttgataccagcatagcatacgggcttctaaattctaatgctcacataatgtcatttattgtttaagaaatatctaatatcgctcgaaatatgagatttgttgttgtcgaaaaaacataatccaaagagttatcaagaatctaaaatcttgtgttatcaataatctataatctcgaaggaagtatgctttggttcaatcaagtaacacacgtcaatcttaatcctattgaaacaatggtatagaaatatgcaaatacgatcatatcaactaagatataccgaaaccaaatatattgggatctttcaaaaggacacgatcgggaactctaactactgtttgagactttcctaaagttatatcgataactaacggtcaaatacctgcaaattttggatatatataaagatatataccgagtttgtgtataaacatgttgtttctcctaatcatacgttattggaaacattaacgcggtttgctttatgcaactttgaaacatttgctaatttgttgatataaaatttggctatttatactgtttagtttagtaaggaattaacacaaatgttttagcgcattattgcacatttgtgtgaaataatatactattttcgggaaaatcataatcgaaatagaattccaaaatttccacgtggcatattatgaaaggaatattccagctcgggtaagctggcctccatcaccggttatgatgaaaggtgagccgaaagtggagccaacctgagatgccccgcatgagagccatatgcttcttcgacctttcattctatattctttccttttaaagatagcaactattgatcaaaaaaaagaagaaaaaagataggaactatagaactatagtctttttttttcaacgaagaacaaatatatggttatgaactattcttaatggatggtcaaacagattttttgatttttttctaagaaattttgcatgtgaatacataactacagttaattccattcaactgttacttttctttgggtgaaacaataggttggcaacttggcatagatatcaacatcagagttttgaacaaatctatcatcatttaagaaatgatagaaaatcaagtattgtttttcaaatcaagaaatatcaaagaagaattctgtattaagtttagttctcatggaagccatagaatatatcagaagtttgaaacaaacagcaaatatatggaataaaaaacatagttattggaataaatagaatagttatttttttttgtttggcataaaataaagaaaattatttgttcaacaaattgttacagatttcacttatgtatattttgaactaattcttatttttatattaattaaatcaagattttacttttgaaaaataattaatgaatttatgaaacaatctctatgtaaataaaataaagcaaattaaaacgctcacacatgtttacttattcggactagagagcttccgcataaagctgaggaaaaaaaagagagaagacgcacaccgaagaaaacacacaagactccattattctcctgcttcttcgtctcttcaattattttctctgagactagctttgattcaacc

SEQ ID NO: 1530 - DNA, 3000 bp, Unknown
  misc_feature (1)..( 3000): cDNA_ID_2138101_gDNA_ID_1620413_Annot_ID_156317 3000 nt of promoter + ATG
atcttagtataaacaacataaaacgtaactaacttagctatctttctacattttaacccctatgaacaagaggtgggttgaacctattaggctattacatgtgacccgctaaatagccaaatgtgggtaaccacctcaaatcactacaaggctcatgtcaaactctcattaccattaatatccgggaatcaagtttatcagaaaatgagattgtcttgcattcaaactaagaaaagaaaaagaaaaaaaagcaagaagcaatggagatgagtaacgcaatgaatgagtaatagctcaatgtctacataattggactcgtacatatgaactcaataaaataaagcaaatggacccgatttgagaccagtaatggttttgaaatcatatatttccaagcgtaccaaaatacacttacgattaaaacttgaattttttttggcaacaaacgaattatatttttgttagtattaattattgtattcaacgaattacatttgattggccgtatactctggaagtgtgtaagtataatattttctttggcttacaaagcaaaacaaaaatttgatggagagagtcaaacaaaaaaacaaaagaagtaggtcatatgtttatccattcatacgttggttggtaatcctaaaaaccaacaaacaatcatatatgtatacttgtccaattatgtaaactactccattgataatataattgttaattattgactcgacttatctactgattatgaaactaccaacaaatgaagaaagtaaagggagtgtgaaaacaagaatcttaaggtataacgaagatttgttccgcgtggaaaaggcattaaaagtgccacgtcactctctctttttattttatgattttcgtatctcttcttctacttgcttcccacgtttccatcaagtttccgtacatatcttcttgttatctgatccacgcgatctttcaacgcgtacttttcacgtatttgtgttgtcatgcctttgctgggattgtgttagatgctcattgctgacggtagtttttagagaacattctagaaagaaactatttttctaacaaaaccacgaactttgttttctagttattccactttctagaatacacctgaccaaattagaattctagaaatgaattttaaataaaccaaaacacctaaacgaaaagcaaaccataggtttttggttttaacatatttcaaattcataaaagtgaaaccaacctacaccatattaaccaatatttattagagtttttatatgttttatgatattgttcaaaacttcaaaagagatttattcatataacatacctataccataccaatgaatattaaaattatgaattagtatccttatattatatgaagtcaatcaaaaaacttagaagcatttcaaacggaatcaaaccattcatatatgaagtattattattatatctagaaggtgttgattttaaactattccgtataatatatctagaagacggctccgcgcgtggggaatgcatcaaactcagagagtttaatagctttttttggttgacgtcaactactcaaaagagtttagtttttgatgtgtatatatccaaataaaatatctttaaaaagaaaataataataataaatggtttcgagaaaacacgaggaagattctcatccaaccgaaacgactctttcgtttttagtagtctcttaagctacgcggtgtcgcaaatcgtgaccacataacccgttttttccttcttttaccccttatctttccacgtatttacgttaatacctacactcttcgctgccacttccttacccaccaagtcacaagggtatattcgtcactttccacacgtctttggtccacacaaactcggtatctatatatagttcccaaacggacacgaacacatcatcacaactactatcacaccaaactcaaaaaacacaaaccacaagaggatcatttcattttttattgtttcgttttaatcatcatcatcagaagaaaaatggttgcgatatcggagatcaagtcgacggtggatgtcacggcggcgaattgtttgatgcttttatctagagttggacaagaaaacgttgacggtggcgatcaaaaacgcgttttcacatgtaaaacgtgtttgaagcagtttcattcgttccaagccttaggaggtcaccgtgcgagtcacaagaagcctaacaacgacgctttgtcgtctggattgatgaagaaggtgaaaacgtcgtcgcatccttgtcccatatgtggagtggagtttccgatgggacaagctttgggaggacacatgaggagacacaggaacgagagtggggctgctggtggcgcgttggttacacgcgctttgttgccggagcccacggtgactacgttgaagaaatctagcagtgggaagagagtggcttgtttggatctgagtctagggatggtggacaatttgaatctcaagttggagcttggaagaacagtttattgattttatttattttccttaaattttctgaatatatttgtttctctcattctttgaatttttcttaatattctagattatacatacatccgcagatttaggaaactttcatagagtgtaatcttttctttctgtaaaaatatattttacttgtagcattggagatttgttatgagattatcttacttagcatttagtgaataatctattagcctattttgccgacgtgaaaataccattttctatttaattttgattacttatcaactactattaagctgttattttcccccatcacgaataaaaacaacccaagaaatagatatttatttgaatttgaaacttacctataaatttagttgagctaatcaaaattaaattttaaagcatgatcagaagtggaattcttgagagtgttgtttgtgatctgtcaacatcttctgtccaaataaatggattcaaagaacatggttcaacaccatctcagtgtcacctttgcgc

SEQ ID NO: 1531 - DNA, 3000 bp, Unknown
  misc_feature (1)..( 3000): cDNA_ID_3062919_gDNA_ID_1620414_Annot_ID_156358 3000 nt of promoter + ATG
gattcagcctgtgttgtcttccctcctaaagtttttcggattatggaaaaaccattatatgaattccgtgggcacacgggtgaagtcttggacatctcatggtcaaaagataatgtaagcctccaaaatcttttgcattttcttatattaacttgcaaccattgctttaacggaagcgaaaaactgaggcattttgttatgtaatttcttggtgtagtatttgctttcggcgtcaatggataaaactgtccgcctttggaaagttggtagcaatgattgtcttggagttttcgctcacaatagttatggtatgcttcttcttctttttggtttctagatctctttttctttttcagttactacattgatcttacattacctgttgcctgcaactttctttttgcagtaacctctgttcagttcaacccggtaaatgagaattatttcatgagtggttcaattgatggaaaggttcgaatttggaacatttccggttgcagcgttgttgattgggcagatctcaaagacattatatcggcagtgtgttatcgtccggatggacaaggtggaatcatcggttctctgaacgggagttgcagattctttaacatgtctggagaatttttagaactggactctcagatacatttgcataacaaaaagaagtcttcaaataaacgcataactggttttcaggtaatgtctcctatgtctttccctttctctagatacttcgtttacttctcttgaaatttgtgagatgttaacaaatcgtacttgctttttccagttcttaccacaagaaccgactaaagtcctggttgtttccgcggattccaaagtcagaattctccaaggcaacaatgtcgtcagaaaatacaaaggtatgtttctttttatgtctccttcaactttcattttcttttgcatagctctattattgattctaaactaatcccatctctgttttttcaatctttaggcgtttgcaagacgagaagcctcacatcagcatctctcacatctgatggaaaacacattgtttcagcttgtgaggactccaatgtatatatatggagcaatgatgaggaatcagaaaccaaaaagattcgatcttttgaacgtttctccgccaatgcatcagttgcagcaacatggtgtggattctcagatcacaacacaactctcccgttttcttctccatcatgcttatctcacaacgaaggatttgtccccggatcaatatccaaagggagtgcgacatggccagaggaaaacctacccgcaaatcctctgtccacatccgcgatgaatgcatctcattacaagtttctcaagtcctcttaccagagagcatccagctctctatcttggggtatggtcatagtcacaggtggttgggatggacagataagaacatttcagaactacgggttgcctgtgactacttgaaaaaacctgtttcgttttcccaactttggaaaacaaatcagatgccattgttcctatcttgataggcacaagcacatggttctagcagatcatgaagcaatggtgggtccaaaaccagatccactctaagatctctggagatacatcaattagtcaaaaagtgatacaattctgttacttctcctcaagatttatcatcatcttgtagaaaaatctttgaagaagtggtcagtgggagaggtttcaatcggttgatgtagacgcaggagatgataaggaacagatgtttctgtttttggcaattagtggcggttggagatggtttttagacagtacggatttgtctgaaaattgacaggcgattattgtagggtccaaaaccaagagaggcaaagtagtgatcatgtaaaggagtggttgaaggagaaagatgttgacgttacttccacaagaaagatcttccaatgccttctcctaagatccttttttcaatttaggattttgtattgataaatttctaacgtagtgattattgattcgttgattatgtgtaatttgagtctctaacgtgtagatgagtttgttatatagctttgttctagatttgatttccacttattataagagacaaatcaatagattgtaagagctctccacctcaaagagaggctccggagatttgtagctgtaaattttgtacagagtaaaacttgttttcttccaagtacatacagttaaaaaaaactagagtttgtggtgtaacatgaattacaagaattgttgaaacttgtcttggcgatttacccactctttgactaagcagtaaaagaaatcgcaaatatatgagaacacatagtaaatgatgatcaatgaatctgaaaattttctgattgaccaaatcgagataaggtaagagtttgtggttgaatgttaggaaattgttgtgtcaaacaaattagtgtgtgcaatcatgaatgatggttttgtgctctagggttttaacttttaattgacctagaaggatccgatagactatggaaacaaaaatcttactaataatattccgagtgtatcttataagataaccttacatttgtagaagatgttctcatactaatcaatttttttaatatcttttattagcttacacaaaataaatataatcatttattatttaaaatcgtttttaatgtaataaatacaaatataaattttattttaacataaataaaaatatataaaataaaatatttactattaagctattaattacgtatttagcatggtaaatcatatattttgcgtgggttagaagtcatcaataatatactgtagatgtttaaccgatgggctgcactacttgatattatatccaaaaccgatgaaagatttacaaatggaccaaatagtaatcaggcccaatgggctaaatcgtatatagtctgatattatgatctgtcatgccacgtcataggcatgatccataacgaattgataaaactctatggttgtccaagttcgaacaaaaatctgaaacacacttccatg

SEQ ID NO: 1532 - DNA, 3000 bp, Unknown
  misc_feature (1)..( 3000): cDNA_ID_2046241_gDNA_ID_1620414_Annot_ID_156379 3000 nt of promoter + ATG
tgatgtttataataggaattagggtttctggtttgtgtttgccattttagctactggtgagattttgttctggagttagagtttcataagttccaccaatacgttaatgcttcattaacattactatgaattagttttattttgtgattcttgagatgccaaaattgctaatacgagaacaccttcaaacgtttggtattgatgaatgaatactgatagagttgatgcacatagatgtcatcattgtgaatatccatggttgccatttctctgtagctttgatggtaatgattatactacaattgcatgattaaaaatatgctttagaattagtttttttgagaaccttgagatgccaaagttttaacatgagaaaactgccaaacattttgttggttgaattgagtgttagctttgtgaagaaccgtagcagcattttctatgtagctttaaacgtataggatactgacattggcattgactgttagatttgatctctctttttctacaggcgaagtcttttcatgactctctggatagaaggatctctactcttgaaagcttgagacaaagtgaagctcctcagcttgctgagacaactgaatagtaatctgtctcgacattgaacactctctgcttggcaatgatgttttgagttgagatgctcttttttcggttttatgaataacttggaagttcttgtatgactctactgttataaaacaatgaagtttaaggtagtcgacaatggattgaaacttgctgtaacacttgccatgaacttgtgttcgatcaattattttggatctaacattagtagaatcttgttcttcagaaagatgaacttttgtctagaccatcttcaaagctagggatctagatacatctttctgaacagaagatgcaacagttatggtgaagataagcaaatgccattgactgtaccaagaacaatttgatatctcatgattaggtctaggccggcccaaggagcccagtgtcctaatatgggcttcttggtgggttggaagttcaatatctctaagactctcacgggtctggaattttatggttttgcatgtaaaattacaacttcaaaaataattgcaaaagatcaagatatatagtcatgctagtatcttactattgcaccatttagattcaatgtatgttattgacaagagaaattggcaaacaaacgaaaaaaacctagctattggcaaatgtaacaacaataacatgtttttcttgcaatgtcatttctcaattgaaaagatcttagagttaatatatctaccattcccgttatcactttaagaagaaaaataatctagtttcacataattaaagaaacacaataaatggggaaaagaaagaaggaatcataatggaaagacatgtcgagagcacatggtgtttgtatggggacagattccaatgtaagaaagaaaattaaataaagtggaaacaataatatgaagaaaaaaagagagtgatgcatttgtctccttggcggtggtatggtggcttcactatcacccgacacctcctcaaatttggaatacacctaatcaatcatgattatattacacacacatttcgttatgtagatacgacactcaatcacggatcattttgttgttccatcattttcctctttattagtataaacatcaaaaaacattttcgaaaacgtaaatgttggatgagactttgtgatcgcatccaaaccacttaattatttaaaattgtaacgatttttgttattttctacatatgagatttttttactatagatagataggttagtgtcacaaaggtagcaattggtttgatggatatttttacttctatagtttttgtcagactccaatgaacttactcatatgtcacttttaattggatgtgaaagaagatagagcatcaatattgaaatggcaatagactgagaagtcagaataattttttgaaaataaaggacaataagagagtgtccacatcaacttttaccatcttattttgtctggtggcttctgcttctttggatttaaaccttgagacaaatagaaagacgttcttcacttggctacctaacaacttcactttctgtgctcttgtcacaatcttaacccatttttccttacatctaacgtatatcattgattccttttgagaatttccatgttcaagacaatgagagaatatatttacgcaatttgatccaaacggtttaatttgtttattagtttgttacactttgtgtaaactatgatattaaggtaaggatgttggccttggatcagttcatgatgttttttagattaccaaaaacgttttagacttttgaccataactcttttgtaagacagaccatccctagtacactaatcaaccttgatttggccatgggatctacgagtcggtttgcggttaatatgtcaacaacgacaaaaacaactgatggatatgagatatgacggtttggtcatagctaggccggtccttggaaggctctttagggactgagccatgtcctgatttttactattacatagtaacattgccatattaaactctacatcaatccacaaactagattcatagaaaacatcccccaccgttagatcgttacatcccctaagtgatatgatattgatctacaagatgggtctgtcttttaaggattgatccaaatgtcggaagcatggaagcatagtataggacaatcttggcggcaacccatcactactccatatcctttgtatccacccaaatctctctccctctctctctatatatgttacattagtatgatatgaaagtaaaggcaagcaacgttttactcattatcttctcaccaaatttatagcccacaacggatcttttactttctttcttttgaaataagtcacatgttcttcagtctcttctcatgataatataaagggcaaaagaaaaatctcacaatctttacaagagtttttaaaatctctaaccttc

SEQ ID NO: 1533 - DNA, 3000 bp, Unknown
  misc_feature (1)..( 3000): cDNA_ID_2990620_gDNA_ID_1620414_Annot_ID_156378 3000 nt of promoter + ATG
gactgatcaactgctaagtaaagaaagcgtcacagggtgtttctagctagtcaaagacgatcccgacttgacatgttttagagattcttgggaattttcggagtttcttgacgatttcatcttttgctgaacaatactgcaaacgtagagctagacgtagagtgagtttcttcagggttgtggaattctctaggaagtactttactaacttcatccttgcaacatatactaagatgctgcttttgatatcgacaaactctagtgacgatagcaaacacttcggtacagatgaaaaattgatatgatagttcccattcaaaagcatcctcttagagttactattagattcctgaggataacaaagagagagacatataataaactcagtaaaaaatgataagcaaaactatatagctcgatagggttaaccaaaagcattaccatgatgagtgatttcaagttcgggcagctctcgagaaaggttggtaaaaattgcaaatcagatactccaagagtaacactcaagcgggacatgtaagaaaatttaggcaggtgagggagcggtattaacgccaagtatcggtacatgagctggaaacaaacagaaaagaatgtgattagtgatagaaacatgtccaagatctctgcattgacatataagataggtgtataccatgaaagctggtgaatgtattgtcatttccataacacttaaaatccctggaagaaatctgtcgatgctacttctcattgatgtaacgcttgtttcatcaaaatgccataaaccaaagaggatagaaagatctaacttgtcattagaacccaaattgtttactatgaagcttttcgatacattatcgttaatcctcaaagagcatagtagaggagcatcaatcacaactcccgaaagagcaacctcatggaggaaagaagagactcgttttaaactgaacctctttagtgactgagagtgcacccgaaagacttttctatccatcccataaatgataaccgttaagtcttccaagacagggcagcaagagataagtttcttgaaagtggattcattgggatacatattatcttctaaatgcatagtcttcatacaagggaaagagacaaacttggcatcgtatcttccttcaatctccgactaaaccctttggaacaatcctgtttcgatttctttctaccaatcatggtgttgatcattctctacgtagcgaaattgaaaaaataaatttcagagaaacaatcaaataaactatcaaacgaagacttgaagaagaagagatctcaccgtgattttggttcatagaggtcaatgaaggttactctttttttttaggggactatctccacaaccacgtagttttttctatgatagttaaggaattaacggcgtcgtttttgtgtagcttccctggtctcaactattgatagaaaacgatgtcgttttaatttgcaatcaatttgaaatttgtttttcttatcgtattcatttatttcgatagtctcttgggaatatgttattttactgtaaactttctagagtaaagatgagattgagagatctaaataaactttttaaaggggttttagatcttctgctcttataccatgacaagatatgaatatcgaatgaattggttgattattgatggacccttaggtctgtatttatacaagttaagaatcggtaaacctaaaccaaaaggaaatctaataaaagacaataatacatagtggaaagaagaaacccttactaaagtgagtctctttagtgattgagagtgcacctgaaagacttttctatccatcccataaatgataaccgttaaatcttccaagacagggcagcaagagataagttccttaaaagtggcttcattgggatacacgttatcttctaaatgcatagtcttcatacaagggaaagagaagatcctgcctttatccaaggacacctcaaagagtcttaaggaaaccagtgcctcacatttataaagattaaaatgaatcttatgaaactgaggcagaaactgaacatctagatgttggatcttacgcttagctgcagcatcaatccatgacttgagataaaagccatcttcttcattttcactaatagttaacttgagcttgtttatgcatagaaccctattggaatcgaaatacctatcacaaaaactcacaaaggtattgaaatcagagaaatctcgggaatccaattccaaactaggaaccaaaagccagagacttctccatcttgtggataaaacgcttgtcttaacaacatcctttgtaggaagataattaagtatttgacataacaaagattcatagaattggcttattctgtcttccttcaacctctgattcaacccttttgaacaagcctgttttgatttctttctcctcaccatgtctaattttttctctagataactttatctgcataactaaaattggaaaacacaagtttcagagagacagtttggttttgaattagatattcattcaagttcgacttaacctaacgtcccaatcaaaattctcagtctagtaatgtaaaagatttcaaatcaactaaggcttaaaacatacatggtgaccaaaagctataaaaagattcaggcttttggacctgtttctgatgggtaagaacaaaacgatatgtagaagaagaagaagaagaagaacttacggtgacttaggtaatacgaaagaggtcaatgaaggtttcttacatttttttttagaggaccagtacaatcataatgacgccgtttctagtaaataaacgccgtggtttcactgctctacgtaattggagtattgaaaaccacgtcgttttgatcagcggactagtctctcaagctattctaagaaacgaggtcgttttgattcgcggttggtctttctctctctctaaagcagaaaattcgtagaatcggagagatttgagaagagaacgaaggaagaagaagaagaggaacg

SEQ ID NO: 1534 - DNA, 3000 bp, Unknown
  misc_feature (1)..( 3000): cDNA_ID_2046255_gDNA_ID_1620414_Annot_ID_156375 3000 nt of promoter + ATG
tcttgattattcattaaattctattagattttgtgtcaatggtgatactattatttgaggaattgttatggaaaagttattgaattgtttgtttttatcatatcatttatcaaacgaaaacttgaggaaaacttaggaatgtttgtcacatcatttagttattaatattttttaaaaaattcaatgttgttatcattgttatgtttttagtaaattatgaatactttagtctattgtaaatataattaaattttcattagtttaattttaaactagttatgttgaaaatcaaaaagattaagtagaacctctgagcgtgtttattcatttttggaagtctttagagatctactgtatgtatcttattgaacaaatatcaaaataaatgactagtaaattataaggaaatgtagaaaaatatagttaatagattttaaaatataactaattctattacagatagcatattatagatatgtgtagtgtttccatatatagcaagttagcatgatataggaaaagatcttaccaaaatttcaaagctactagataagatcatattagctaaaataaaataagaaatatagcataatttatttaatggaatgatttataaagagtgatgtgtaagtgttttattgatttattacatatcttataattccatctccttagatctcttcccaaagaaacaaaagcatatagagttatgacacttggtctactcagccttgtttttggagaaatctttttgcatattatattatatatacttaagaagtttcataagaaactacaccaaaaaacaaaagtattcttgatagctatctagatctcatatacaatgtctttacaatttttgacgctcatctttctcctttctgctgctgtgatctatcacatccccgtcgtgacttgcgaaccatggtgctcggcgatgccttcttccacacctgagcagttacaagccaacattcagcttgcttgcagtcgtgtggattgtacaccgatccaacccggtggattttgctattaccctaatactttactagaccatgcttcgtttgtcatgaactcttactacaagagtcaaggtcgcacttatgctgcttgtagcttcggcaatactggttaccttatttattccgacccaagtactggcacatgtgaattttaaatttaatcgaaaaaaacatagaaatcttcagcatacttatacatttttattttgttttaataatgggtttctgtttcggactcttgtatttccaaactaaaataaatgaaatagacgttatttaataatttattctgaagtttcaatgttcttagtgatgacgtcttttactttctagtactattgttgtggttcaagatcaggttgttttttgactcgttatagtattcaaaattggagacttcaaaaacttagatttgttacaaatagtgccttatatatgtaagtcttgtcaccaattataattacttacaaaaagcctttggagttaatcgttactaaggtgtagagtgcttgtgttaatattatcttacacctgacttgttaataatttcaaaataaacttccaactgattcacgaagctatatatggagatgagtttttttttttttcttatgtatctacacaaatcatcatttatctagtaaattcaactcatcatgtaaactcttttagatgtaacgtaggagatgttgtttaatggtttgtacgtactttagtggattcgggttacaaacaaattttctgacaaaggaaagtacacgcatgagatgtattcaaagaggggatgatcaaaagatatataagtgatggttgaagaaaaagatagtataacgaaatgaaccaactgcctagatttgtaaccgcatgcaaaaaaaaaaagagtcattgatttgtatgtttacatacacaaacatagaaaatgatcagagttcttaattattcattaaattctattagatttcgtgtctaaatggggatacttaacttgaggaattgctcccacaaaaaaaacaaaaaaacttgaggaattgttgaggaaatcttaagatattattttttgtcatatcatttaccaaatgaaaacttcagaaatattagccacatcatttagttattaatatttttaatttttttaaatggtattattattgttatgtttttagtaaattacgaatacttgaatattgtaaatcaaaattttcattaaattttttattagtttgggagatatatacttataaaacctttggccttatcaacataaacttttgaccaaataaaagtttaaaatattccagttcaattaactttgcccaaaaataagtttaaatgatctaagagttggaaaaaaattggaagtaaaaaacttattaatggtttgctaaaatagtttttaccaaagcgagattaaaaggttaaactcgatctcctacgtttgctaaaactcagcccaataggcccgtacactaattcggtttgggtccaatgataaaatcaatatttcttaaaccataaattgatctaatttggtttaatttagacttaaacaaatctttaacaaatcaaaccgaaactaaacccaaaccgaaactaaacccaaaccgaaactaaacccaaaccggattaaatgggtcaaagaaaactcagcccaataggcccaacagaacctgaaacgtcatcttcactctcacgagtaaagaaatttgctaaactgattgattctgtaatttcagcgagtcgtctcgtctagctctcacttttgttcgtctcttctgcgtcaaacatttccaccattttcgtttcttaaacctttcttcagctcttctcttcgtcaatcgtgggttctttcatcatctctgtaaattttctgggttacaatactttagggttttttcttgactcacatttccgataaaccctagttttttttttcagtgcgatagtggaattgaagtctcttcggtgagtttctttacta

SEQ ID NO: 1535 - DNA, 3000 bp, Unknown
  misc_feature (1)..( 3000): cDNA_ID_3062907_gDNA_ID_1620414_Annot_ID_156364 3000 nt of promoter + ATG
cttcaagaattagggtttcgttttgaatcttctctgattcccaaatccaaagatatgaagagatcttcagggagaaaggattcaaatttcatagaacaattgatactttacgtcgctagtgctgcattgagtagcttggttctctacgttggtctccgtcaacttgacccgaaccgtgacgccgctaaaaagtctctcgagcacaaaagagaaatcgccaaacgtttgggtcgtcctcttattcaaaccaatcaatacgaggtaattttgattctatacagttctctaattgattgaattcgtattcaaaatccaatcttttcaattgtttattgtgaaaacaggatgtgattgcgtgtgatgtaataaacccattacacatagatgttgaatttggttctattggaggattggagtcaattaagcaagctttgtatgagcttgtgattctaccattgaaaagacctgagctttttgcttatgggaagttactgggtcctcaaaagggtgttttgttgtatggtcctcctggaactgggaagactatgcttgctaaagcgattgcgagagagtctgaagctgtttttattaatgtaaaggtttctaatttgatgagcaagtggtttggtgatgcacagaagcttggtaggtgtagatttggagattacattacctgtctattggttgtgttactgatttatgttttcttcagtgtctgctgtgtttagcttggcgtataaactccaacctgctattatttttatcgatgaggtggatagctttcttggccagcgacggtcgactgataatgaagcaatgtcgaatatgaagaccgagtttatggctttatgggatggatttactacagaccgtgagttgaaattcttgtcctcattgttctgtttagccatgtgaactatgtacagtctgaggtttgatgttttggttttatagagaatgcgagggtgatggttcttgctgcaactaacagaccatcagagctcgatgaagcgatattgaggcgttttcctcagtcatttgagatcgggatgcctgattgccaggagagagcgcaaatattgaaagttgttttgaaaggagagagtgttgaatcagatattaactatgatcgtatagctcgtttatgtgaggactataccggatcagatatttttgaactctgcaaaaaagcagcttacttcccaatccgagaaatcctagaggcagagaaagagggcaaacgagtttctgtaagtgataaaccgttttttagggaatgtcaatgttcccttcatccacctgatttttaagtaatgacatctttgagttacctacatttcacaggttcctagaccattgacacaactggacttggagaaggttcttgctacctcaaagaagacacaagttgctgcaagcgagtacactggtttaagctctcaatcttctgtctggggaagtccaagcaatgccgatgaggtccaagcagctataaacggcatctccaagctttttgtctcgcagcttagaaacattcagccagattctcaggattcatatcaacaacatccttcagaaggagattcggaatagaagcaaactcttcactagagcttcgtatagtccaaaaagagtacaacccaagaatatacactttttgtaaacctcatatttctctgaataagttggagcattgttgccgtaagatgtttttagaaaatttaattcatgtctcgttcaagcaatgatctatacatttaccaatttggttttcttcaaattttgaataaaaatgttagcttttctttttcttctttgtaaaaatgacatctttagaatgtttataagatttatggatgtttatgtcagggaaaacggtcaaaatcaacttaaactatttgtatgcggtgtttttatacccagactctaatgtatggtcgtttcctatccgaagtgattaaatattcaaattcgcaacatgaacttatcaatattaggtcaaatcaacattgactttaacaatgttagtcaaccgttattattgcgatgatgtgatgttatacaggaaaacgtggcaaaaatctccaaaaaaatgtaaaattgtaacaagcatattcaaacctgcaacctcaagacgagaatatttcacttttgaccactcggatccagcaagttcttatgttactctgatgaaattcaaatttggttttacgaaaatgagtttttaaagcttcaaatttgggaataatcagatgcaaatcagcccgtataacaccacatcatcgtagcaatatatgcttagtcataagaaatcaatggtttactaacactataaaagtcaatgttgattttggcctaatattgataagttcaggttgtgaatttgaatatttaatcacttcggataggaaacgaccatacatttgaatctgggtataaaaacaccgcatgcaaatagttcaggttgattttagccgttttcctgtttatgtcaatggtattatctgggctttgatcggtacttataatataaatgggcttgtgtatcaagttgatacaaaagaaaagacttttttttttcgtgactctgttgatcgtctcgaacccaactgtcagaatcttcgtcgatttgatcgattcttcttcgtctctctccgattgaaataaacccttgatttcactacagaaaggtacacaatttcttagttgttcattcgaatctaaactttgtggatctcagtttggtctctatcaagtctggtttctcatcgttgaatcattaccatttgatttggtcttctctggtgtttgtttgattactttttcatgaattgagattagggtttatctctgtttcctaatttgaatcagctctagcttagaaaccaaacctttctggtgtttcaagttgaaaatgccactaattttgtctcatttgttggattcttatgctctgaacagttttttttttgtgatcgggaattgaatcttcttatcatg

SEQ ID NO: 1536 - DNA, 3000 bp, Unknown
  misc_feature (1)..( 3000): cDNA_ID_2046276_gDNA_ID_1620414_Annot_ID_156367 3000 nt of promoter + ATG
atctctcacaatgctaatatcaatataaatacgatagaaaatgaaaatgacatgttttattcttcaataactggtgtgtaaaaaagtatcgtatgaaaataactgaaagtgccattttataccaaatcatagttgcttggtgcgtatcgtttggcataaagtgaactataatttagatgtgaaggtccaatattcccaagaggcgaagacaaaaattgggtagacttaaaagagtcaattgatcaaacatgaactgaacttgggtaagatcatactttcaatcattagaaaggatccaccgagaggtctagctatgaagataggcatggtcaagctgagaaggttaggacgtaattagtaaatcttggttatagatagatagtcatatggttgatcttgctttctcacacttaacaccatcagttgaatccaatgttaaaaataggtaattctcagatgcagtacctcataaatgttgtaaaaaagtcataaataattattcaaaggaatgcatggaagaagtgaattacatatttttaaaaaaaatataggaaaagaaaagtaaagttcgtacaaaagagagtagtattattctctttttcttctccatagggcctcgtaatatctacttagcatacgaggacacattaatattcgatcatgtatatatatgcctacgactacgagacattcgaaagttattgtctagtggtttgtattcacacaatttccgtgttaacagttttagttccatttccttcatatagagatctaaatgatactactacatatcatttagtttaaggaaggacgatgtaagaaaataaaaatctaatatacgagagaattgtaacacgttcacttcataactagctagctagtggtacttaccagttactaccccaactctagtcaacactacattaaatactataatgtgaacaaaattattttgaaccaacggctgttacagtagtttattcaactttatcaaccaatgcattaaattgaacatatttctggccgattgaaataggttgggaacgatcttataaaattcagtcttaaacaagtcttggttttcaaaaatgcaaattcattcgtatgttcttggcaaaaaatggtttaattggtttgatctgatcttatcctatcacgcaggattggtgtaatataacgcaccaaattcggccaggaaacgtccgaatataatagtccaattctacttatgaatttgacgtgttgacgtaaagaatcaaaagtcgaacttattgaataatttattcgactttaattttcttttggggttttggtatgtttgtgaccacatggtatggagttgacatttaccattttcttgattgactacctaagaaaattttaattattattcacattatggagagttatgtttccatattttggctttaatattaatcatgtggtcaataaaataaagaggatagttatggcataagattgtccataatgtcatcatcttgtttagtaaaagacagtcacatgaaccggaatctcggtttaccaaacttttcactttttcagtttcacatgaatgtcaccagattcattgagttaaacatgtattttaatactataaaaggttaattagttatgatatcatatttatgacttttaaaagacttttgatattgtaatctgtaactagttataagttaaccatctcttataattagaacaaaaaaaaacttaattatggatgaactgattttaatggaaaaaatatttagaaatagaaatacattcataatttatatctaagtctaaccaaaacacaaatctaaagttacgaataaatcatttcaagtgtaattttactaactatttgactcctaatcttatttcatcacctaaactcctaattgttatatatttatgagagataatgacatttgttcctctacatactaatctaatggttgaatagtcatgtgtttgacaaacttataaagtttgatttttcgtatgtgacatttagttatacatccataaattatataactttcttagtgagatatatgaaggttatatatgtggagtatattcttaataattaattgttaccctactttttttcttttcggtgacgtaacttttataaagtttaaccccttaatgattattgtactacataaaccccaaaactcttttctcttttcttttttctttgtgtagtactgatatcaagtcaacgtgcggtacataagaacccaagatcccataaataaattcttcttggttttaagctttcttcttcatctctacttctctatataactttgagtagtctcaccaaagtccatttttaaaaaatcaactataccatttttagctattctttggtcttcgtttcgtgtaagcattcaatgttttttttcttttatctctttgggaaacgggagtgtggtcttcgtgtgtgtgtccctgtttcattaaccagttacgtttcattctcttcttttcttacgtttactacagatttcagaaagaaaaaaaagtgtttgaagcaaaagagattaatggcagattcttgagtcattaacttttttctaattcttttaattagatctctgaacataagagataacttgcgtcattattctatggttataaagattatgcacttgattaaaataatctctagttttcctttttctcatttgctaagcaactgtttctttttcttcttcttcttcttcttcagataattatgcttgggagtggaaagcaagaaaaattctaaactttatataaaattcccagaatcaattgatccaaaaagaggtaccatttttttcctctcgtcattttccataaaagtaagcttttgattgatatttaattattaaaagaatctgtcttttgggtttttgttttgacaaatttttgttttttcagtattgtcaaaaaagataatcaagaagaagaaactctgtttttttgttctgttcttggaaaaaa

SEQ ID NO: 1537 - DNA, 3000 bp, Unknown
  misc_feature (1)..( 3000): cDNA_ID_1020161_gDNA_ID_1620414_Annot_ID_156368 3000 nt of promoter + ATG
tccggaaggcacgaaagagcctggaatcggttggatgaccgctttcttgttctttacttgctttgttggtcttttagcattggttcctctaagaaaggtagagattatttaagattctgtctcattgaatttgtagttagagatgttgcggtaggccaaagtttgcgggtcagtccggcccatataagtgtgatatgggcctggccaaacccgctatagccaacataggacggagattaatattggccaagtttggactattaatcccctgttggctggtttgggtctacattgctaagtgttcattatgcttctttttttggttaaccagatcatgatcatagactacaagctgacatatccaagtggaacagctaccgcggttttgatcaacggtttccacactcctaaaggcaataaaatggccaagtattaactcgattttttggcagtctcttagctctctttcaccactaattctagagtttttgatttaaataaaatctgtttatatgcaggaaacaagtgtttgggtttgtgaagtacttctcatttagcttcatttgggctttcttccaatggttcttctctggtggtacagagtgcggtttcattcagtttccaactttcgggttagaagctttgaagaacacgtgagtattattcttagttctattgactgtttatatatcaacagatagaaacagaatcttgatgatcttgaaaaaacttgacagattctacttcgactttagcatgacatacgttggagcaggaatgatctgtccccatattgtcaatatatctttgctttttggcgcggttctgtcttggggaatcatgtggccactcattaaaggtcttaaaggagattggttcccatcaactcttcctgaaaacagcatgaagagtctcaatggttacaaggttccatacaaaaaacactagtactctacaataaactccgccctttctttcgcgtactttcgttcttaatttgttcataactctttaggtgtttatatcaatctcattgatcctcggagacgggctttaccaattcatcaagatactttttaagacaggaataaacatgtacgtcaagttaaacaatcgcaactctgggaaatctagtaagtatacaccaaaaaaactatagaaaaatcgtcatttcaataatgtattatctgatgttcaaacgtaaatcgcagattcggagaaagataagcaatctattgcagatcttaaaagagatgagatctttgtaagagacagcattccattatgggttgcagcagtaggatacgcagcgttctctgttgtctcgatcatcgcgatccctataatgttccccgagctgaaatggtacttcatagtcgtagcttacatgttagctccatcgttaggtttcagtaacgcttatggagcagggctaacagatatgaacatggcttataactatggtaaagtcgctctgtttatcttagccgctatggcagggaaacaaaatggtgtagtcgcgggacttgtcggatgcgggttgataaaatcgattgtatcgatttcttctgacctaatgcacgatttcaagacaggacatttgactctgacttcacctaggtcgatgcttgtgagtcaagcgatcggtacagcgatcggatgcgttgtggcgcctctaactttcttcttgttttataaagctttcgatgtcgggaaccaggagggagagtacaaagctccttacgctttggtatacagaaacatggcaattcttggagttgaaggtttctctgctttgcctcaacattgtttacagctttgttacgggtttttcgcattcgcggtggcggcaaatctcgttagggataggttaccggataagatagggaattgggttccattaccgatggcaatggcggttccgtttcttgttggagggtactttgctattgatatgtgtgtgggaagtttgattgtgtttgcttggaatatgagagatcgagttaaagccggtttaatggtaccggcggttgcttccggtttgatatgtggagatggtctatggattttgccgtcgtcggttcttgctttggccggcgttagacctcctatatgtatgggcttcatgccgagtaaatattcgagttaaagatagctttttacgagtttttacttttttgtgtagcgacaaaaaaattagctaaagaattgtggaaacaaaaaaaacagtttatataggaattgtactttgtaagtttgtatacacaataaagtaataaactagtctctcaattctatttaaaaatccatgtcccaagtaacttctccccaaaaagaaactcaatattttagaataaggtcaaatggaattaaattccagaagatatttgccaaaatagtgataaaaatacggttaaattggtatatgtttttactgacaaaaggcaagattcttctattttaagatttatttctttctttgaaatctgctaaacgttgttagatcacactttatgtgtctgtttttttttttgtcaattcagcacacgtcatatttgtatttttcaaagtaccaaacgtggaccaaaataaaatctcgtcaaaaatggaaaccaaattttaatttgatttgcacaaagcccaatttgatttgtttaaagtcaaagcccaacttgaccaaaactacccctgctcatccaaaccctaagcaaaatatcgagggtagtttcgtattttgtttatattgaacacaattaagtaggtgaggaacctctatttcttccgtcttctgctgatttctgagcttcggagctatcgaaaattctgaatctgaaagggtaaagatcccatctttttccaaaaatcgataagggaattagtatattcgttcattcatcatcgttctgatgatttcgatttgaatctgtatctagtactctgtattatcagaaattttgattagtagctttgatgtgttcttgttttgcagtttgagtgaag

SEQ ID NO: 1538 - DNA, 3000 bp, Unknown
  misc_feature (1)..( 3000): cDNA_ID_3594371_gDNA_ID_1620414_Annot_ID_156371 3000 nt of promoter + ATG
atcattatacaatcttaaacctaacgacacttggtttttataatgcctttaattctctgccttctctggcgtgtatggacactttgacaaaaagtcgtcgttcgcttttatatcaagaaaactcaagagcaaagttataacaaagagcacatgattccaactttcttggtaatccaacggctattactcatccatatggtcgtcattggtcatatcgtgccgacatgatggtccgcaaactttggaaccttcttattcttttcgtaattaattttaaccgaacaaaaccgagctgatgttaacaaaaccaatcctggtctcattttgtttctattgctaacacataatactggaataacgttttcttatttgattatgaaagaatttaaccaactaaaaaaaaatctgcataatatttatcaagacgcaaaaatgtagaatttgtatttttgtctaaaaatatatatattaaaaaatattatgcaaataagtgaatatacaactgtgtattttagtatatatttttcatttttcaaatttttttttgcaatttatgtcattatactgtgttactaatcgaagtatgagattgaggttatgcttgtgttttcaaaccagttcctaattgaaccaaactttatccgaaattttcaaaaccaaaccattataataagatgaaccggatgagaaccaaaaccaaagtgagggcaaataacccacgtgtcatctagttattggacacgtgttgatcggcgtcgtcgtatgcacctgaggagccgcgacatccgcttactcggcaaaggatttgtttgtcattttgcgcttaggttacgttacctgacgtgttatacttatactataagacaacagttcatgggtccacgtttaatgacgtgtcagagtctttgaccattcgcttcgaagaaaaaattcatggagatggaatttgaatttttacacgagcatgttcctatgaataatgccttccaccttgcctctaacctcaagccacatcttttcttttttaagtttggttaaaagcaaactacaaaattttcagaatgttggattgaatataaatatgtattcataaatcaaattggtttaattaatagctaagaaggcaatttaaagtcttctaatctttattttgcttggtgggattatagtacaattatgaatgaagttggttaaaagaaaaaaaaaaaacatcaactttttgtgtttaacttatttaaaatttataaacaagaacctaccccaagtgatagaaacattataatggagtataacttaaacccaaattcttgttttcaaatatttaatagcctgttgaatgatttcggactaatgtgattatgtgaataggcaaattctcgaatggatgctatatatctaacacgttatatatagtatatatacatatacatttgattttgtttttaatacggttttataccttaaagtatgacttcttaaattgatataaagtcaaatatattatagaaaaactaaacaaaatgattacgttctaaataatagaatttaaaaatatgtgtttatgggggatgtaatttcactatctctaagattaggtataggtttgacctttaaatctttaatcgtgtttatccatttacctttagtcacggtggccaaacatcaagaatgaagtaatgaaacacacattacttcaatctctattcagattcttttggaaaattttgacaatttattggccacgcttccgatttttttattataatgttaaagagagtcatacacataatatgtatacttttttatatatgattaattatccattcaatttaccgagtcgttggctttttgaaatgccaaaggggccttgtgccagacttgccagctgatcaaagtaaaacagcaaccaaatctgatttcatatgttttaagcttagcttagaaggtaataatgtaaaagtaaaacagcaaccaaatcacaaagatcagtattctttgaggttggacaattgcttgttatcttaagaaaaacgtatgaaagtttttttggattttttttcaatcctaacattcttttgatagttaattagataattatttatattacacatacgagatcaatatatttctaattgacctctacattttttgtaagctatggcattaaatattaaacaacaccaaaatattttaatgcagaaaacacaagatttttttttgtcaagaacatgtttttcatatataataaaagatacagaaaaagtacaatagtattttcatatatcaatagttctaatatataagtttttaatacaagctaaacaattaaattagtttccaatatacttaaccagttaaagatagatacttaaaatcatatatatactctcttgtttttacatcatcataaatataggtgataaatgtaattatgtatcaactaatggatatacacaaaaaaataagacataaaaataatcaggtggtgtaaacaaatctcctaaagtcggtaaaaccctaccctaaatactcctccaaacacgctcccaatttttaccacgtcaattccacctcattcatcaattaacaaaatagaagacaaagcctttggctctctttggaaatgtgcgcgttaagcaaaaaaaaacctacaccaagtagaagtagtatataaaagagacgtatatttcctaattccgaaaccacctcctctaaaaaaccaaaataaaaaccttttttctctcttcatgcttagcctatcatgagcaacatccctagatctctcaccgactcagatctttctctatttactctcataatctcttctgctgttgatccttggcctttttctatcaccgttttttagcatcaacaaaactcaccggaaaatctctaacaaccaccaccgtttaacacttctcttcctcctcgtcgatcgtttttaaaccaatctttgtgtttcttgtttggtttttcggtgaaaaagattccttcttctta

SEQ ID NO: 1539 - DNA, 3000 bp, Unknown
  misc_feature (1)..( 3000): cDNA_ID_2046272_gDNA_ID_1620414_Annot_ID_156369 3000 nt of promoter + ATG
cagcttcactggtcaactgcaagctacgcgcctctacaagagcttgttctttgggatggtctagtgcaaatgtacgaaaaggttgcttagaaaactactgaaaatatgaaatctctttaatgaccatttaagcacttggaaagttgatgataagcgttcctctttctcagggtttagttagagccgttggagttagtaactatggacctcaacagcttgtgaagattcatgattaccttaaaactcgaggggttcctttatgttctgcccaagtgcaattctcattgctaagcatgggaaaagagcaactagagatcaagagtatatgcgacgagctcgggattcgtttaatctcttatagtcctcttgggctaggaatgctaactgggaaatactcctcttcaaaacttcccactggtccacggtaaagtactaatagattgctcaaagatcgacaaaactagccgttgtttcttgttcttaactatgcttgaacactgattaacagatcattgctgttccgacaaattcttcctggattagaacctcttcttttagcactgagcgagattgcaaagaaacgaggaaagactatgcctcaggtattatttcaatttcataagattcttgggaagaagaagtgttgaaacttgtaagaacgagttatcatttgttacaggttgcaataaactggtgcatatgcaaagggacagtaccgataccgggaatcaagtcggtaagacatgttgaagataatttgggtgctctgggatggaaacttacaaatgatgaacagcttcagttagaatatgcagctaaagaatcaccaaagtcaatgattcagaatatttttcagacaagatgataggataagagaagatgcttatacacatctagaccacaaatgagaacaatgtgtataagtagaagttttaatctacttctttatatatgcacatattgtgaagaacacagatagttttcttataccattgttatgcatatagtgatcaaattcctaagcaattagtccttcttccagtgcaaccatttaaacgcttagatttggacataatacccacatttcatgccggtagacattgctagttgtgagagacacataaacaaagttatcgattgtcgtgttttctgctcttgaaagctctctctctctatccatagtgactaaacttatcattgcaatttctgcatttacatagacataacttatctttcaagcaaccaaatgtttatccctagaacgtaataatgttattttatacctacaacttggccactagtcttgcttgatgtcttctccatccaacgaactttaatttcctcatttaaactctcattaactttcttaatcagaatattatttaaaaacaattatagttccaagaacatgcaagtatattttcataaatatataaataaaatactactactagtagtgctttattattagaataaattcttttccatatgcttttgtaatttaataccaactatattccagatttggttaatgacatacgcggctagatttaatagcatatcttcggctttatgtcagtcaaaaaaaaaaaaggtatagttattttttctctttattccgttacactttagtaagactcacaagtcacaacaaaataaacaataaacatcatattaatcaaatccttttcagtctttgtttataattatgctataaacaagtttaggtttggcttagttcaaagtttaattttgactcggttcatagacatttattattactaatcggttttaacttgatccatttgaatgtgtttactaacccttttccttttttttttgtttattgaaaacatctacatgtaaatcatattaacttgtgtttccatcttataaatttctcttaactttttatttagataaatattgaattatttagttgcccacttttctccatatgatcaataatttcgaattgaaaactcattaatatagatgaaaagttgtcaaatgaattaatttttgttattctgttatctataacatcaaatcataaaaatcaatcctaattaagataaaccctttgactatattgttagtatttgctatggaaatttaatatatatcattatcctaccaaacaaaaactattccaaaatagagtattttagaaacacctatatatattcaataaccatcgttaatccaattcttaaccttaccattgagtaaacgtaggtccattaggtcaacattcttatgattagatttgttctctagtagacataaaaattttactagaaaatctacaaaactaatcatgattatgctccttaaaagccgcggtaaagtgggaacgtaatgaaaatcttttagcttttgacatttaaagcttttaaccatagtaaacacgtgtcatttcctctttggtcatacccgatatcgcgtaaaaatccaccaacgaagactaaaacgaaacgacgcagtttcataattaaaattcacctaccaaatcgcgtggagagttaaagcgcgtgtagcattaaagtaaacgcgcgagtccacgcgcttaatgtcttaaagtaaaaaaaaaaagacaagagctgaaaaagaaagagcaaagtggttagagaggcttcagttgttggatgcttttgctttttttccttcttcttcgtcttctttcttcgtctctcttctttttttcagtttcggcgtgctgaagaagacgatagagtaatcaatcacagtgagagagatttgagggtaaatctgtccttttcttttcttaaacaactcatgcttgatttctgctacggcggaggaggaggaggaagaggtttacttttgcttatcaccgggaaatttccggcggtgattcaccgtcgatgataatgggttttattaaaagtgtagatctttgatgaaagcaggagactttttgatttcgattttgattttgatttggggtttaggtttaagtttttagagaatcagatg

SEQ ID NO: 1540 - DNA, 3000 bp, Unknown
  misc_feature (1)..( 3000): cDNA_ID_3062911_gDNA_ID_1620414_Annot_ID_156363 3000 nt of promoter + ATG
cgcaactattgtccatgttttactcttcaacggaaggtatttaactctatcaactcctcagaactacctaaattttactttttaatttttttagctgaactagatatccgagagtagtctttggtgaaagtttctaattaatttccttgcaactctcttttattttccagggatttatggaaacaaacaagaggtgcttttcagaggaacaagaaaatggatttccacacgagaatcatgaagaaaaactatagggaagttcctatgtggtggttttatgtgatcctcgtactcaacattgcgctcatcatgttcatatcattctactacaatgcaaccgtgcagctaccttggtggggagtgttgctagcttgtgccattgctgtcttcttcactccgcttatcggtgttatcgccgccaccactaatcaggtatctacttaaaaccaaatatgaaagtaaagaaactgaataaatttctaacaaattatttttgtgaatcttgttttgctaactttataacaaaatcatgaaaacaatgcacaaattactctagaaaaacccttgaaaaaataatatttcattaaaagaagtttaaaagaagttttgattaaaatatcgatattcttttacaaataatatttcattcatctatgtctcattcattgtccttttactatttagagctagagctcttttaccttatttttttgtaagtgacaacttttaatctaacaaggctcctattgctttaggaaccgggtttgaacgtcattacggaatatgtaatcgggtatctctatccagaacgtccggttgctaacatgtgctttaaagtatatggatacatcagcatgactcaggctctaacattcatccaagacttcaaactcggactctacatgaagattcctcctagaagcatgttcatggcacaggttattgcatcttaaaccatcattagttattggtttaaacgcgatataattatatactaacacaacattttcaggtggttgggacgcttgtgtctgtggtagtgtacacaggaactgcttggtggttaatggtagacattcctcatctatgtgacaaatctttgcttcctccagatagcgaatggacatgtcccatggaccgtgtcttctttgatgcttcagttatttggggacttgtaggaccacgtagaatgttcggtaacttaggagaatacgcagccataaactggttcttcctcgtaggtgcaatcgctcctttctttgtctggctagcgaccaaagcattcccagctcataaatggatctcgaagattcattttccggtcattttaggagcaacctcgatgatgccacccgcgatggcggttaacttcacgagttggtgcatcgttgcatttgtgtttggacactttttgtataagtacaagagacagtggtggaaaaagtataactacgttttgtcgggtggtttagacgcgggcactgcgtttatgacaatacttatattcctatcggttggacgcaaaggaattggattgttgtggtggggaaacgctgatgatagcacaaactgtagcctcgcgtcttgtcctaccgctaaaggcgttattatgcatggatgtccagttttatgatcttgtcactattaagtaaaaatcctttagtttttcttttggagttagttggtttattttttatttggttttgtacagagctctacaacagcttgaatattatttatttttagaatcgtttttatgtatatataaaaataaatatgatggattttcatttctatgtacttaacaaaacaaatttcgtcctttctcaacataactatgatggattttcatttctatgtactatattattaagtacaaattaaaaagcctttagttttcatttggagttagttggtttattttttatttgttacatacagagcttacagtagcttgaatatatatatgttggaaggtgatcaataactaagtaatatgaaataagacttatttaaataagattgaagattaaataattacaatttttgtttgaatttagttaataagatatttaaaatatgaaataagacttatttaaataagatttaagattatatttcttaagaattgattatacatgttatacatataaatatatatttattaaacattaaagtttaataatttttggtttatttgattcagtttgtttcggttacagtaaagttggtttatgcgtctttatgtttggtatagtttgagaacaaatttcaatctggttatgctttgatcgagttagattgtttcgattcaattacggtttactcggtcctcccctttatgagtccttgaatcaaattttaaaggctctcttaccaagaatcaaaatttttgaaaacagaaaaacattaaaacaatatgtaaatgaaaattaggattagcacaaattctcgaagttttatttgcatcttacttcaacatttgttaaaatataaaggacgttcatcatttgcaaataaagcagatattttcttaaccaaaaccaaaagaaacatttctatccataaatttagaatatatgtttccttaagattatttttacagtcaatgctaatctgcaacaaacaaaaaagtcttattttgttgtgtatccgtagtatacttccttctataaaaactatcaataaagatttgataccaaaattaacaaaagaagattcattgaaatactctactatatttcttcacccaaatgtctcaaattataattcaatctggtttcattcaggatctcaacacacacaactagaggaagcaaaaacttttctctgtgagtatatattttgttatttcctctgttttgtttcatatttttaattgcaaatcttaagaacggttacataaacacacgatcacacaaacacataacaatccgttttttatttcatgcatatcatagagacaaaaacagaacaccaatcctctgtttctgaagaccg

SEQ ID NO: 1541 - DNA, 3000 bp, Unknown
  misc_feature (1)..( 3000): cDNA_ID_2046312_gDNA_ID_1620414_Annot_ID_156359 3000 nt of promoter + ATG
aatttgttataccaatatgcaaatataataacatcataagtcataaactatagaaatcctgcaaaaataaaatataatatggatggtcgtgcgctttttatctataatttaaactgttgcttttgatagcttacctagctggcaagccacatcagcacattatagatgctacacaaaacacattgctgacaaaatcaataatagttctctttttacttggacacgaacacttcttttttacttggacacaaaactcttttactttatcttacaaaaagataaggagataagttttggatttgaactttatgcacgatatgatgaaatttttgatggctgtcaataagccaacatgttccttcgtttcagaacatctctcataagttctaaacattcgaattgttgcaattaagctcatagttttcctcgattagtaacaaatctaataatatctacatacttgaaattgtcgcaacggatatataaatggagagaactagctatatgaaaatgttattaactaaccggttaaattatgttgttgttgctgttattaccttatacaaaataaacactatggatcatagaataatatgtgtacgcatattctagatgatctataatataataactagactcatatttcagctaattaaattgtgagatattaaacttttatcaaaaaaggtttctcagtttttgtttttgttttaccttcttacaaattcttccgaagcatttttatttgaaaaaacgattgtgtaactaataggagagaaaatcaaatatcacaaaaaagagaggcaaagtctagattcttacgtttattttagaacataaaaacaataaggtgcttgttcgaaaaaaaaataaaataaaatacattaaggtgcttgtagaaaaaaaagagttttagattatatctaatagagtctcagattctcggatgaagatgaaaatagtaggaggagaaaaccaagttgcccatagtgtctattttaatatgatgatgcatgcatactaacatcattattatcaagaaatcttgaagatcttttgtttaagtaacaaacaaaaatttaagactcgaaataaataattacaaaaatgtaaatgggaaaacagatattctctttacaatacaagcctgcatgaatccaggtactctgccttgcaactctaaaggcagtagtatttcatcattacattgttaattatttgcttaattaatttctacttgtgaattgcttcaacagaaagacagacttagctcagcaatgacggcctttagtcgtcaattatgttgataaataaaaacttgatatatagtacaattcgttttaatcttgtcggtttagtttgtatttggtccatttaaatgattagatatagataactcatataaatcacatcattctcttaattatagattaaaattaaatcattattcctaattgcaatttttaatttgataaggaacaacccaaaaatcatatcctatattttaatataaatctctatgatgatcacttaaaagagtaacaaatattccttgtgtgctgccaaacaatcacagagtgctaagaggcaaataaaaaagttaaaaagaactttagtttattagaagatgaataattaaggtatcaaacaactggaaattagattgttaatgtgacagataattgagatcaaaggactatagttagaatctgatcaaacgcaaagcgaatagggaacatgccgcgtagtcatcatgcaaatatgtgggctccaacaaagcatgtaccacaaaatattttcttcaaaatatcaaaaagaaactctacgcataaacgattaataattcttgacccttaaaactataatgtaacgaaaatgaataaaactctaaaataatatcattatatttcataaaaaataaaatttaaataacttaaaaaaatgtttcaatagaatcacatataaatgtattaattctcctaatcatatacagagggaatgatttattactgattagtagtagtattacagagagcacgaggagataaaaaaaaagatctaaaattgataacaaatgattataattaattactacgaaatatttggtcgtgtgattaatagatttaattaccgaataatctgaagagaagaaaacaaaattgaaataaagacagagaggttaaataaggcaaagcaaacggtcacacacaaagattcgtctccaaaaactctctattccctccggacaatcccatcttcttcttcttccttattgtctctttcttcacagatttcaataaaaatcctttgatccttcttctcttctcttttccctttcaataataaaagtttctctctttttacttttttacaattctctctggttttggtttgtgtgtgtttctttagactctctaccactgttgctacttctttgggatgtgtttgttccaatttcgaagaaacctcgtgaagacgaaccaacccatgtacgcaatttttaatctttgttaccaaaaaatttgaattggtgatgctcgtgctcacgcatttttgttgcggattttttgttgcttaggatctaaaaatgagatctttcactttgttgtgctgatttcagcttctctgtgtgctaaataaaccattttttcttctcttttgatgggtttttggtttcgttgcttacacatttatcgacccacataagttgtttgtgtaaatgtctcagagagactagattcaatgggttttaggattgagattgatgttaaactctttttatttctttttttaaactgatttttttatctcgaactctgtgattgcttaatttgtaaacttctttaaaatattattgtctaaagtattatatatagtttgccttgtaggttgcttgtttggaagcaaaactggcagttggggaaattcctcttttgagagaaaagcattcttcttctttaagctctgtttcatggattgacaatagctcaaggaataatg

SEQ ID NO: 1542 - DNA, 895 bp, Unknown
  misc_feature (1)..( 895): cDNA_ID_2046438_gDNA_ID_1620415_Annot_ID_156391 3000 nt of promoter + ATG
gatcttttttaaatgagtttaccttatatatattattattttaaaaaaacttaatgaagtttgttttaattaaatgtaaatactatgttaaattttaatcaaaccaaccataaatttaaacatagaaaatttggatttgaaatagaaaaatatttttatttaggctactgtttaaaatatgaggtggctatataaaaagattaattattcaaaatttagtcttagctttgtttgttttaaaatttaacgaaagataagtcgatatacattttaaaaattaatttatattagagaaatatattgttacgtacgtgatatcacatatgagttattataacataaaacatccataaaacttagttttacagttttgtaaaaatgtttacaacctaatggaattggttccacaattattttaggtataacactaaaacaaaacaaaatgaacagaaaatatgatattttacttttcatcaaaaatatgtgaaaatattatatattctctgaaaagtgtattttactttaattgtatatttttcatcttgacttatctgttttatctacttattatcctagatttctcaagtcaagttcttttattaacctactaatacaatgtgagctatatatactttggataccattatcaaaacctgcattaactgagacagataaagtacggcccaactcggcccaacgtggcccaatacataccttactcctcctttctcatttcctgcgcgtggatattctctgaaaagcgtatcttcttctctctcgcctctctctgaaattaacttcgctagggttttgattttgtgtgtatttcaattcttgcaaaaacattccaattcagcaaaaccccaaaatctgggtaaacaacaattcggttatg

SEQ ID NO: 1543 - DNA, 3000 bp, Unknown
  misc_feature (1)..( 3000): cDNA_ID_3062939_gDNA_ID_1620415_Annot_ID_156408 3000 nt of promoter + ATG
tttcggtgtatggatgatcacaacatcaggcaatggtgtcatcggtccttgtttgcccttggggtcccagtcaagcatgatcttcaccttgagaccaagcacaccctgcacatgtgattaaccagattcaggttacacaagatctcactaggtagaatgtgattcaagaaacaggtttccactgtgaagaactgacctgtctaagaagaacatgcctaactgcagcatcaatgtattccttggttggctgacctgaggaaaccatgtaaccatccttgaacttcatcgacttagcacgtgcagcacggagttttccactcacaatgacctgcatacatgataagaaccctatagaggtattctgaaagaaaggtaacagaaaacaaagaggtttgcactcacttcgcatcctttagctccactctccataacaaaccttaaaacaccatagcacgccctatacaacaaaatatcatgcaatattaacattctgagcataagagatcaaagcataaaagccatatttaggagaacagttcaaatttaaagtaacataatagaaagcctgatagactcgatgtgggtatctagacaactaaaaatcaaaccgaatgataatcacgagtggaataaaaggatttctaattacactgatctatagacgcagctaacaacaagtccaacactaatataacttcagcggcaaatcatgtttactaatacgcaacacttgttacacagtttgtttaatcgaaggatagaatacagacattggaccgatacatagcttaactacattaacacaaagtctacacgaacatacaaatagcaaactctaatttgtcccatgctttaagccatgtaaagaaaaatacagaaaatcgattcaggatacttcactacattaacaaagtcttaaactgattcaggacacttcacacaaacactattttaacgcagtttgttaatcatgcacagatagaaaacgacactggatcaccacctagataaactacattaacacatagtctaagtaccattatctcctatttgtttcatcaccattctttaagccaaaaacagaaagagacattaaactaattcaggatacttcactacattaacacacagtcttaagcatcaatctaacaaatcaacaccggaatgatagctacaaaaggatgcagcaatagaaacacgtcatacctacgaacagcaagaccaccaagaagcttgtaacgaagagactcagcctgagcaatagcacaaagacctctgttagcaaccttctcagcataaagctcaacactgtcctgaggaaatttgaatctcttttgtacaagagatgtcaattccctaatcctccttcccttctcacctaaaccaaacagagaatcatcaaattgatatcatagaaacaaaaaaaggtcgaatcagagcaaggttaacgaaaatgcaccaacataccgagaacgttttgagtacgagtggctctaatgatgatctcagtacgcataggagtgacgcgaacctcaacaccagagtaaccatcctcagcaagctctctggttagaacctcattgagttcagcgtaaaacacaccatcggctacgaactacaaaattcaaaactttttttgtgttaagcttagaatacgatacattggtagagagatagagacaggggagggcaaaagatatcacctttctcttcttgctgatctgggtcgccatgattgtttgcaaagcttgaggaggctagagacaaaaaccctagattcggagaagagagtgcgttaggagtgaaatgataaaattgtgtggttaaataaagttaagagcaaggcccggccttttaaggcccatttctattgacaagccacaatataaagggactgaaaataaaaccatttcacccgtattaaaattagtgacagtgagaattgaatttagctatcccgatcacgtctcatatctataatttccgttccttgtgttagcaagagtagtttagatagtatttttctgttcaaaaaaaaaaaaaaaaaaagatagtattttcattttccaaattacgatgatgttattggttcgtgattttgaaagagtttttagtgaattttaaaaagtattagacggtacatgtgctacgcacaatattcatgctttaattagtttatcagtttcacttctttatatatattacgaatttcaggtattttatttgtctataaatgtttatttgtataatttataaattttaagagtttcaaaatttattattggtatcatttgaacatggatactattataattatatatttaatatatatagttgtatagatagtatgtcaaggtttagtatattttattaacatgtaaattaattatcaaatttgacaaattaataagacaaacataaattttatcaaaatcagaattatagaagaaaaacttaaaagaattattaataaaaacttaaatttaaattcaattaagttaactaacaaaaattaatttcaacaaaaatgtaattaattttatttttaaatatttaaacagatttttatattttaattatcaaacataatagatggtctaattaaatgttttaacagttatttaaataaatttagaatattcaaaccaattcgaattcaaacacattaatttgatatttataatatcatatatataaaataaagcagatttgttatatttaattaggaaatgttttttaaattatcttattggattagtagtatttaaacatataatgagttttcatttaaagatgctcccaagcgacttttccgaaacggttttcgctagctacttcggaaccctagatctccttctgccggcgatctaatcctcctttccggcgactaccttccccctcagttccgcctcctcgcctctacccccatcttgtagtctcctttgcttaccgaaggctcctcagatctgacgagtttccagatctcctcgccttttcccg

SEQ ID NO: 1544 - DNA, 1179 bp, Unknown
  misc_feature (1)..( 1179): cDNA_ID_2046338_gDNA_ID_1620415_Annot_ID_156417 3000 nt of promoter + ATG
cttaaattccagaattaaaaaactaaaatcgaatgtaaatgaaccaaatatccaaacatctagaggatccgtagcgggaatctaaaattatgaaatacatcctctaaaaaaatttcaataatttatcaacttattcacatttataaaaatacaatatactgtatcattttgataaattatctacttactcaatggacatcatgattaatgaaaagtttaggccaaaaaagaaaaagaaaattgaaaaggggcaaaaccggtattctcagaaaattccacattatgtcatgattggtcttaatagtctcacgacacaaaacgacaaacattgtattacagaagaagaagaagatattattattatgaagaagaagaaaaaagaaactgaccatctcttcgtctctttgtctctctctcgctcgcagcctttttatttcctcaaacttttttgaacccacgaggatcatcttcctcatcatcacatcaccatcttcttcgtcctccataataataatcaacttcttctcctttattccaagttccgattagtttcagagtttttcaattgcttgcttaagtttctttgcgtaggtgagatcttcatcttcttacccttttggtcttatcttatttgtctgattactctctgttctgtttttttttttgtaatcccaaagttactttggtttttgtagttccttaagcttatcagaggtatcttcaaattcctatatttatttgctctctgagaagttcttgcaagtaatgtttcattgtgtgattttgttattctctttcttctgtttactgatttgcgatctaaatttagggattctaacactaagaattgaacaaattgatctaagttataatctcactaacgtcgcttttgcaaattatctgatttttgtcttgtctgtttgtactaattcttaatcaaaatccttaaaaggttgatttttggttatgatttattgctagagagtgtctcattacctacctatcactgtcttgaaatacttgagggaattatattttcctcaatttgagttatgtatcttcacttatggaccatattggtaaactaatatagataaagcatgatcctttaccagtttttaatcaagtgtggttgttactgatactgtgttattgtcttgtagtgttgagtaagttatg

SEQ ID NO: 1545 - DNA, 3000 bp, Unknown
  misc_feature (1)..( 3000): cDNA_ID_3062935_gDNA_ID_1620415_Annot_ID_156414 3000 nt of promoter + ATG
agtgagtttgtgaacatgaatcctacgttatacgatacgtatcataattatttatgttgcttagcatgcgatgctcattctaggttggggtgaagaacaaaactagcgaagttcagtcgaaactaacaaatgttatcgtcgtggatattctaaagaaccaggtcaatttctgcctttgctctcaatatcttttggtaatgatcttttatggtctcttctgaaaagcaaagtatctttcttagcagtcacatatttggtaacaaagctccatatatcttcatgatttattgatagcactaccttggacaattactagggcctgcacattttcacggtctatattctaatgacatttcaggttaagtcaccaagtatgccccagctgcctcagtatcgagacttatataatgcgctaagtccttatcactcaaagctcgtcggagaaagctacctagcaaagaaaagaccagtgtatgaatgtactgatgtgcaggtctctgacgctctctctatgtctatttttttaaaatctttgctctagagatttgctatgtaacgtgctattcctaaccacccatgtcgtcaattgtgtttgattatccaaaggtggatgctgcaaaaggcttcatggatgtcctaaggtcgtaccttgattctctttgctctaatctgcagtcacacaccataacaaatgtgcaatccaacaacgataaggttttttatctcccagtccttagttttagaatagagaaatgtgttttgctatcctcttttagatatgttaagcttgatattgttctctctttcaggtatcacttctcctaaaggaaagtttcatcgactcctttcccagtcgtcagcgcccgttcatgaaggtgagagccctttgcattctcattggatgcttcgtagtcaaatagtttccgtaaagactagactttactgacataccgcttttctgttatgatgcgaacagctatttgtggatacacaactcttctctgtacatacagatctcgttctttcctttatccagaagctataggatgactacatgtatacgtaaaacaagtcttggtggtggaaacacaatacctcgcgatgaaagtgccatcgattctgtatttgtaacttactgtttgagaatgttgtctatggaaaaaaagacttccatagatgagggtttgatacagagaaccatcatttctttgtatcctccaaccgcaaacacagttggtgttttaactcttaagccaaaagatcttttatttgtgcataagatagagatgttgaaacactatttacatacaccaatttgtgcaaagaatggtgcaacgtttcatatattacaagatgataacataggcagagtaacgtttttaaaagttcaaattcataggtggcagtttttgtaaactttgctaatattttggccataatataatatgtaagcaataaggcatgatataaattgtttagagcataatctaaagtacagacaccaaagtgataattaagaagaataaaatggtgatgattcaaacgaaaatcaccggttttaattttgtctgtatctcttgaaaaaacattcattttttttttctaatttttttctgtttatcaaaaatgtattcatctactctaggttaggtggattaaacgtggtaaaaagaaaattcagtatggtgtaaataattttgttaaatattttggtcttgggtaggaaaaaaaataaaatttgacaatatgtgaaatataatttacttctgatgttactcttgatgggaaaaaaatgagaaagattttctttattttattttcaaatgatatgtaccttccatccacgatgaacaatgtattattatttttggacttagacttcattcggttcatcaatataatatatttaataaaagaaatattttgtagttgaaaaaatgttcaatcagtttggttttatcttttacaattagaattaagtttctctgagtcttttacacaactctataaatagagattgtaatcacctatgtaaaccacctttgattttgataataagaaaacccaaaaaaagaggcaatctaaattgcccaaagatcttgtctttgtgtaggaccttaaggaggactctcaccttattccatttgcaattttcttcgttttgttccgtggttctcgtgttctctctctccattcgtgaaacagagcccacgtcttcatcacgcttctctctattaagctttcaaaacatctcttcatcgccactattgttttatagcttctgctccgcatcaataaatgaggaagatttttatttttggaatcttcattttttcaacatccccaatgcacaatgtaattatttttggaatttattgcagatataaccggttattgatgttggttatttccggttatagatgttggtttaatcttaagtatataagttgagttaatgacattgtaaatgattaagttgttaacattctgttttactcaataatgaaagtttgttagcttcttcactctcttctccgatttacttatccggtacattgtaccttcaatatggtatcagagcacaataacattccgcgatcattgtgttcatcggaagagagctttgttctttgtgttacgttttcttcttcgattctttgaagtttctgattccgattatccggaattttccgttctgtttcattttttctttcattttgaccttaacgttgacgattctcgttttcgattcatcaaattcgtcacgttttctttgtaatttctcattcttacactgagaatgggatcttatgtacctcaatctactattcgggtgactcgtcctccgatcaacaacaatggtgatcaatttcgttatccagctgatcaatatgagaatccttactatcttcatagtgcggatcacgctggactcattcttgtatcagatcgactaacgactgcttctgattttcattctggcatcgatcgatcttgatg

SEQ ID NO: 1546 - DNA, 3000 bp, Unknown
  misc_feature (1)..( 3000): cDNA_ID_3062943_gDNA_ID_1620415_Annot_ID_156407 3000 nt of promoter + ATG
tccacatgattctgtatcgaaggaccacccatttgtgcttcatcccgatgtggactcatgggatcctctgaaacatgatcctgatccaagattagtcttcttctggggaacgggatggtttgctggttgagaagtttcagcttctttgacttcactcctgccaggggctttggactagcacgcttgcctggaggtcttcctaccttccttttaggagactgcttggacctgactttcctcttgggtttaggctgattgactggacctagacgttgagataccggaactctctccacgctggatgaagtcacctcctcagggatttggactgaggtagaagaaggagctggttgagctgctctaaccatttgctcagcagttgcttcaagctctcctagagcctctgcctgtcaaactctttcgcgtctggccgcactctctgtaggatccgggcagctaacatactgggtcatgacccctcggagctcatccatagcagcattcagtgcatcctttcctggcgggggcctgtctttgtctctgtgacttgaagctaggccagagccttgcacttcctggcttcgacttgcgttatcctctagaacaggagagtattttctttgaacacctttacccttatcaataaggggtcgatagacagaagggcctgggtgggagtcctcttggaaggaatgtgatcgtcgattaactggggcaggatccgaagatctctgccttctggacagagaagaacgcatatcattctcagaagaagaaatagaatgtctgggggagagcactggtcgaatcctttccctctgaggttcatgaccatctcttcttcttacatccccaccagattcccggaatcgtctagagcagtccgtttggtgtctttgcctattacgggtgcggtggttggaggcaggcacatctcttctctgagaggaactatcctcagatatcctgaagattcttgaggcagaggacgagttggagcttttgcctctaatctcctcccacgagattggattgataggttcttctagtcttctactctcttttctaccaaggagggggcaggacagatgggaatgatccagcttgtagcaggatttgcaataatttctcagcttctcgtaaactagggaggcttccacttcactcccatcttcaaactccacaatcgtcttcaacacgaggggcttcagcccatttactagcaccctcattcgaaagaaggtagacgaaacttcagtcttctctagaactcccacactcttcgcaatactaaccaggattccttcagaccaaagatgaatcgacacaccttgaacattgatccagaaagggatctgggaagggaaatccttatcaatcgtcggctcccaacgttggaaaattatcatccattgcgaaaaatggtagggttgatactttagggctctagcaaggtcttgctcagtcgcgaattggaattggaataacccattcccaagatctgctccagtaggtcgggtggaaaacttccagtggtcggctaggaaaggcagtactgcccagacgtcttgttccgccggattggtaagtctgccgatggccgtgagggcatgtctgcgcaacaactcagagttgtcaaaagccgggactttaactctcggagggcgaggaggccggaaagggggatccagggtggatctgcgatcgctaggagagtaacgacgagacatcgggaaaaggcgaggagatctggaaactcgtcagatctgaggagccttcggtaagcaaaggagactacaagatgggggtagaggcgaggaggcggaactgagggggaaggtagtcgccggaaaggaggattagatcgccggcagaaggagatctagggttccgaagtagctagcgaaaaccgtttcggaaaagtcgcttgggagcatctttaaatgaaaactcattatatgtttaaatactactaatccaataagataatttaaaaaacatttcctaattaaatataacaaatctgctttattttatatatatgatattataaatatcaaattaatgtgtttgaattcgaattggtttgaatattctaaatttatttaaataactgttaaaacatttaattagaccatctattatgtttgataattaaaatataaaaatctgtttaaatatttaaaaataaaattaattacatttttgttgaaattaatttttgttagttaacttaattgaatttaaatttaagtttttattaataattcttttaagtttttcttctataattctgattttgataaaatttatgtttgtcttattaatttgtcaaatttgataattaatttacatgttaataaaatatactaaaccttgacatactatctatacaactatatatattaaatatataattataatagtatccatgttcaaatgataccaataataaattttgaaactcttaaaatttataaattatacaaataaacatttatagacaaataaaatacctgaaattcgtaatatatataaagaagtgaaactgataaactaattaaagcatgaatattgtgcgtagcacatgtaccgtctaatactttttaaaattcactaaaaactctttcaaaatcacgaaccaataacatcatcgtaatttggaaaatgaaaatactatctttttttttttttttttttgaacagaaaaatactatctaaactactcttgctaacacaaggaacggaaattatagatatgagacgtgatcgggatagctaaattcaattctcactgtcactaattttaatacgggtgaaatggttttattttcagtccctttatattgtggcttgtcaatagaaatgggccttaaaaggccgggccttgctcttaactttatttaaccacacaattttatcatttcactcctaacgcactctcttctccgaatctagggtttttgtctctagcctcctcaagctttgcaaacaatcatg

SEQ ID NO: 1547 - DNA, 3000 bp, Unknown
  misc_feature (1)..( 3000): cDNA_ID_3062962_gDNA_ID_1620415_Annot_ID_156392 3000 nt of promoter + ATG
catgtaattgggaaagggaatcggagacaactaatgattgaagaaaatggatacgttgaacttgctggaagtaaccaattgtcaaagctttcattaccactagcacgggtctgtctctcaaatggtatatatctgctcaatgagtctctctcgaatgattctaaatcagatcttggatcaatattatccgtggggatgaatgagaccaaagaaggatcatcctctgatcatgaggaaggtaacacgaacacagactcgaaagaggcaaaaggaggaatgagccaagaaataattcaaaactcactctctgcttttgaggatattcgtaatagagaaaagcagttgatgagacaggctctctttgccaatatggcttatgtagaattggagttggcgaatcctatcaaagccttgtcagctgctacttcactcttgcaacttgcagattgttcgaagatttatgttttcctaggccatatctatgcagcggaggccctctgcttgctcaatcgacccattgaagctggtgcacatttatccgcctatctactcggacaggatgattttaaactgccatatgcgcaagaagactttgaccagtggtggaagcacacaagttctgattgtgaagagacattggatccctccacgggaaatacccgggattcagttttccttaagccagaagaagctcgtggagcacttttcgcagaccttgccgcgctgcttgccacacaaggacatcacgaccaagcaaaatctttgataacgcacgcgttaactctcttaccgaacaatgtacaagctacagttacagcagtctacattgatctcatgttgggtaggtcacaagacgcccttgctcggttaaaacagtgtacccatgtgagctttgttccagggagattggaagtgagagcctcatagaagatttgtactctaaattggtatggtttgttcttttttgaaattcaagctttagaaattagttggttcgataaatatcagagaataaacttttgtacaagtttttttttgtttttaatttcttgtattagtactgtgagatgatatttgcactcgtgacttagatttgggtcttgagggattagtcgatttcttgttcaggaacaacataagattgttagaacaaacaccagtttttgtacttttttttaaatcttgtttaagacagacccccttattctatggctttagtagatttgtttatttttgaacaagaaagtgtggcgataaacaggcaatgaccaacgcttagcgtttagaacacttagttggggtttacgcgattttaggtggtttattcgtttacgatattatagataaaaattatgttaaactatatattagaaaatattaaatcgaattctaaataaaaatttgacaaaaaatttctttaatttatatcaaacaatatatgaatgtttataaccatgtgtgtagaagtaaaacttataaatttaaacaatgtagttagaaataagaaaaatatattaaaataaaatttatgttattttaggcagtcgatacggttttagccgtcagctgaacgcctaacgtatagtcggaatctaaacgaccgcctagaccactttttaaaacactgcttttgaatctttcaaacttcatccgaaagcaaaactaaagcttctagaacatgtgaaagcttgtcaagaaaccctagttttgaactcataaaacctagttcagaagagttataccgcagcattcttttttttttgtaatacaaagtctctctttttctcctttctaatacaagatgcaattaaacaaaatgttcctctagttataataatgtagaaaaatacgtgtacgctagaaaatttctcgaccaacgtaaaagagggtcctagaacggtcaacttcgacacgtggctcgtccttatgtctttctctttgtgtacagaagcaatgtaaatgcaagcaagcgtgtaagaactaattgagtcattgacacatgagagtgaaaaaggcaatcaaaagtcatcaacacatttctcttttaaatttggtatgcttgtttcgtggaagcatgtttggtgagggtagaacaactttggttttggttactccaatgatccatgcagcgaaggtgttcgatgaaatgcctagaagaggctttggggaaattacttcacctgaagactgaagtctgttagctataagggtttagtgattttgtcttgatgagaattccatttaacgatgataaataatgatgcgacctacaaagaatctttgccgccttaagttaccattgtttcttgtattagcgttgttgctgatgattggaacgggtaaaagatatacatgcatctaaagttgttaaggataaacagtgacgtggtggtcttgtcttttgataatcttgttactctttcctcactcaatggctacctcttgcgactgaaacggtaaacctgttatcactctggctttgtgtgtattcatcagtatctggtcaggttagaacaaatatattgcttattaaccgatcaatctgttgctgtcctgccctgcttgtcgatagtagacagtttctgtggtttagtaatactagagaacttattacatgagttaaggtactgtgtgtttactctcgaatttgcttatgttttatatcaagttacatttttgcaaacaacaggtttcaactatgtctcctgtctttatcaaaaaaaaaactatgtctcctgtacaagtggtagacaagttgttacaattattcttcatgtgtcgcatctaatttaataatccgcactataaaaagtatgatttatttaactaaaaggaatcactagagtctagaggtggtaatcgatcagtaatcataatatatattattgtttagaaatgtgagaaccctcagccatacggttgagttggagtaaacttttagctgcttctagatctaattttccgagctgatttatcgtaggtgattgtcgacgagtagtt

SEQ ID NO: 1548 - DNA, 3000 bp, Unknown
  misc_feature (1)..( 3000): cDNA_ID_2046379_gDNA_ID_1620415_Annot_ID_156405 3000 nt of promoter + ATG
atgaaaaatactcctctctccattttcaattaaaactataattttaatatattaaatgacaattttgtccaacttttaaaaagctgtattttaataaattaatattaaatacgaaattacacattaatttaaaattttgaaggaaaaaaaaagaataaactaaattcaaaatcttaattattaattttgactatttatgagataaataaaaattatttattttatatattaaaatctaacatgatattatcaaaaaaatattttaaagattatcacttcatatttgttaagatatataaagaaattaataattaataacttttttaatatcgataaaacataaaaatcaaatagatttttggattttaaatataaatatttaaaaatgattactaaatttcagtgaggacattttcttaatttgtatcccttttatatattaaaaaatagattatatattagaaaaaagaataaggtatttttcaaacaaaatctcaaaaaggggtaattttccaaatttttaatcttaagcgaccaacacctaaaactattcatcaactcaaatattaagaaaatctgtcacattgtaacagatttgttgtcaaaaaattaattactagaatgacgtctaacgataaccaattttttttaatgttataacagacttgttttatgttataagagatttttataattttacacaatatctgttgtttgatggcagatttgttttctaaaatattatattttatgttatgatagagctattttatgttgtcacagataaatttatattaccataaatctgtcatttgatggcaggttcaataaagaagaaaataaattgttggaatgaccttaaagatatttgatgttacgacagatttgtaatttgaaatccttataatgaccgatttatagtttcctttttccatgattttttgtaatagaataatactaacaattgtaacagtttttttatttagaaaatcatattatgacagatttgattttttttgtcaatttggttttagaaattcttttaaataccactaaaataagttttttccaaaaaaaaactattatgaattttatttttcaaaaatactacaaatctaaaactaaatcttaatattcaaaacgaatttctaaatcctaacactaaaccccacacctaaaaactataccgtaaatatacatagtcaatccaaatatataaaaaaaattacaacttcaaaaatcaatttttttttatgtttatggtattttaggaataaacttttgtggtttttttggaagaaaaaaacaaattgttgtattttcgaaaaacaaaaattgaaaatgtggtatatgagagaatttctcgttttttatctttatttttttgaagaaaatattcttttaagaaatatattaagtaatttattttgttggtaacggcagatttaatatatgtgtgacagttttttatgatacttgtcatattgatcgtcaaaaccattaaataaatagagtattaagcaatggttttttggacttttaacacaaaatttatgtcaatctagtaatgagtaaaatagagtgttaaactagttatttttagcttaatttgggttaaatgggataaatttcagttattatatatatatatatatatatatatatatatatatatatgtttttttccatttgtaatatactgacaaattagaacactaatttgcaaaatgattagcggggacccggaaatagtcacttgcgtgccatgaggcatcttctgtagggtttggtcgtcattgtaattaaaaataaaaatgatacggatgactcgttaatttgttcttaaaaatcaacgacctgtaatttagagtacatttttcttgttggcaaaacatttagagtagattagaattatttttgtttattttgacgatggaaccatatagaagatgtctactctaaatcattattattttaatctactctaaattgttttaaatggataccgatggctttattttaatctactctggattctcaacttctattaataccgatggctttattgcatctactctaaattatttttatttttatttttgattattttcttagttctatataagccataagttctaatatttatacagattttcgcaaattgtaatagttatattttagatcgatttggactgagtttttgtacgtaaacattcactagatctcccactacataaaccttaatgaaaaaaaagaaaaaaaaaagagaaattttataaacttataagaaactttaatttttagatcaggtatttagaattttcttaaacgtagtaaagcttatcgtgcatgcatatggatatttcatggagatgtttataaacattcagaaaaacttaatttatttttagaaagaaaaaattattaactttatcagtagaagaaatatgtacgtatataaatattgtgtaatatctactgctcagactatgaaagactctttaaatgcaaaacactgagtggattacgaaaataaagcataaatctaaaagatgtgttgattatttttacaaaatatataaatatttatcattatacgagtcatagtaataaactaataattatcattataaaattttaattttaagtctatgtatgtgctaaatctaaaaaataaagtactttttcgtgaaaaaatatggaaaaagttatatatgtgtaatttttcatatttcaatacatcaattcgaagattatccattagaaagacttggtaaaaatttcaagcaaatattaagtaactcgtggtggctactttcaaaataaaacaaaagcatgtgacttattttatgatttcaaaaagttgataggttcggacgagttcacaaataatggaactaatagatccctataaatacaaagcattattcttcgtttatcttacaaaactttaaacacattgctttctattttaagatctttctatctctctctctctcc

SEQ ID NO: 1549 - DNA, 3000 bp, Unknown
  misc_feature (1)..( 3000): cDNA_ID_3063012_gDNA_ID_1620416_Annot_ID_156423 3000 nt of promoter + ATG
ctcatcatccaaatatagacatgatcggaacaagttcctctaaatagtttttaagttttcaagaaaggttttttatgcctcgtatcataatgctaatgaagtcataagaaatatttttttcatttactttggctggcttctttgtatctcagaatatgcaattgcttctgaattctctcactttggtggtttccatcaaacataacaagatcatgaatatgttcatggaacacatcctaaaacaaatgtggtgcaacactaacaaaaaattgtaacccacacaactcggatttgtcaatacttaaaagcttaaaggaaaagagctctctggcttcatttactatctcatataatcaaaaattaaccaaagacctgtccacagaaatgaagaaatcataacgactcatcccccggaaagacaaagaggaatgaatgcatgatcaaggctcgtaaacttcaggaagacgaagccctacactggctgcagatttattaagcactcgtttcatttcttcagttctatcaaccgcaatgttgtatgagaacagcagatcctgcaacaaccagataacttatccatgtgagagactaaacacacaaatgcattgccaatgtgattaagagatcataaaaaagactgaaccttgtgagagtgaatgctattgagaagatatgtgtaatttcgagcaaggtttattttctctgagtttgcattctttcgaaattcttgcttaacaaagtctaagaaatgagacttgtgatcttctttaccaacatgtttcaccactgctttgagaaggtcacgataaactctagcagctaaaacaacttcaccactcatcttcttctttaccctatcaacacattttcaaaagagtgacataaattcgggttaaagactcaaaaatcgaatttttaaaacccaattcgttaataactattacttgagctatagattgattagaatcatcaaataatctcattttggtttagaactagcattattaaaaactcagaatcgaaacaaaagttggaatcggattgaacaaatcgagatagaatcagaaaaagcgcagtgggaactaatgaatccgaagattgggtcttttcgatagtatgttcaatagaagaagtgaagaagatcaccttgaatctcgccggcgccgatcggataaagtagactgagagacaaaatccagcggagaggagaagaaagtccgtattaggaagtgaagaagatggacttgaaaaaaaaccaaagtagtaattggacagcccatactttggtaatgggcttttgaaagcagtacaggcctacaatatgagataactgagacattttcaaataagttacaaatttataactaacattataaaaaattatacatcctttaatcagtatgaaataaaaataaattattcttaaaatgaatttttattttattttaacttttatatgtttaagaataaatacgttttgattttccaaaaaaactaatagacaattattcttaaattggaaatagtgaaccaaaataattatattttaaaaaatattgtgttttcatctatttttatttttgggtaaacaagtattttcttacaaagaaagttgtgatactattggaaaaacaaactagtgatggtatttttagaactgaaacttaaaaatgtgatattttagaaatatatttctattttttattcgaaatttataaatcaaatgaaacatataacaacaggaaaacaacgaaattaaaggcactaaatttgaggcccactctctttaaatgaatctgtaaaaggaggctcataaaagtagttccgatatgtgtagttcttaaatccaccaaaactcaaaaaccttcctctaaatatagataatcaaataataagaaatatatacattttgtcaccaaagatagtgtgaactaaaaactaatcccttttatgtaaacaaagttatgggcaggccgcagttggagctaccttctttctatttgtgtcggtcttataatttttaaaaatcagatcaaatcaattacaatattagcaagtgacttatgcataactcattaacttttattcctctattaactacggaaaactagttaattgtctattgtcgttttctatctgggaatttaaggaaatggaagtacggaataatggaaaatagcacatactttaaggactatttactattatgtttgtaatgattgaatatgatattaagttcataaatataaattgctagctataactataagacaaccacaaaagttttgatattatctttttgtgcggtatgtatataatttgttaaaagaagtattgcattatggtttctaagcatatcgataataagaggttgttgcaataagatctttacatgcaagagattaaacaaagaaaatttataactgatgtgttactacttactactaccttcacacctaacatgctaacactcattaattatttctctatttgacatgtactcgtcaaatagtttgaaagtttgatccaatttcattttcgtgcctcttaatttagctatattattacgatcaaagaaatttataactcatgtataacttactacttttacctaactacccatttctttttgacatttagataacaactaatagtcaaaatagtttaccacaaattttttgatcaatttcattgtacgtgactattaatttagctatattacgactgaagaattttacaattgcaaagattcaaataattaaacatacaagaaacaacaacattctttgttcattaaaataaataaccaagaccctaaaatctttgtatgattctatgcccaataaatatgtgccggtgaaccataaaagcttcctctcataatgacaaacgaaaagaggcttatgcttcatcttattatataaacctcatcaaacctattcttattttttgctctaatctaaatattaaagaatcaaacttaatctttcacccataatg

SEQ ID NO: 1550 - DNA, 3000 bp, Unknown
  misc_feature (1)..( 3000): cDNA_ID_2138218_gDNA_ID_1620416_Annot_ID_156436 3000 nt of promoter + ATG
tcacatttcgcttttgttataaatttttattgtgaaacacacacacacattatacacgcctttgaaattttgatttgtatgcataatgtattaaaaaaaacattattatactgccattatagtaataattaattggtcgggtaaaacgtctctctactcaattgtgttttgtttatatcaatgacaaaaaaaaaatcaagaagaatccccataatgtgagtacgtaaaagattccacttaattaaaaaatgttggttgtacaactttacataattcaatggctaatcaataaaataatcagtagttaagaaggcaaattaaagaaagtgttgaataaatccaagcaccggccatttattctcagcgtcggctaaagtgaaatgagggcacaccgtcagcatccatgtaacgcgaagcagaggaacaaccactcggaacttgtgttcgtgtgaggtcgcacgtgccgcaagtgtcggtggctgcacgttcaaaataatctgactgacccgagagagagagtaaacaagataaaaaagtacaaagtcaaaaggcagaaaagcgcaattctgatttttgtaaaacaattttttattttttcttctcaacttttatgctgtaaaatctacattagataacattgtacttgcttttgttttaaatttcgtattttgcttcgcgccaacactatgctagacttcaatcacaactactaaatcatgtagaagcatcgagtttttgaaccgattcggactaatcatcgatctaaactaagggacaattttgtactggaggatgaaaaagtttactagagatgtaaaagttgcacaacatgtcggctcattgaccaaaagttggatggtctctacagaacaattatataaagcactctgactcacttacttaaagagagtggaaacaaaaaacggaataatatccaatagcaaaaacaaagaagagaaaataagagaaagtcttcgatttgcatctcccggattatgggtttggagtttggtatatctaaaacaaaactaacttagtttagcatatccattaaaaactatatccatgaagtagcaaatttgttgcaatttactttcgaatagttaaaaactaaatttattcacttgttatgaaataataacgattaatgacaaattttcacatttttcttcatcgtcaagttatagccaaatgacaatagttttttttactaaaattaaatgaattcttaattggtgtacaaaaaccttaaacatcaaatagaaataaaatgaagagagcatataacttttatcatgactacatcttcatagccatttttctctaccaaaaaaggtagaagctaattaattagtaaataatacatagagattttttggtttaataataccaaataatttcttgtatttttcaacagataatggctgatggagattggatttgcataattaaattttataaaatggtagtcttgaaagaaacgttgaaccaaagcaagatgaagatgaaccaaaattagtcttgaaactaacgttgacaagaatttaccataccacataaaacgaggagtcgtggtgtttggttaaatagtaaatgaccgggaggagaaaagaatcaccgatcgatcccaaatggttcgccgtcgaacacggacacgtgtcgtaggataagaaccacatggttgtgctaaagaccaacgcagcgagtcaaatgattgcatccattttgaactttcccaaattgtcattagccatcaccacacgtggacgacaggacgactcgtcttctaatgctttacctgcacctcgtcgtacattaacatttccccaattcgtcttaagtttttgtttattttgttatacatataagcgtattgaagccattaggtgctttaatgcttcgttagctgcactttccatttctgttattcagttctcaacctctatattttggtgcttatatcacaggaaaatcaaacaaattattattattatttttagtacaattttatctaatttattgatacatgtactagttttttttttgttttgttatttaatcacaaattattttcaaattgtttgatcttttatggagaattaaatatagtgatgcctcatttgtaaatttttaaccactcgaacctactcccaccacaacaaatacgacattttcccaatgatcaaaactcaaaaggttaagctgaagtgaacagtaagataactataataatcagcatactaattgtttctttttttttgacccaatcaacataacacttctattttcaaattatatctttgtcagttcggaaaaatagtaaatccaatgcaaagttgcaaacccaaagacaaagcaaaatatattccgacaaaaaaatacatacaaattaaatgtatacatgtatgtaataacatatataaagtcacaggcacaaacaagaagcagaattagctggccactcgttattattcgttttctcttaaatacttaattcttttttttcccaaacagtttctctgaaactaagaaactctaacagagaatccggatgcttttctctgattcttctactctttcctaatttaccgattttctcgggaatccaaaatcccgtttctctttttctcgagttaaaaaactttcgatctgaagtcaattcagattcttcttggaagctcaaagaagaagaagagagaagagagagagactagtgatttggtttagttcgttggatcagaaaggtctctgctttgatctttgtagtacacgtggcgaaaagggtcggaatttggagttgtgttgatgatgttccaagtctcagatttcttgtaataacattctcttgtctttctccaatgtctttgtcttgattctcagaaaaagatcttcagatccgtttacttgaggggaaagagacgaatagttttttgttagctaaaaaaaattatgatgaagatgatgagaaacaaaccgacaaatcttccgacggcgggtatg

SEQ ID NO: 1551 - DNA, 3000 bp, Unknown
  misc_feature (1)..( 3000): cDNA_ID_2138237_gDNA_ID_1620416_Annot_ID_156441 3000 nt of promoter + ATG
ccgatgtgggacattgtccctaatacgccccctcgagatgatggctcttctagccattgatctcgatatgtttgggcatggatcggcgggccaagtattgggccgaaccgatgtggatcgggttgagtatgtgcggatcgggctctgataccataaaacatcataaaaatccaatacagagttttgataggaaacacacaaaaacataagacaagctcacataaaaaatctaccaaacatttcttcttccatggccattcctaagcgaaagagatccaagactcgaagacacatcctcaagcaaagcttcattcatggcatctcttagattcatctcatcagtagcatcatggaaacatccacgtgtcctagactcacttatcagtgttgcccaaatcgaaccacttagagccaaagttgtctcgttcccaatcacccataaacagtgtcttgctcgagtcagtgccacgttagctctttgacggttgttaagaaatccgacttttccattaccgttacttctaacggtggagatgatgataatgtcttcttctcctccttgaaaaccatctacggaccgaacattcaaagtgaattgctgacctgataaggaactgtacttatctccgattttctcttggattgctctcatctgtcctttgtaaggtgagaccactccgacactcaccttcatcctcctttcacatgaaactttgtaaagatttgatataatttcagaaatgacagcaacttcaaccatgtttttgggactatgtccatcaccaaactcttcttttccacgtccaacattgataaaagaaaatgagtcaaacatgtttcctttaagaaacctcttttgataaatactttctttaacattttcagcatctttgattctcccaccataaaactccttgttggggaaacgactaatagaaggatgcattcgatattgaacatcaagcaagtgtttgttgtgaccaagcaaaaccaatctctcaaacaagcttcttccgaatttcgccttttcacacatctcattatgaaccattgcaggcaattgaaactcatctcctattaaaatggcgtgacgcagtcccggaagttgcaatgcagcaactgattcacattccttaagctgagccgcctcatcaaccacaagcagttctacatttcctgtcctttccacgttcatttccgcagcacccgaggctgtgcagaggataatatccgcgttttgaagacaaaatttcctaatatcttcgttttctaacatgtctggaatctcaaaacgttttggaagtaagcgtagagccttgaggcaatcatcactgagtcttttgaagcaatcaaatctgaaatttccttcctcgaaatcaaccctagaagaattctccctcaagaaatatctgatacgctgaagagtttgacgagaagcaatcattttcttcacatcttcatatggaaggtaaaccttgggaagatgtgtatacaaatcaacgatgcatgtcttcacttcttcacttaagctattaaaattcttctgaacgaattctccaaaagtaggaatgttaacaacaacttcttccctttcatcttcttcattcattctttcaacttcttctaactcgtagacatgtctctcatactttccctcggggttttcaagaaactgtatcagtgactctaatctctgcatccatccagaaaatggtgaaaacagtttaccaagcttaccaatacgctcatcaagaaacacatcgagaagaacatgatcgttcttgttaatccccattctgtcccggtttccggataaaatgatattccctagcctgtaagtagcattttccgctgtcgagttttccttaaataaggataagagccttgatgtaacttgtacaatagctgtgtttgtaggagcacacacaactgtcttgcaccttagtttgagaagggcaaagagaagagtcgcgaccgtctttgttttgcctgttctaggaggtccccatatcagtttcacactgttcttatgggtacagtttcttgtctcaaggcagcccaagattgcatcctcttgggaagagttcaatttcgttgaacggattatatccaaaacaaggtcagatctcccatcattttcagaacaaaaacattgttctgtaccctcagtattagcctgaagcacactcttggttagagtcgatatgtcagcttcgttgtgcaaagcattccaaattcgagtgtttgttgttaaagtcattagaaaaacaccgaagctatagttctcaagaggtgatatcgatctagacaaatgaacagagattttaagattttaagatcacctctatagttctcaagaggtgatatcgatattagactgtgggcttccaacctaaaaccaattggcaataggtggagaggcgcatatcttatatataccacttaagatcctactcaacttccgatgtgggacattgtccctaatatcgagaactctgatcgcctgaaaccgagaatctgattctggactatggaaagttttgaaatttggccggaaaattgaaaccctaaattttttttgttttgagagagaaaacccctaaaaacccaagctctgtttggtgtatctctttcttgggaaacaagttcttttattgcattttttttccctatcctcgtattttccatacaaaatcaatgttaaattttaagtttcaattttgtccgcaaattagaaaacttggcaaagtaaccttcttagtgtaaaatttttagaatgccctcaaccaaattttaaagtgtttaaaaaaaaaaaattaaagtgtttaaaaaaaaaaaaaaaacacgaagagccaagtaaccttatccattcatacgcctcaaacagagacgacagcgtttgaagtagaagacaaaggacagtgcaagaatctcttatcaacatgagaaaaccatcaagcaaaaaaaagaaacacaaaagctatctccgaggttagagca

SEQ ID NO: 1552 - DNA, 3000 bp, Unknown
  misc_feature (1)..( 3000): cDNA_ID_3062998_gDNA_ID_1620416_Annot_ID_156438 3000 nt of promoter + ATG
agaaaattgttaaaaagaaattcacatactaactaatagagtatcagatcaaagatttatactgacaattcatcttcaaaattaggcttaaattaaaacttggagttccaaaaactatatcccaaagctgtttgagaattctgcttttcaaaagacgtttctcacacaaaactcgaccataatcacaacgagcaaaaggataaaaagagaaaaagtgaaatacctgataggactccacttcaagcttcagatctggaaacgtcacagagaaacagattgggcggcggcggctttaatgtatgggaaggggtcgtaagaaaaccctaatttgaagacacgtgtgatgtcctgagctgccacgttaaatgagtaggtggtgttaagaatcagatgacttctattgggctagatttaaaatccgtacgggcccaaatcatgtggggatggcgacgtgaataataagttgtaataacattcttgttttacaacgaaagctgcgttcaaaaaaatcattttactttttattatatttatttagtttggatgaaattcattttcgattacattgtattataaattcaatgattaatattttgctggaaaattgaaattattctaaaaattcaaacaaacaaatattattagataagagtttttttagaaatggttttttgagatttatctaattaatatcggttgacaaaaaaaatattatataagagttttattactagaaactatgttgaaataccacatttttaactttttattcaaaagtataatcattaatttattttactaataatatcccaaatttttgtataaaaatgtttgttacaactaaaatgaaaattaaattccattagagatgttaatttctttttaatattaaactaggttagtacctatgcttcatgctttaattagtttataaattttgctattctagcaaaattacttaatcaaagaaaaaaacacaccacttaactgaagttacactggacacttactaccacttagctgacacaagaggtcaaaggtatggacagaagcaaaccaaggcaaaactaaaccaaagcaggagagaggtaatcggaatcttttatgtgatcatataatgagtctgaaccttcccactatcatgcttactcatcccgtcccatgttgtttgttgggcgatgcatctgaaccctcttagatttgttggataaaactgcttcggcttgctcgatcaaccctctcctcaagccttatgaaaccggctaatcttggtcttttgattagaagattatctgcgctttgaacttgtaatcttatttgccgattgcatcatgcttactcctctaaggagataccttccctgaaaccttactcctctaaggagatatcctctctgaaacttgaacccggagaaaagtctcaaaccgcagcctcctctttggagcatttcaaccgcagcctcctcaacccaaatgcattgaatttcttgcagcgagaacttttcagaaaagcctcactctagatctaagttccactattttgacgagaaatcgctctccccaaacacacatattcaaaatagcccgcattcctcctgtcttcctttgacgatctgttctgagcttcggttgctccgcaagggatgacctccggtggctgtggtggtacttcggtgaggttccgatgacctctctcctgttcactttatcttggctgcgttttcttcttcgtcatctctacctctccttagtgtcgtaaaccagatctccctctctcaatacttcaccttcacggtggtgatgatctcttcttctcagcgagtcagcgacgtttcggcctccatctccgggttcttcttctctcctttcatcttccctttcacgatcaatctttccctttcatactctctcgcatcattcataggctattagggtttatttcttttccgtgcggcacatcttcacgaagatataataaacacaaacgataaaatcttttgtcgtcgttttaataaaagaatttagacaaatgggcttttcttagcccattaacagattgtccgtcttgattgaatgcgctaactgcagatttcaatgggctattttacgttttattgtctgatatcattctatcagttttcatttcaaacttttggcacataccaagatttgttggaattctatatcgatgctaggaagagattcttcttagacagaggacacatcatgatcatgcgacccctcgaccatttacaatgtctttggaccgttgacataatgaagttgtggtatttgtgtcatctatatttgagttcttgtgggactattgttttatagatagttcttgtgggacttgagaagacataactaaatgttttaatgaacatctttatacaactttgcatagaagacgaaatacaacagatggattgggtaagaatgttttggaagatccgatgattatcacatgaaattgtcgggagataagtacgtgacataattatatgtgtatatgtacgtatgtagctaacaaacaaagagcatgtattttggattcaagatcaacggctctgattgtatcttatcttgcatgcatcttcattataactttataagatatggttgtgtttaagatttagaatgttttacacccatataagcttcataccaccgtttttgctttgtttccctcttttgtcctcattagcttctctttcatctccattttcacattcacctatgattcagtggtcatacatgaaattggcatatatcatatcagctttagttgctgttgatatattgtttcaaagtgcatttgcacttattgattacattggcaaacgcaattattatttttaatagctaaacaacaatggcaaattgataaagcaaattaacgtgaaacacaaaatctatcgaggaaattatctctgtttttgatggttatgcaaaatgctcgggtttgagaattagtattgagaaatctactctctacatg

SEQ ID NO: 1553 - DNA, 3000 bp, Unknown
  misc_feature (1)..( 3000): cDNA_ID_2138189_gDNA_ID_1620416_Annot_ID_156425 3000 nt of promoter + ATG
taaaattcttcagtcgtaatatagctaaattaatagtcacgtacaatgaaattgatcaaaaaatttgtggtaaactattttgactattagttgttatctaaatgtcaaaaagaaatgggtagttaggtaaaagtagtaagttatacatgagttataaatttctttgatcgtaataatatagctaaattaagaggcacgaaaatgaaattggatcaaactttcaaactatttgacgagtacatgtcaaatagagaaataattaatgagtgttagcatgttaggtgtgaaggtagtagtaagtagtaacacatcagttataaattttctttgtttaatctcttgcatgtaaagatcttattgcaacaacctcttattatcgatatgcttagaaaccataatgcaatacttcttttaacaaattatatacataccgcacaaaaagataatatcaaaacttttgtggttgtcttatagttatagctagcaatttatatttatgaacttaatatcatattcaatcattacaaacataatagtaaatagtccttaaagtatgtgctattttccattattccgtacttccatttccttaaattcccagatagaaaacgacaatagacaattaactagttttccgtagttaatagaggaataaaagttaatgagttatgcataagtcacttgctaatattgtaattgatttgatctgatttttaaaaattataagaccgacacaaatagaaagaaggtagctccaactgcggcctgcccataactttgtttacataaaagggattagtttttagttcacactatctttggtgacaaaatgtatatatttcttattatttgattatctatatttagaggaaggtttttgagttttggtggatttaagaactacacatatcggaactacttttatgagcctccttttacagattcatttaaagagagtgggcctcaaatttagtgcctttaatttcgttgttttcctgttgttatatgtttcatttgatttataaatttcgaataaaaaatagaaatatatttctaaaatatcacatttttaagtttcagttctaaaaataccatcactagtttgtttttccaatagtatcacaactttctttgtaagaaaatacttgtttacccaaaaataaaaatagatgaaaacacaatattttttaaaatataattattttggttcactatttccaatttaagaataattgtctattagtttttttggaaaatcaaaacgtatttattcttaaacatataaaagttaaaataaaataaaaattcattttaagaataatttatttttatttcatactgattaaaggatgtataattttttataatgttagttataaatttgtaacttatttgaaaatgtctcagttatctcatattgtaggcctgtactgctttcaaaagcccattaccaaagtatgggctgtccaattactactttggttttttttcaagtccatcttcttcacttcctaatacggactttcttctcctctccgctggattttgtctctcagtctactttatccgatcggcgccggcgagattcaaggtgatcttcttcacttcttctattgaacatactatcgaaaagacccaatcttcggattcattagttcccactgcgctttttctgattctatctcgatttgttcaatccgattccaacttttgtttcgattctgagtttttaataatgctagttctaaaccaaaatgagattatttgatgattctaatcaatctatagctcaagtaatagttattaacgaattgggttttaaaaattcgatttttgagtctttaacccgaatttatgtcactcttttgaaaatgtgttgatagggtaaagaagaagatgagtggtgaagttgttttagctgctagagtttatcgtgaccttctcaaagcagtggtgaaacatgttggtaaagaagatcacaagtctcatttcttagactttgttaagcaagaatttcgaaagaatgcaaactcagagaaaataaaccttgctcgaaattacacatatcttctcaatagcattcactctcacaaggttcagtcttttttatgatctcttaatcacattggcaatgcatttgtgtgtttagtctctcacatggataagttatctggttgttgcaggatctgctgttctcatacaacattgcggttgatagaactgaagaaatgaaacgagtgcttaataaatctgcagccagtgtagggcttcgtcttcctgaagtttacgagccttgatcatgcattcattcctctttgtctttccgggggatgagtcgttatgatttcttcatttctgtggacaggtctttggttaatttttgattatatgagatagtaaatgaagccagagagctcttttcctttaagcttttaagtattgacaaatccgagttgtgtgggttacaattttttgttagtgttgcaccacatttgttttaggatgtgttccatgaacatattcatgatcttgttatgtttgatggaaaccaccaaagtgagagaattcagaagcaattgcatattctgagatacaaagaagccagccaaagtaaatgaaaaaaatatttcttatgacttcattagcattatgatacgaggcataaaaaacctttcttgaaaacttaaaaactatttagaggaacttgttccgatcatgtctatatttggatgatgagtcaaaaatggtaaacaagatttatgaagagaaattagaaaccataagggttttatccaaaactcgataagccatccaccgctagtgtttatcactttatctggttcttgttttgtattttttctatttatttatttagtggagacatcgatgctgacactttcattttcttaatcattctttaaggctctggtagctttggcttttgatctaaaagctgagagtcaatagagagctttgtgctgagcatagcagagaagagtt

SEQ ID NO: 1554 - DNA, 3000 bp, Unknown
  misc_feature (1)..( 3000): cDNA_ID_3063002_gDNA_ID_1620416_Annot_ID_156432 3000 nt of promoter + ATG
tttttttggtaatcaatcgcaaactaaacacttaatgattcgatagttaccactaattagcagtaatttattgtaacaataagaacggcagggtattatcaaattggtttttgagactttgtggttataagtggcttgacttatggatattctattcagccacacgaaaaaaggttacaacttgcaaatctcagattttgatagagtaactaataaaacagtagagagttgatgagacaaaaacatcttttccattgctcgaatgagcaagatatttgcattagatatctcttcggatataattatattctgttgataatactaaccagtataagttcttaggatttttttttaaagccttttctatagttattttctttaaaatcgtaatttatccagactaaaaacattttaggatgaagctatataactaaaccatagatgataaatttataatttgctaaaacgaaacagtgacatttctctatataaaatagtgtgctttatcgtggattttcttaaaaataacatattatcggacaatataacacgttatgttttgatcaaataaaaatcatgcgctaaaaatgaatcataatgtttacgaaaatgctacacaccagttttgcagtaaaaaacatggtggttaagttgtcttttaaagtttaaattgtcattatttgtgagttcacaatatatatttgtgcgtgtgaaagaatagataaacatatgattgtgaatgatgattagttgtcgtgatttttaaccacatgttagtagtattcaaagccttgaaccagaaaacggtcattgaacaaataaaattgttgtatatgagcttcctacttaattttctaacgcatagtggtattttaataatcccgtattaaagtaattggaagaattgaacaaatcagaactttttgttatttgggttgatagtggacacacctccgtatcaactccacataatgagttgtaccaaaaggtattttatactttcttttcgcttttgcacgtttagaaaaaataaactcgaaagcgaggttgcgaatcgaacacgtaccttgcgcgatttcatttcatttgttaaataaaatctaaattaagatgaaccaaaaaggcaataaaatgacagaaaagagagagttaaaaagtcaagatatactttgattggagtaatggtgagcacttaaggaagccagccaaagcttggtaagacgacgagtctctctatatggagaatgattgtcctacacgattttgtttcacggtaggactctcctataggcttgtttttatttcttttctttatattgtttcattattacaacaacccacaaaatcattcaaaaatgaaatgagatcatcctccaatcacccatgacccatatatgatatatgttaggttaaactattacaatattcaatcctataggcttgttttttttgtttttttcctttatggttttcgaacatttttaaggtatatctcgacacgagttctctactgttcccacaaaacatgtttactacataaatataataaagaggaattggcgaaaaagctagacaaaaaaaaatccattaatcctctcatagaaactagtttttgtgagattaaaaatgctcgatagatgatcatatgaaatcatagttggacgtatacacatgattacaattagagaaaatgttaagtgtaaaatgcatatgtagatatcttataacgaaagagtaagtactggttagaaaaatgggcatgcaggcccctacgcgttgtaccaacgttaaattaaagccacatttcaccatacgacaacctccggtcctttagctctttcttgcttctttgctcttcgatctgactaattactttttgcatgttttttgttgtccaatgtccatcatcacgtgctaatagcctatcatatgaacattgtcttaatagcccattaaacgcttggtgaaccgtttttgtagtaaaattttgggcatctctgccaacattttcgattatatttcttagagtgtttaaaaaaaaaaaaaatcccatcttagatatatggactaaacattgataatccatttcttcacattttatgatgaatatgtttgaaccaatacaatgaatatataatttagtttttttttatttttaggtttttttttggtaaaaagtaaaatttcataccatttttgaaaattttgacaaaaattacaaaagaaaacaaaaaaaaatgagaaacctaaagctacataaaccaccaaaattactacataagcataaaacagaaaaacacacactagcaaacacggtaaaagacttttactaaaagtcatgaataaacaccgattctaaacagtaaagatcgaacatttataggtagaaaatttgattgtcaagcttcattcatcaacttttcatcttcacatgcttccacgtaaacctcaacaagcttctcaagtagctaatttgattaagaaccattgtgttattcccaagaaccgcattataaccaaataagataaattttctggttttgctattcgtaaacttctccaccatttcttccacatccaatatctaaatcgcatttacaagtgtttaaaggaatcgaaatttatgtttgagaaactctcggataactttttcgatgatcggtaaatggcggcagttgtatcatgaactagttggtgtatatgttaatcatatgcttagaatcgtgtaattgataatgcaatgagatacgattgttcttagatctatatgcaaaataaaatttgagaatcgaccaaatgattggatattatacttgtcatgtttggtgattcatacatccaaatgtcaaaaacgtaaaagttccattgtggccattaacgtgcgttctcgccatcctcgtatatcgctaatgaaatctaaaccaataaaaaaacttcaatcttttttttcttcacaattatcgatccaaatcaagattttcttgatttgaattccttgcg

SEQ ID NO: 1555 - DNA, 3000 bp, Unknown
  misc_feature (1)..( 3000): cDNA_ID_2138357_gDNA_ID_1620417_Annot_ID_156457 3000 nt of promoter + ATG
taagctagcccttagggctggaaatgagaaggtaagttaacaaagattcttctttaattaaagagatccttcgttctattcattttctcattggttttggcttataagagatcattactccataagacccgcttcttactcataatagaacatgtttctggaatttcaagcaattctctcacattttcctttcttatttttattgtataggatgacgatgaggcagatactgttggttgttgtacattgaaagtaggaaacgtggagtgtattcctccaaataagttaaaggtatacacttgatctcaacctaaacaaaattgactgcagaatgtatctgcgagagtactaaaatgcctggcttattgatttgttgaagaaggttattttttattgcatattatagtgacttatggtattcgctttggcattttcagtttgacttccttggtaaagactctattcagtatgtaaacacagttgaggttgagcctctggtgtataaggcaattgggcagttccaagcaggttagttaataattatgtaggctatctaatcttataattgacctttggaaactggataaatgacttttggtttcgtcttctatccaggaaaatcgaaaaccgatgatctctttgatgagctagatacttcaaaactcaatactcatcttaaggagcttatggctggtctcacagccaaagtattccgtacgtataatgcatccatcacattggatttaatggtatgttttctattactcagttgtcacaatcctaatgatataggtttcttaagccgttttggatgatgttatgacagttgagtaaagaaaccagagacggtgacgttcctgaaaaagtggtggtttatcagcaagcgaacaaggaggtaatgacaattattctctctgctattttacagataagagaatatgatcatcttattcttttttgttaggttgctatcatttgtaaccatcaacgtactgtctcgaaatctcacggagcacaagtggagaagctggctgtgaaaatagaagaactaagggtataacataagcaaatcctagttaaatatgatcaagatacaatttcaactttctcactcccataatctttgtacttctctgcaggagcaaataaaagagctgaatattgatctcgacagggctaagaaaggaagaacaccgttaatgggatctgatggaaagagaaagaggaacttaacacctgaagcgtaatatctaaacctctcttcatatacattatttatcgcataagcatctcctttaaaacaactccctctttggaaaaacagattggagaagaagataatgcaaacgcaaggtaagatcgagaagatggaaagagatatgcaaacaaaagaagatatgaaaactgtcgcattgggcacatctaagatcaactacatggatcctaggatcactgttgcgtggtgcaaacgacatgatgtccccattgagaaggtaatatgtaaagagcttcaacaaagtaacagaattgcaaacacttgaaatttacttgtgttttgctattgcagatatttaacaagtctcttctggctaagttcgcttgggcaatggatgttgatcctgagttcagattctgttcaagtaccgatgaataaatacatgttcgttgaggccagtttcacctaactaccattcaccatacatttacagagatatagagagaaagagttaaaaagagaagaagaatgatagcaagaccctgtaaaagaggtttcttctctcttattagtaaaccaaagactaatctatggatgttttatagaaaaacagttacaattttttactccaataaataaataattcaggttaataatattaagaattatacataaaatggtagtacctttctttaatctatatactatggatgattaataagtttatgcattaagtaatgaaaatttttaagttttttttgtgacaaaattcattttaaccttttttagtacttgaaataactttaataatttacaaattaactttcaaatggttaaaagttttgatgacacattgtttcgtatatctaaatagtatctaaatgctaaattatccgttgatacgtaattttatcccataagaatgtggatatccaaatgctaaattatctatcgacacgtaaatttttctgataaaaaatcttaagagcatccaaacgttaaattatttgatgatacataattttatcggataaaaaattggatttctttttatttctgattttatcccctattttatttacttaaatatgcttcacaatttagtaaattaaccgatgagtcaatgtttaatcaattttttcatcttaaacccaaaaattaaggggattttggcaattaaaaagtttacggtaataagagtgaaaaaaattgtctatggcggtaagattaaacgatttggcgcgactcaatacgacgtcgtaacgaaaacaaaaccctcaaggggtgaactctctaatctaaagagagtctccttatgccttagtctcctcgtccttaaaacgatagaaaccatcgaagcagaagagaagagagaacagagagacggaggagagagataggcttcgctagacaatttcttcaatctctggaagaaggtagcttcttcaatccaacgtcaaatctctgaaatttgattgtattaagcttaatttgcatcattacccagttatagcacaaattagggtttcacatacgtaattggggatttgatatttcaactacactggattcttcaaatgttggttctttgctttaagattctctatttatgaatctcagtacttcattctctgtagtgtaatcattttgttgcttgtagttgtaaacttgtaatggtgtttgtttgcctttccttgggaaactctgacatttctttgtggtttgttttgtgtcttggtcagaagttggtctgagccttcatcaacgttgttctttcgggaatg

SEQ ID NO: 1556 - DNA, 1218 bp, Unknown
  misc_feature (1)..( 1218): cDNA_ID_2138435_gDNA_ID_1620417_Annot_ID_156486 3000 nt of promoter + ATG
cctttaggctaggttttgcctacacacaagacaagttggtatttaggtccatttattctccttccaatgaactatttttgttttttttactccattactgttttcattattttattttaaattgcactaaagtgattttaagatgtcaggatacaattcagaatctctgaccactaagttagattaaggcgctcaagtattaaattttgtactatgtacatgtacactgttttaattgttttaaatgatagaatggtaatgttacaaaacaattttaaaagcaaaaaaaaaaaaaattgaaagaagaaaaatgcatagagcttgtaataaaaaaggtatttggtcatcatcgactcatttccaatattttattatcatgatattttcttttgagaatacaaaaatattggaaagagttcgtccaagagtaaaaatcacaccattttaaacaaaattgcaaattgcaaagtgttttataaaataaaataaaatatagtttaaaagttttctattgtttatttgaaaatttaggtaacaaataaatgatagggatattatgggtctccatgatcatgatagtagtaatagtctagccttaaatcaaaaattatatttaatctcaactatctaccaaaaaaaaaagatgcttaaaccaaaagaaagccaaatctcaaatattttgccccattatattattattaagattattattattatatgtgagactaactattgttctctgtctctttttttctttttaattatcaaagaaagaaactctttcttaatggaaaccatttacagataaaaaaaacattaaaaggaaaggtttttaataaagcctttgagagagaagatgtttattataggatgaacaaaaacatcctctgtttctctcttttcatatttttctccacatttcctcatctgggtcatctccaaaaatggtgcttttttttaataattcttcacgtttctgggtttttggttttgtgatttgatgatgctttttttttgtttttttcagatttgatgataacccaaattcgcaatttgattaggacaacaacaacaactttatttatctgattccgtctttgattttcagacaagaaaagtatgttgtttctaagtcttttgatttttttcaatttcatctccttactcgatttttttttttttgggtttctctgaattggagcagaaaaaaaaaagatg

SEQ ID NO: 1557 - DNA, 3000 bp, Unknown
  misc_feature (1)..( 3000): cDNA_ID_3063055_gDNA_ID_1620417_Annot_ID_156470 3000 nt of promoter + ATG
tgtctcgatgttgcaaatgggaatgcttctagcttctttcaccattattgcagccgttaaaaccatcgcaagagctgcaaattgcatcaggatattgttcctacacattctctcttttttaatcttctctctctctcaactctattgtaaaacccttaaatctaatgagcttattttttagcaacgttaatgctaagtggaaactattaaaagcgactcacgtgtctttttagtcaagtcgtcttttgagttgaaatgtacaaaaaaggggacaactatgggagatattttctcaccgatggcttttggtcgttgtattttgttttgtccttgtcaagtcactgtcttcttgtcatgtaaggacaagtctatggttttgtgatttgcttccgtattatgcaagtcaccaatttcaaaagagctaaagaaagcttgtgtagcactatccactgctagtgaattgtgttgcctatcttctattaccacaagttagcaatcagatttttaccaagaattatggtttataaccatgacacgtgaacagttctctgtttttcgcagtttcttagtatgattctcttcatggagaaaggcatgatggtgagttaggttttggatactcgaggacaaaaaaaactagtacttaacctttttgattaacgtatagcacacggttcttctacatacacaaggtgaatctaatcattaaaactttgttatttatttggaacagaacacttgaaaacattgtaaattcacttttaacgaaatataaaaacattgtaacttcagatgcaagacaagatcttgtcaagatccagcgatgtttgcagccccatagagagatttgtcctcagcttagttcttcaaactgcgcgaataaaaaacgttacactctgtcattaattactctcaagatcttactacaaattcaaaaatcacatgaaaataccttggcaagaacgagggactgttgtaacaccacatttagctacaagagccacgactttagatggatcaattcgtaaaattgggagataaaacttaaatctgcataagcattcgaaattagctttccgaaccactacgcagcaatcattgacgggaggtgggggattgtttccagtgatggctgggcgacatttctgcatatcatttatgtccatgtcacaaatggacatgcttgtagcttctttgaccatcatcgcaaaggttaaaaccattgcaaaagttgcaaattgcataaggaatttggtattgttcttacccattctctcttttctctagactctacttgtgaatccccctcatgatcatgagcttgtttataaacaagttaaaatgctaaccgaaagttagtagtaatttaagagcgtaacgtaaagataagtgtgggtgatgtgatcaggaggcttttgagttgagatgcgtgaagaaagggacaaatgtgagaaagacttagttgttttgcatgccatagtttctgggcggtgaatgacaaagatttttttggactctttgcgtgaccattgtggcgccgttggttttgtccttgttgatcatttagatggatcattagcactgacatgaatttgataattattggcttttaatatggtaattatcatcaagtttcaaaagttttattatcacttgttaaataaaagattggttttttaatgattttgtatttatgttgtttaaaataaatatattaatgttgttttgcacctctcaacaaattaatatcttttatttcaataaaatgttataaaaagatcaaaatactgtaacatcttgaaacgatgatttgaatattttatgatcttgctttaaaaaatatttagacggcaaaagttatggaaatcttaccatacagttgatttatagtagacattaatttttgtttgactaaaactattgtgttattgtgtaaagcttttttacattttctttcgaattgtacacagagagatttgcgttctaataaaaatattaaattcaatatcacctatagttattgtcacaatttaaatagtaggccgtcgtgcgtaccacacatggggtttaaaaacaaatcagcaaaatatttaaaacgtcggtggagaagatctttgtttcgttcataaaatctaaatttccaaaaaaataagtaaacaaaaaaattagggtattttgcaataaatatcacttgagaatatcaaatatcttccgaaaataactcagctatatatggttagtactgtcatttttaaatttatgtaacgaactaacgaagtaaatacatagaaaaacatttaagagtccaaaagcatacaaattttttgtgtagtcttcttctctatttagaaatgacacctacacaagtcgttaaaccgtgaggtccactgtttcttccacatgtcgtcatcagacagcgagtatataaaaccaaacaaaaccctactcgcgattctgattaagcattcaatttcacaaccagaaactcgttttctctctctctctttgtttgctctcgcacgaagcaaataacgatcctctcttttctctgccgtatcatcttcgttcacattgtggttcgattcttgcttcctagttttctggaagaaagaaacattatcatcgattaaaatatacacattgaacaactttggattattgattctaagcagagaagaatctcatttcgatacattggggtttgtgttttatttttattattctcctagatttctggattttgtgtaatcgaaagtcaccggcttttttcctaatctatctggaaaactgttaaaagtttgaatcttgctgtaatgttttttgattagttaagaacaacattgctattttaagtaatgaaatctttcgatcgataaaattggtttcttttcgttttatctcaaagttttgatttttctgattctttcttggcagggagaagttcctacattggtgtgagtttgaagattatcttccccgtggattgtaacgggggagatg

SEQ ID NO: 1558 - DNA, 3000 bp, Unknown
  misc_feature (1)..( 3000): cDNA_ID_3063040_gDNA_ID_1620417_Annot_ID_156477 3000 nt of promoter + ATG
aacaaaagatgttattagccccacctgcaagacattcacagttctaagattactcatgatatgcttcaaacagagtaaaaaactatgccaactcaatagcttacaccaattccgagaagtgtgcttgttgagaagaggtacaaaaagttcccaaatacttgcagcgccgtccaaccggttaggctttcaaattgaatcttttgcacggcgttgaacagtacaactgaggttgcatcattcaccactccttctccaaagactaagctgtatagcaatggtgtttcatcttgatggagaatctgtaaaagtttaagatgcaatgtaagaaaaaacttttaatagaagaagtagtaagacaaagaatcttctaaatcaagaacctgtagagtgcaaacagtatcagttgatgagaaaatcgttcctatggctgaatcaaaacaagaaagcattcactctcgcaaactgataagtaataaccatctcaacaagaaatgaaaagaaacatagatcagtgaaaaatcttaccaagatagtctctagcactcaaccccttaaatcccaacttgggaaacagccaccaagtccctggttcacattataaaaacaacaaaaatagagatggtaacaactccgagataatcaactttaaatcatatagtcaagtcattcaaagattaatgaaatattttttaccaaacgagataatgacagtggagatgaaaactccaatcacaccaaaggacatgatggttaaaaagttgtgaaaaaacttctttttcttaacttggaacctgccacaacaaaccaaaaaatcttcagtcaatcaccatcatagtgtaatctaacccattaaccacaacatagtaaccaaaaccatagtaagcttacccagcattgaagattattggaggaagaaggtaaatgaagaagagttcttcatcaaacaccaaaatatgtgaactttttcctttactaataagtaagatcactgttcctgatgctgctccctacttgcaacaaaaccaatcaaaaatagtgataaaattgttctttaagagcagaaaagctcaaaactttagctaaaacaaaaaaaagaagaaattttgaagaaaattactactaaaatggcggtaatagattcattaacccatcgattctcttcaagcaagtggccgataactaaacatagacagagaatggcgatgaacactgagattggtatcacctgaggatgctcagctgctagtttattcgtcacaaactctgttaatccgatactcatttttcactcgataatgttttcgatttcgtcgattttgaaaacaccaatcgcaaacgaagaaggcacacagagaacgatagagagagagacgaggaaagagtcagagagtgaggagagatttgaactgcgatgaacaaggcggtggttacaggtggcgaggagacgaaagacacgtggcatgtttccaacgtcatcagactgagtaaacgtgaggctttttggaattgtactgcatcttgggcctttttagggcccaaaactaactcatcatgtatttttttcttaccggatttggggatttttttcttttttcttttttgggtctaactaactcgcgtaaattgttgttctttttccttaatttatttttacctcttgttctttattctgtttatataaaattatgaaacttgaaaactcaatatttattacaacgaattatttggtgaagactcgaaccaatcgaaataaaacactctactgagtaacggtcccggttgcaacagccaagacgctagaacgtgatcgtttcgtttggtcgtgttttgatgacgtaaaaagtgactcagcgacctatttcaccacgtgtaatctttaacgaccatgttctaggacctacctgacttttaatcgatcatccaccaccgccttctcaacattttttaagatactagtatcattatagctataatataaattaagaaacttgtaaatattataattaacgtgaaaacatagaattcggatatataatgtgtatattagataaataataaatctgctcatatgtgatatgtatatgcatatatcatatatgtaaatgtagccattattggaatgcgtattgggtaatgggtagtatcactagaatgatacaatttttcttatatacagagaagagaagaggaaacaagaaaaacaaatacgttccccgcagtagactttttatttgttggtaccgtagaggaaaacagatatacaccaattactataggagtgattaagggagaaattgcagggatataattgatatctaatagccgtttctacactaatcctaattataacaagaccaatgattgacacatgtatattgcaattgcatgcattatatagtttattattatgcttgcttatagtttagctggttttggaaacaagtaggtagtaataaagaaaaacaaagagagagtaggtcgtaataaatgaagaacgcataactataaaaaataaatacacaaatatatgtaaaacaattgtttggtttctctaggttggagacaaccaatcaaaaaattatattctaatttaaaataaaacttatttagttatcccatgaaaattaaactcttgtattctcaaaaaaaaattgagtcaaaattacactcccaatattttctgtctgcaataaagatatggagacacattgaaaaacattttagtttatttatgaaaaaccaaaaaaataaaattttagttgatgttttctttttaaagtggaaaaatgtgtcaaaaacaaaaagtcgaagttcttttgttttcccttttaaaataatcaacgatcatataaattcgaatcccacaaaccaaaaagctctctctctctctctctctctctctctctctgagtaaatctcagtttttggtcgaagttggtgaagtcgccgccgggacaactcaggttgttacagatgataaacatgcgagataatccaaca

SEQ ID NO: 1559 - DNA, 3000 bp, Unknown
  misc_feature (1)..( 3000): cDNA_ID_2105044_gDNA_ID_1620417_Annot_ID_156480 3000 nt of promoter + ATG
atagggattttggaatatggtcacttaccaatgtaaagccttggccttatgatataagtttgttttgtgcttgtaaacatgtagatgacaaagattgacaagaagtagatgacaaaggcttttatcactcgcgactcgagaagcatcgcattgtgcaaagcaaacagcttatccaaagctacaaacatgtttgcttgtttagcctcaaacgctacctgcaaaaacagattgttatatattgattttatgtgacatttgcttgtacagcttttgaatatttgttaagatttgggaggactgacctgggcttccaacattgattttgaattttcaaacaagtgatcatgaacctcctgaagcttttcttgccgctttgcaagatcttcttgttgctcctgactaaattctttcaaacgttgcaatgtattcctacaaagttgcagggaaaacagaacacaattagctcttggagaaaagtgtcttgcctttgaatttaaactgataaaatgtgtatttgaaacttacctactctcttgcagtgcctcagactgaaaccgggtaagaaactgaataccgtcaagagccacggtttggccgtctaaaagcttctgttgtttatccaacgaactacgagtctttgttccgatgtcatcggttgtactctgcaaatctatcattttggttgataggttatttccaagtacacttatttccacctcaatctgctctgtatcactcttcaacttatctactccttcttggatgttagtatacgcatcgaggaacatgtccattccatctttcaacgtttctttcatctttacttgaccgtccctgagagctagctgtgattctgcaatgttcttctgttcttgagagatttctactgtttgttgagataatccactcacactagtttctaaggtgtttgtcacactagccacgttttgaacccgaacatctagtgaccctaaagaatcatgaatcatgcttgaggtctgtattaaagcatcagatttactctccaagatatccaatttatcttctgtatactgagctgtattcttgagctcattcacaagcctctctatctcatttttgaacgcattactcctgccataccaaaaagaagcaaattgagaatccattttggcaaacaaaagtaataacagctagaaaaatattcatggtaaattgtttttcttactgtaattgttggcagatggtgttggtttcaagcaagaaatcgagatagatcttatgctcatgatcatcaagcttcttgaggcaactcatcattactgattcatctttacaggttggaaacgccggtcttcccgagtctttgatgaagcaatcgctcaaataccaagcaaatctctttctcttttcttctgtagcaatcgtttctttgcagccagccaagaggtaactataagcattttgccagcaactggttagaccaacaagcttgttttcaaggacttgaaccgccttctgatcactgaaaacttccatggagaagtcggggttggatttgcgagaccgagaaaaagaagaagagtatggatcttctgctgaggaagaagaagaagagaaccatccccaactgtggcatgttaatggagaatctaaaagtatgatcaatagaagaaacagaagacattttctgctgaaacgatccatttaatcggatttgagatcttcttcttctcgaggagccttgtgattgatcacctacgaacaaacaaaagagacagaacattacattctgagaatgttgttgtttatataacagaaaacttggagcgcaagaaaaggaagccccttgaacttccaattagataaatggaagttttttctttttttggtatcatcgtcataaataaagttcataaagtttataaaaaaaaagattattggcaaatcaagttgcagatttaaaaagaagaaaataaatctcattaaaatcttcagaaaacaatctttctaaaataaggaagaatctgtatccactttgtttttcgttttctgagattaatacatgcatttgaagtcgtatcaataaagataaaccaaaaaccattattactaagaaacaatatcgaaaaatagtctgaaaaaatcacagaaaaaagtacaatccaaattttatcgtaaaagagaacaagaaaattacacgacaaggttaacttcaagatcgatattgggagaaaaacatataagaacaaaaaaaaaactaaaaatagttatatgacttcgaatcagagaagaatctctacgtttttgtcagtcaatttcataacagagaggcaaaacaaactaaagtaccaaaaataaacacgaaaaacaatttcaattctaaagaataattttctcaaaaaaatatttgcatgaatgaatgatgaatctaaacaaaacacttactttaacataagtttcaaaccaataaattaaagaatgagaatacagtgatacaaaaaaaaaacacaaagcttaccagaaaacagaagaattggagattgtttttgagtcggtgattatgaggaaagtgagaaatgcaaattataaagtaacgaacgtgtttgacaaaaagatggaaacgtttcgggaacgtttggtttacttcccggtttaatttgattttggttatgtgattaatttattttcggttcggtttaattgtatttggttcattggtataagaattttttagtcaaaagcaaaatgccaaacaatacacagagaggaatgatggaatcttcagctttaataaatctgcagactctcaaaattccgattcatcttattgaagaacaattttccggcgaaacagccgatgaagtctcgcctgaatcttctgtacctttcaccggcgattgacttcacttcagaatcgagagagaagaaatcgatggaaaactaaaaatagaaagagtttcaaattctcgctctctcttcaaaaccgcaaatcaagggaacgagagacgagagagagag

SEQ ID NO: 1560 - DNA, 3000 bp, Unknown
  misc_feature (1)..( 3000): cDNA_ID_2138431_gDNA_ID_1620417_Annot_ID_156485 3000 nt of promoter + ATG
atcgtgccacaggtcgtgcacgtggcttcggcttcattgtctttgcagacccctgtgtctcagagagagtgatcatggataaacacatcatcgatggccgcacggtttgtgatttcaatcatttctcaatctttcagcagaacaaacaaagttcagatcttattgcaacttcctcaatttgcgtttttgaatcatctctcaatctttgtttctcaaagtgtaaagatcaaatttatgttttgcaggttgaggcgaagaaggctgtgcctcgagatgatcagcaggtgctaaagcgacacgctagtcctatccaccttatgtcacctgtccatggtggtggtggaaggacaaagaagatcttcgttggaggtttaccgtctagcattaccgaggaggagttcaagaactactttgatcagtttggtactattgctgatgttgttgtaatgtatgatcataacacgcagaggccaagaggttttggcttcatcacatttgattcagatgatgctgttgatagagttcttcacaagaccttccatgagctcaatgggaaactagttgaggtcaaaagagctgtacctaaggagatttcccctgtttctaatatccgaagcccgcttgctagcggtgttaactatggaggcgggtctaataggatgcctgctaatagctactttaacaactttgctcctggtcctggtttttataacagtctaggtcctgttggtcgtcggtttagtcctgttattggtagtggtagaaatgcggtttctgcttttggcctcggtttgaatcatgacttgagtttgaatttgaatccaagctgcgatgggacaagttctacgtttggttataaccgtattccaagcaacccttacttcaacggtgcttccccgaaccgttacacctctccaatcgggcacaatagaactgagtctccttacaattcgaacaatagagacttatggggaaacagaaccgacactgcaggtcccggttggaacttgaatgtctcgaatggaaacaacagaggaaattggggacttccttcttcttctgctgttagtaatgataacaatggctttggaaggaactatgggacaagttctggactttcctcgtccccatttaatggttttgaaggttctataggggaactgtacagaggcggctcagtctacagcgactcaacgtggcagcaacagcagctaccatctcagtcttctcacgagctagacaatttgtctcgcgcttacggttatgatattgacaatgtaggttcagacccatctgcaaatgacccagaaacttacaatggaagctacaatgttggaaatagacaaactaatagaggtaacaaaaaaattcatctcaataaaacttgtaacttggatacattttgatcgcaatcgaaatgttctgatctgtgttttatttacttgttgaggtattgctgcataggttatcaaaaaccaagaaaacaaaaaaaaaagttgagagatttgtagattgaaagcaaccaaatttcagttgcagagtttgaacaggttctcatgacaaagaaaccaactttgttgatcacagtgccaaagattatggtttgctttctcttttgttagaccaaaaaaaaaaaaaaaaaagagaaaaacaaagaaccgtttttgtttttcttcttcttacataaagatcagatcgtagcagccagacaaccaaagatactacaaggtggatttagatttgcttctcaaaaaagtttttttttttctttcatagaataaccaaacaaagatcgtagaattttcgatcaaagattcttcagagttctgtgctctgttttgtaattgtactttttttttcttgtttacaaaatgaattgttcatgaaaactttgttttcttaaaaaaaaaattagcgtgggagaaatattgtgtaagagagggatatgactattttgttgcatgtatccctaatgagatatatatatatatatatttttttaaagctatttttgtttttataatttgtgcctttgtggaagaaaagtttgtgaaaactcttatttatatttatatctttcaaaaaaatgaaaaaaattcatatctttcatgtagttaaacattaatattacacactcgtatttggaaataaactaaaagtaactaggtcgtagtcatatgaccaaactatattttgagaaaatttaccaccattttttctttcttttttggtaaacaacttttattttttttggataaaatgtacatttttgattaatctagaattagtaaacaacgaaatcaatattatgagtttatgacagacatgccgtagaacatttaggtcccattaacaagagtcggtccaagacttttgccgttttgcgacttttaggcctccttcttgtaaaagctttatacgtgaaagtttatttttaccccagtaaagtaatttttattccacattgcagaattttacgagaaattttactaacaaatttacgataattttaattttcttcatggtcaataatttttatttgttgatgataaagcacttgtggatttgtttcttatatacacacactatctataccaaattataatgtccagaaatatagaattttatttctttataattatgacaaaacaacttacatatttatatctctagctatttttgacaaaaaaatatctctagctattttaaaactttttatttaagtttcatcataatgtaattgatatgtaattaattatcaaaacattacaaaaagaactacttgtcaaattcttataatacaatgtattaatatttattgataaaacaataatttagtcaatattacagtggctcaacaagtaaaaaataaaagtcactcaacatttatccaactcatcaatatccagattgtgtattaaattttcaaaataaaataaaacacaccaataaagaaacaaaaatcctcaactttacctttcttctctctgtctaaagatg

SEQ ID NO: 1561 - DNA, 3000 bp, Unknown
  misc_feature (1)..( 3000): cDNA_ID_3063028_gDNA_ID_1620417_Annot_ID_156482 3000 nt of promoter + ATG
ttctccctaaagaatctactcaggtggattcatataacttaagatctttctataattagggttttgatacattttgattttacataatttgttgtctttagttcctttggatttgaagttattgtttccgtctctgagttttaaattgaattacaacagtttgaagcgaagagtgtactcgtcacaagagctaactcaatggctaatgagattacagaggaagatgattcattgggtcaccagattcgtgacctaaaggtttgaattttttgtcacttattggttgcgtatttgtgtttgtgtgtaatgttgggtttatggtttataggaggaactaataagaaccaagtctgatgggtacaaacctgatggaagcaagaatggttactttgtgagggagagtttgagtcaattgagaaacagcatcaacaagtctttagtcatgtcgtgtgaaaacagacaaggttcagaaaaggaaacaatgtatgaggaggagtatgatgatgatgtagtggaactgagtaaacacattaacaagtttcacactaactgtgattctgatgatttgagggattctattcaatcctcctttgcaagtgcttcaggctgtgaagcagattcaatgagtggagacgagatttgctctgttgataaacacaaggatcacaaagattgtgccttggctgattctggtccaagcgcagtgggaaatgggatttctatcagtttaccacatcaatcacgtattcttgaagagcctcctttgtcagaatctccaaagattaggaattttaggaagagcgtggctgcgtcgacaaagtttcaggcaagtcctaggaatgtaaccgagagctcctccactggaaacagaaagcctttaagtcctacagattctctagctgcaagtctccagagaggactaaatattatagactgtcaccaacggagctcactgtcaaacagatcttctgtttccttctcgtttgggcatctctctctgaagccttgcgatgaagccgatgataatcttagtgcttcggttaaattgttacagaaagatagaccaaaagaaggtggatcatcgattctcctctgtctttcttgcagacagaaacttgaccaagaagctcaagtatgtctagaaaccctgagatgcatttccttttgttcattttcagtttctttagtagaaggctattcgttttgactattgtatcttttatcatcagggaggatataaggcaatagaagaagcttgcgtggacgagaagcatctcaagaacatgtgtgtcgagcaggctaccaaaattgagcagcttacttatcaggtaaataacttatggtgagactagtgagtgttatatgttgaacttgagtttgctgacactttgtttttataattcttcagttagacgaatacaaaaagaacgctttgcaggagtcaagtaaggtaacccaacaggttatatttcaaagaaaacaagcacattagtaaattgtttgcaagacatggataatcaactttagctatgcttatctgtttgtgcagctaatgaagtctgatgatggagaagatgagacagaggtcgtgaaggaaacatatgaaacaaaccaacgtagtgaagagtttgggaaagtaaggattgatctcagtgaaaaggaagctcttctaaaggagattgcagagctcaaaagcaagcttcagcctacaaaatcaacggataatgttagatcttcgttgctgttacggtctttccaaatgaggaagagcattgattttaccaagaacactgagaacaacagcgaggcgctagaagaagaacgtgagaggtggacagaaatggagagtgaatggatatctttaacagatgatctaaggatggatattgatagccatcgtagacacgcagaggatctagagatagagctcaagaaggagaaaatggctacagaggagttaaatgatgctctaagtagagctatgcttggtcacagtagattcatcgagcagtacacagaactgcaggagaagtacgatgaattagatgagaggcatagcgtgactatggcaggaatagttgatgtgaagaaagcagcggctaaagctgctttgaaaggtcgccacgggaagcgttttgcaaaagctttctcagctgaacttactgctattagagctgagaaggagaaagaaagagaattcttgaaaaaggagaacaagggccttaaaattcagctgcgagatactgttgaagctgttcaagctgctggagaattacttgtcagactccgtgaagctgagcaagcagttcaatcctctgaggtaacttttactttcaccaactaaaaaaaaacctttggacacttagattctgcattatagattctacatgctgattcctaaaaccataattgcaggaacgtttcggcataatggaagaagagaatgacaagttgaaacagcaaatggagaagttaaagagtaagcacaaaacagaaatgagcacaatgaagcaatatctagcagaaagcaaattaccagggtctgcattagaggcatggttcaaggagaatgagcaagaagaggaagaagagcatgtatcatcatcagaacacagaaccggtgttgtgagctatgacaactatacagacgatcaagcatggagatctgagtttggagccatatatcaagaccatgaccatcactactgattcatgttacaaatttatcatttcatttcaagaacaaaaaaacttcttgggcaatttctgcaatttcttgcccatcttgggcaggcctgttcttacattttattaaaaaatctatatatataagtttctgcaatttcttcataacatataggcccaagtgaggccgaattgaggcccataatgaatatagtgtttggctacaggtaaaaaagcaaactctgtttctaatttttgaagattaggtagaaaacgaaagtgtgtcttcaagcttcaaagaggtcttaagctatg

SEQ ID NO: 1562 - DNA, 3000 bp, Unknown
  misc_feature (1)..( 3000): cDNA_ID_2138384_gDNA_ID_1620417_Annot_ID_156468 3000 nt of promoter + ATG
aacagatcactcattagttatgaaaatgtttggtattttttcttaatgttgatggttgagattgttgactatgcaggacgcacaggcctatgcttacctgcttaatgttctcgcaccagagcattgtgatccagcaactctaaatgcagaggatgatcttgaaagggctaacatggtcctcgaacacgcagagagaatgaactgcaaacggtatttgactgcagaggagatagttgaggggtcttcgtatttgaatctagcatttgtggcacagatatttcatgaaaggtcggtaaaagatcactaaagatagaatattttcttatgtactggtttcttacacactagcttctctgtacctgctgcaggaatggccttagcactgatggtagattctcctttgcggagatgatgactgaggatttacagacttgcagagacgaaagatgttaccggctatggattaacagcctcgggattgagagttacgtcaataatgtgtttgaagatgttagaaacgggtaagcatttggtatgcaaaataatttataatcttttggtcctgaaacgtattataagtttttcaatactgaatatttctgatgcagatggattcttctggaagttgttgataaggtctatccaggctcagttaactggaagcaggcttcaaaaccaccaattaagatgccgtttagaaaagtagagaattgcaatcaagtcgtgaagattgggaaagagatgagattctcgctcgtaaatgtagctggaaatgacattgttcaaggaaataaaaagcttatcctcggtaattactcttcttagctagctaaaaaatgtttattttgttaagatgctcaacagtcttagaaattgtataacactaaaggtgtgtatacatgtctcaggcttcttatggcagttgatgagaacacatatgctccaacttctcaagagtctaagatctcggacacgaggaaaagacatgaccgactcagaaatcataagctgggctaacaggaaagtcagaatcatggggcggaaatcgcagatcgaaagcttcaaggttccatcttttacttttatcaaaactcaaaaaaaaaaagttcaactgaacaagcttatgttgaacaaaatctgtcttgctaaacttcaataggataaaagtctatcgagcggattattcttcctcgatcttctatgggcggttgagccaagagttgttaactggaatcttgtcaccaagggtgaatcaggtccttactctctctaactacactcacaacctcttcactctctttctcttctctgttcaaactgaatttgtttaatcgttattttttcgctatggaaactttgtaacagacgatgagaagagattgaatgctacatacattgtcagcgtagcaagaaagcttggttgctcggttttcttgttgccagaagatatcgtggaggtaaagaacggaatcaaatcttccgaaacaagaaaacaacatacatcaaaatgtaaatctgatgtttttaaatgtcttttgttgcaggtgaatcaaaagatgatactaatcctaacggcaagtataatgtattggagccttcaacaacaatcatcatcgtcagagagttcaagttcgagttcagactcatcatcaactcatagcacgacgacgacatgcactagcacatgcacgagcactgatgcttcaccagctccatctgtcacgggtgaagacgaagtctcttctttaaatggcgaagtctcaagcctaacgatagaagaagacaatgaagtctcgagcctaacgatagaagaagacaatgacgcagacattttgtcagatatcacctccatctcagaggaagcagctaacgaatagagcaacaagactgaactatctttgccggaacagagttgctttgtaatattttttcacatcacctctgtttgtgttactactactaaataaaaactatatttgttaccacaataacaataaagataaaaagataaaaatattttatggagtaaacattaaaatgtcattgttttttatcttcataaaataatgtcatttaaaattataactgtgctgaaaaggaatgatttgcattcgttttgtcggctaaaacacaaaaaagagatatttaagaatacctcaaatgatttatatttatcgacttattgtttttgttgtttggtgttgcttgctcttctctctctctctctgctgatgcctggctcgagcgtcgaaccagtcacacgttgcactttgcagtgccatcgcagaccaaacgtgctacaagagccaggcgcatgctttcttgcatgacttgttatttaaacgtacctgcttcgaataatagttatccaataaaaaccctaaatagagaaatctatacgaaatattaattaaggagagggatataatattctcggtcttattcgtattttatgctgaagatttgtagaacgaaatttaagggaactaaaaaaaacgaattatgttaagaatttgtcatatttaaaaaaaaaacaaaaacacaatctcagcggcgttgcttgcacacgtgcgcgagtatataaacttggaaaaaaataatgacgacgacgattcttactctttttttttcctcaattcttactctcttttgattcaattgcgtcatagtataatctccatcaacacacagagacgataattctcataggtttttatcacttctcttcttctacttcgtaatcaattcattcgcttacttcttcaattccgttttctcaatttctcaatttttggatgtaccaatctttgaaggactttaaatgtccaggctattcgtcttcttcattgtccaattcatgttcattgtgtctcctaaaacgaaaccctaattcgagttttgaatttctatttcttttagggtttaggagaaagttgtgtcccgtttgatcgtttgtgttttgaaacgtctctagggttaagggaattttgggattgaatg

SEQ ID NO: 1563 - DNA, 3000 bp, Unknown
  misc_feature (1)..( 3000): cDNA_ID_2138361_gDNA_ID_1620417_Annot_ID_156458 3000 nt of promoter + ATG
taaattggtttggactttttgttttgtattttgtaagcataaaaaagctggagatatagtgggatttaaattatattaaacgcatatgtcaccaatcttgatcataaaatgtatagatggaaatttttttaaatatttatcttttatttccaatttccccttaataaaatttacatgtttatttatcaaagttgttttgttttcgctaaactatcttacaaataaattaataggtgttgaagacaaaacttcatttttcatctatcctaaaaataaagaaacctgaaaaatatggcaaatttactaaaaatattccggtagagtagtagtctttttgaataatagtatttttcgaaaattggtacatctaagattcaaaaggggtatttcatgaaaattcctcatatatttgtctatactaaaaatataactttataataatttgatgaaataaatcggtgattaatatttttggacagttaggtatactggtctagtgttaaacttgacttgaagttgaaccatgtgaattctcccatacggagaactaccaccttacaccgatagtctcaactaaacatgaaccataaactctttgacaatttctcactttctttttatttttcttctttactttgaatattaattagttggctgttggcacgcttttggttactcatctaattcacactatatcaaatcacattacagagaggcgtttgaagagttctgatttttatttttttttatttttgtgtaaacagagaaaggagtcaaggactgattctaatactgatataacggaagtagtgggtaagttgtagttgtagcaaaaaccaatgttacttgcttaaactcagcaacccattaacaaaaaaaaactgagagatggaggaagaaatcaagagcttgatcaatgtagggtttttaacaattatctcagtatcttactgctactgcttaccaccaagaatcaaatctggtgttcttcgattactctctatttttccggtctgtgttttgttagttgttcttcctctgttcttctccttttcaattttcacttccaccacagcgtttttcttatcagctattgccaattcaagactcatcctcttttcctttgatcaaggtcctctttttccactaccttcaaatctattcagatttacctgctttacttgcttcccaatccagcgtcaacaaaaccctaaatctcaagatcatttgtccacgtatgtttttcccgttaaaattgcaatctttgttgtgttgttatatgtgcataacgacatacaaaaccttcctcgtacttttctattgtgtctccatccactgtatgtatatttgttacttgagattctcttaacgctccttagaattctaatgactatcattcttggttgtgacctagagccacattttcacgaaccatacttagccacatctcttcaagacttttggggtcgcaggtggaacctcatagtctcggcaagtcttcgggcaatcgtctacactcctgtgcggcgtgtctgccaacgagtaatgagctctgattatgcaatgttgattggtgtttttgcgacgtttgtaacctctggtgtggctcatgaagtggttttcttttatataacccgtgcgatgcctacaggggaagtcgctttattctttctcttacatggagtttgcacggtggcggaagtggcagcgaagaggacggcgtttgtacggaggtggccggtgagaccagtcgtatcttggatgttcacgatagcgtttgtaaatgtgaccgctggttggctgttttttcctcagttgattcggaacaacctgggggagagatgctccaatgaaatctccttgctcattgatttcttcagaagcaagttattttattttccccagtgaattacatttctaaatggattccgtagggttattgttaacaatcacattatttaatgatatacttacaaaaaatgcagctatcacattatataagaacttagaagttaacttaaaaattaagttgctatgtatctcattctgtaagttaatattacaaaatctcaaatttgcattacaagactaaacttaactatgacctcaccacacgcaacacccaagttataacctagatcagtgattgaaaaacgccaaaaattcataacaaaaagaaagtctgagacatggaggaagaacaactcaagagattgatcaaaatatggattctagttgtaatctcagtatcttattacttacttatcaaccagaattaaagctggtattatcaaaatagtccggattctattttccaaaagtccatggatctccaaaaatgggccttcatattaacaaagcccaagtagaggttgccgaagaaaacaatcccattccctaaacgacgtcatataagcgataaagtcaaaaggggtcaagactcgctgacccatggagagtctttcgttaacttagcctctacaacacaaaaaacggacagaaatcaaaggcaggtaagaaatccgtgaggcgtgtcctgagattcatatctgcttcatcgccgatttcgtcgtggcctcaggtagttgcatcaatttgataattcttccagatttcgtttgaatttgaactcaatttcacaaattcatttttgatttcaaaattagggtttctctttcccatttgggaattcgagttttcaattgtacaattgagagctttgttcgtattcatttcattgacatatcagatttatgaattttgactcaatcgatttttaatgtatatgttattgggattataattgagttgttgaagttcccttcagaccaattgaaatgtcttgatgcatatctgtgtttggtttgcaaatttaatgttaaagtatgtatatttattaattttagttttgttgcaattctagataattaagtatctttccttttttgatttttgttgatcaacagttttgcttgtgaataacttgccttgttgggtatg

SEQ ID NO: 1564 - DNA, 3000 bp, Unknown
  misc_feature (1)..( 3000): cDNA_ID_3063131_gDNA_ID_1620418_Annot_ID_156495 3000 nt of promoter + ATG
aatcacaatatttcttaaacttatattactaacgtaatacattttgtggatttgtaataggcgtcaaagtatctggagaatgataatttgagagatatgattgatcctacactaacaacgtataaagaagaagaacttgaagctatatgtgacgtggcacgacattgtctgaaacttgacgaaagccaaagaccaaaaatgaaatatgtggttcaacaattgaaagaagtaataaacatatctcaagaacaagcaacaccaagactctctcctctttggtgggcagagcttgagatcttatcctctgaagctacataaccatgaacaagaacgattctctctcctcctctctctttctcttcgagtcgtcacaggttcacacactcttgctctctctgtttactgtaaacgtcgtcgttcataaatgttcaaaagttgtttttttcttcttaattctttctattaaatttgttttggttttgatagtgtatttggaatccagatgatataacgatgtgtttgtataattgttgtatactatatatcatacatatacctattacgtataattgtacgtattttgtgatgaaaagttgtttatatattgacttcggcttctttttaacccattttatgatattttttaatttgtattttttgtttagtcatgtcttttttttcttgtgtagcaaatgatcttttgttagtacaaaagtaagactaatttattcaattaacaacaatggaattaggtaggctacatttacatgttttagaccaaattgtttgtgcatgcttcagcttaaattaaacctatttttaagtaggagaagtcgaactcatttagatgagaagaacctatactagtagatcaccaccactactataccaaaaacgtttctctcaaaaacatatattcttgtctacatttttaacccaagtaagaggaggtagataagattgaattaaacccattagatatatgaccggataggtggccaaaggtctaaaaacctaaccgcaagatttaaacactagttgttgttacttttgcattgacaattgataatgcaaattacccgttaatgttttttcttttatgaatcaatgtaaaatttattcgaaaaactctttgattacaatatatgcagctttaagcagaatgttttttctgaaaaaaagtattcccattaagtgatcttgtgttatcataaaaaataaataaaagataaggtcatatgtcatcataacctgagcctaaaggtaacgactaacgacaaccgtgacatactttttcattaagcacgttacacgacgagactagcgtagtacgtgtcgaactatcctcatacgtgtttgattcactgctataaatagaaccaataataacgatgttaatatttggttcttaatcaagatattgtggaccgcttgtccataattccctcggaaaaccaaaacaggtattatattcaagattcgacctcgtgattttgaggtgcattattttttgtagaagatttccatcttctttttttcacggctctcaaaggtttccttgtacacaagttacactacactgaataattttctttattgcatcctttaaacaaacttttgtatattattttgatattgaaatccaccatatatatgtctttttttctctgtcgcttcctatttgatgcatgtgaataattttcactactatataaccagttttctaatcattttctccgtagtaaaagacaaaagtaaattaacgaagctcgttataataatttagtacttaccaaaaaacgtccaaaagttggagataactcgtttccaagatattctacacctcttcttaagtctctgatccccaaagaataataattatttatacgaaaatatatataaatataacatactgtacaatccgctgtctcaggacatccaaaaaaatcatttatatcagtaacaaaaaaaacatatcgtgaatattaaaaaatcatcaaataagtgataccaatgaattagttgttaaccacagtgatttaaaagactgatattttaattgatgaatcctaggaatgaaaagttgataattgtatgatctaatctccaatttctttcctctttaaagaggtaaaattgccacatggaacatttaacaccattctgaatttctgattccaggaacgttgtcgtatcatatctactcgtgtaagtcttagatcgatttagaacttagaagaacaacacttcttgttttatcctaattaatactataatatatgcatgtaaaatcttgttttttctatatcgggtcaatgtgaattgatatattagtttgtgagtgtgtcggcttccgtaacttacaggaagggtttttacttttctttttcagataattaatgaagaagaagaaaatacaaccaaatttacacaaaaataatggcaaattaaactattttggaacaacaactcgcactctctattagtcctccacgtaatgcatgcatgcgttatttcttttatttcctcggaaagcacgtactaatcttccaactttcaatactaatactcgttttaatatgtgtccaagtaaacattttctgtccaagttcattttcaacttttgagttgtcaatgtttctatttttcctctttatttttgacatttgtcattgtttccctatattaaatttaaacgataataatttggttcggttaatataacgctactaaatatatatttagaagaaaatttaattgtttaatcataattcagtttattcgacatttttatccataagtattataatgtatagtattatttttagagataatcattaatcagagaataaaatataattctggtccatttaacttttaactatatataaacccaatgaaatgaaaacaaaaacacacaaaacacaaacacgcaaaccaaaagagatcaaaccaataatcaaaatactcctcattatatcagaaaaaaaaaaaaaaatg

SEQ ID NO: 1565 - DNA, 3000 bp, Unknown
  misc_feature (1)..( 3000): cDNA_ID_3063117_gDNA_ID_1620418_Annot_ID_156507 3000 nt of promoter + ATG
aatttcgtacgtatccctcttgtcgtctaatgattatttcaatatttcttatattatccctaactacagagctacatttatattgtattctaatgacagggaaactttcatagagattcagatagatgaaattggtgggaaacatcattgaacaggaaacttttagcaaatcatatcgatttatctacaaaagaatacttagcgtaatgaagttcacttgttgtgaatgactatgatttgatcaaattagttaattttgtcgaatcatttttctttttgatttgattaagcttttaacttgcacgaatggttctcttgtgaataaacagaatctttgaattcaaactatttgattagtgaaaagacaaaagaagattccttgtttttatgtgattagtgattttgatgcatgaaaggtacctacgtactacaagaaaaataaacatgtacgtaactacgtatcagcatgtaaaagtatttttttccaaataatttatactcatgatagattttttttttttgaaatgtcaattaaaaatgctttcttaaatattaattttaattaattaaataaggaaatatatttatgcaaaacatcatcaacacatatccaacttcgaaaatctctatagtacacaagtagagaaattaaattttactagatacaaacttcctaatcatcaaatataaatgtttacaaaactaattaaacccaccactaaaattaactaaaaatccgagcaaagtgagtgaacaagacttgatttcaggttgatgtaggactaaaatggctacgtatcaaacatcaacgatcatttagttatgtatgaatgaatgtagtcattacttgtaaaacaaaaatgctttgatttggatcaatcacttcatgtgaacattagcaattacatcaaccttattttcactataaaaccccatctcagtacccttctgaagtaatcaaattaagagcaaaagtcatttaactttcctaaaacaatggctttaaaacatatgcaaatctttctcttcgtcgctatattttcatcattctgtttctccatcactctttctcgtccactcgacaatgaactcatcatgcaaaagaggcacatcgagtggatgactaaacacggccgtgtctacgcggatgtgaaggaggaaaacaatcgctacgttgtgttcaaaaacaacgtcgaacgcattgaacatttaaatagcattcctgccggaagaactttcaaacttgcggtaaatcagtttgctgatttaaccaatgacgaatttcgttccatgtacactggtttcaaaggtgtctcggcattatctagccaaagccaaactaaaatgtcgccgtttaggtaccaaaacgtttcttctggtgctttgccggtttctgttgactggaggaagaaaggagctgtgacccctatcaagaatcaaggcagctgcggtataactcaaatctttattcatatatatataagtgaaatcaaattgaaccaaccgaaatttatgtattcaatcaatttgagttaattcatagtgaacaaaccgatccaaaccaaatccatagtgtaactgaccgaatcgaataaccatatttttattaaatttttctatgttaagttatatatattttgtttcataccgttttattgagatatgtagttagacacatgaaaatatttatgatagtgacactaatgagtgatgtttttgtaggatgttgttgggcgttttcagcggttgcggctattgaaggagcaacacaaataaagaaagggaaacttatatctttgtcagaacaacagcttgttgattgcgacacaaacgattttggctgcgaaggcggtttaatggatactgcgtttgagcatataaaagcgactggcggcttgacaactgagtcaaattatccttacaaaggcgaagacgctacttgcaattccaaaaagaccaatccaaaagcaacttctattacaggttcactttagttaaagagctggcatataataattaaacagattaaaccgatttttaatcatattatccaaattaataaacattactatactagataaaattcatattttgaatcttaaaaagctcatgtacgttcacatatcataggttatgaggatgtcccggttaatgatgagcaagcactgatgaaggcagtggcacaccaaccggttagcgttggaattgaaggaggtggttttgatttccaattctattcgtctggtgtgttcactggagagtgcactacgtatcttgatcatgcagtaactgcgattggatacggcgaatctactaacggatcaaagtattggatcatcaagaattcatggggaacaaaatggggagaaagtggatatatgaggattcaaaaagatgtcaaggataaacaaggactatgtggtcttgccatgaaagcttcttacccaactatatgaattcaaaaccgtgttaagcttttaattgtgtatgtttgtgtgggattgatgtctaaaaataatttgaattgttttatgtaaaaaaattgtatttagactgttgtatgcattttatgaaattgtaagcttatgtaatgcaaaggattgataattttcgaaatgtttctttcaaatttcaacggtattagctagggataatttgaagcatatgcacaatcaaattccaccaagtaaaaatgaaaatttgttaaaaaaatgaagtttgaaaactcttaaccatttactgagaagactgtaataaaccgaatttggttcagtttgatttttatggaaaaagacgaaccgtccggttaatgctttttacttttttaaaataaaccggttttggtttgcttggatataaagccgacccgacccggattgaccatgttccttgcacgactcctttttctcaccgttctccgtcatcgtcttcttctttctcacattcattgactctcctccataataaacattgcaatctctcagaaagataagatcagcc

SEQ ID NO: 1566 - DNA, 3000 bp, Unknown
  misc_feature (1)..( 3000): cDNA_ID_2046448_gDNA_ID_1620418_Annot_ID_156512 3000 nt of promoter + ATG
ccctaaatttcctttatttttttagttttgtattcttttctccattctccatcatcaaatccatttcattatctgcaacctccatcaatgaacgactgtgaccaacaaaaaaagtaacatcatcgatttctccttttcgagacgaagaagaaggagatccttactctctgctaccgaactccctcttcccttaatcttcctctttttctggttccatgctcttctctcttgtcttacttacggtttctggtttcgttgtttttttttggtaaaaggtttctttggttttgaatcataaaggccaatggtacatgtgattcgttgattctagcttaggctttaaattgtaaatctttaaacttttttttttgttatgggttctagattttatgattttatccttcaatttaaatttatttttgttagatctgttgaatttattgccttgtttttgaattgaaaaatgtttggatgtcatttgcgtagacgaaaagtgattggacgcataaggctgggtatgtggtggttatgcaagaagattggttgatgtttatgagctttttttgaaactttggtccatgaggctgcggtggccgccgtgagctccagtgtcttgtctggcaactccatacttatgtcgactcatggatgtcaagaaaagtttacgagaaaacacgaaatgtatatccatttgttcggcgctaggtggatacaccttcatttgttgcactatatccatttggtcgatgtttcatggatacaactctacttctaaaaatcatagatgaacacgtacttgccgattgtcagctataggaatccgtccattactcttcgaagatatgttatccaactaatgaaatattcttttatttgattttggtgaacaatgtttacatttggtgaacaatgtttagatttggtgttattcatctttcgtatatttgtttgtgcagataaaacattttaatgtaaaaactgtaaaatataggatcattcctatggtaatattcgtatgattatattcaaaaatggttcatacgagtgtgtaaaccctctacccttaacgctttacactaaatcctaatttacttaccctaaaattaaacccaaaccctcccatgatccttctccactaaatctaaaaccataaaacaaaactctgaaccatacaaaaaatgataattttaccaaccaataaaacacatttgaagcaaatcaaagacatagttgtccattgatgactatccaagcggtttagtccatgtggtaatctagtgactcatgaggtcgtttcatttcaatacacaagtttatacatgaatgataatcaccaattcaaacacccattcaaagtacatcgtctatttttctttaaccatttattcacttgtgtatggaaactcccaacattataaccaaaattgtctactaatcctagatataacaagaaacagatttacttatatagtgtataaaaggagcataatatcgatgtttgcgtctgaatggacagattcccttggatgacattaacaagcaggcgtccagctgaccatatatgtttgtactatcatctatggtcaccaatcatttgaatcaagttgaattcatggatgcacagtacgtcagtttgtgatgtaaattaatgtaatgcaaataatcatctgcaaaattgaatcaaagagaatataagatcaacacaaaagcaagtgtttggggaatcggatgcatcataacaagcgaatatctactcaaacaagtttaaactcaattcaccataacattcacacccaataaaaaaaaactcaatatgaataaatcagtgtggaaagaacctgatacaaagctgctccatcaatggaaaatcttcaaacactccacaagaagcaaaagcatccactaatcaagttttttttatctctctctctcaagctaaaatcttaaaccaccaatatagaataaatgagaaatcgtttactctaaggaaataaaaactaattgaaaattgagaaaagtgctatataagagaacacaactttgattaaataagcccaaaattttctctcgccgctgtgattatcagagaagtgggagaaccacgactgatgatttgccaccaaaaaccagagaaacgagatcgcggcttctactgctacacgagatccttcactcggtcgctcgttcacttattctttcttttcttttgttctccatattttatggtatctgaaattctaagatctagcaagtgaagaactggaagaaaaaaactgcaaactttaaggttttggagcaattgaatgaactttaggtagaacgcatgaaactacaataacatgaataaacacatagacaacaaaattatcagggtacagatttttaaaccaagttgtaattctagcaaacccatcaaccatcatcttccgctggattttgtgttttctaaagaaaaaaaagagatagaaaaaggaaagagacaagagattgtaaccgatgtaattaaagggtaaataagtcaaattgtccatacaaagtgcctattccttgaaaagtgtttaatcacgtaaatatttttaaaaaagtgctctacactgtaatattctcattaatttatccaataactaaatacgacgtcgtttagttacgaaaggtaatttggttcggcgtcgttacaaagactaaagattcacatgaatgtaactgttttttatccatatcaattttcaaaccaaaccaagaactgaactcgaaccattttttatccaaatccaaaccaaaccgaaatttaattggacctacaagcccattatatattcaaattttacaaaattggcataatataataatacaatgtttaataaataattaaactaaactgagtaaaagagggaaaatctacgatcctctctatctccttatccaacaacaacaaaaaacgaattctcgaagagaaagacactgaaatcgaaaaatctatagagagctcactcactagca

SEQ ID NO: 1567 - DNA, 3000 bp, Unknown
  misc_feature (1)..( 3000): cDNA_ID_2031118_gDNA_ID_1620418_Annot_ID_156515 3000 nt of promoter + ATG
cggttaggagaatatatgttcaaattatttgattaacctatctttaacccaaatgatttagattggtttgaaaccgaaccaaaccaatagctcaatcatgaataagatgatttagtgtagcttggttgtatttttcttttcaaatatataagtgaaaatatgtattaaattcaaagaaaattattagaaaatatataaaaaccaagaaaataacttattttggatttttttttttttttttaagtgaactcgaacccataatttttcttagtcagtgttcttctattgattttctttattttgataaagattattattctactgatttacaatgaataaaataaaaaagagagtagatctgtttccttatccacaataattcaatttggtagtgaattacaattatacgagtaagtaacagtcgatcgtgagagagcaagagatatagaaaagtgggtgatgtgtctaataaatataggtcacacaaccacctaatcttacgaatcattctactctccatatttaaagttatatagcaatcaatgtcagctacattttcttacgtatcttttttttggttataatatgccatgattcttgaaaattttaattcttgattcatagaattgtatactaaaggttgggatttatcataataatggaaacatgaattctatattaatacataatgaactggattctagaataatacagagatttgggtactggattaaatcgaaaaaataaaactatactgtttgataggtacatttagataactattgtcctggtattattttttaaattttttatttttaaatctgtcgcattttgtttttcctcaagtattaaaaagtaagaaatggtatccaattttgaaccgaaactgcattaaataaactgacccgaccttgtgtgtgtaaatgtatagagtagacacacattaatagttgaaaaagggcaatgctaattgttagtgaccctaattaatactccggcaaggatatatgaccattctctaactgttatgttccaacacattaggtgacctaaaactgtttggaaactttcatgtcacttaataagtaataacaaagcccatgtcaacatccttttttatgtgtttttccccaacattttggtttaattaatcactcattattatatattacttacctgatgaattagctatctgatgaaagtttcgttagaaatatttacatgattaaacacttaaagattaaaaaaacaaaaaattcgatgagatatcagctaagaaaagagagaaaaagataaggctaaaaagtttatggctgtaatataatatataataaattaaacagaaaaaaacttgaaaaaatctaagaggagtaattaatattgaaggaagacagatgaaacaattgtataaaaaatgaatgatagaaattatttatcaactataatctttttttgaaaatctattgtttgtagattataatgaacaatatttcgtttctattaaggtaaaaattacaacaccatagagaggacaacttagctaaatgaccatcaacattgaataaattaggtttgaatgattaaatcctttaacaaaaagtaggtaaatgtttatggaacattcttattaaaaaagcatttttattttctcaagaaatataaaagaatgatatttcttttctttttgcccaacactatgtttttataaattaaatgtttgtatataaaatagtcccaaacaacaaactaggcgtacaacggcatgttattcaaataaatagcactctgattacgtgtttttttttttgcaataaaaaaattcataaacttaattaactctctcaaaatggttacatatatatctaccaacttgacttaaaaggaagaatgatctgacttctgagttctgaaattcatatttaacaaattatccataaatgatgtgttggacacctattaacaaattagcctctagtgtacatgttagacaccgacgtattacttcttggtctctatccaataaacatttggcaaggatcttaaatatgtataactatttgatgtataagtctgttaattgtgaatgttaagaccgagagtataaaagagcttgttaccagtttaagtcattatttatgtatctttattcccatcatggccaaaaatggctgcgttaattactccaccgcaacacgacacttaaacctaatacttaaatgatagtagataagttggatatggaataatggatacaatcctcacaaaataaatacaatttagaacagagaatgtttgattgcttgatgttttaacattttataaaattctgttctttggcaaaagtgtcgttcggtggtttactttcactttattagtaaagacggtgacagtaatttatatatatatatatatatatatatatatatatatatatgactttctaaatttggaaggttagtatgaaatttggttcagaagaagctacaattcatctagtcggtgaaaataattgttgttgtagtcaaaccaaaattacttacatgatttcatttttatatagttaaaagttaaagtttgttatattattacttatatgttcggatttagatctgaagagagcagtacggatttaaagcccaaaattgtacattatttcacgaatataaatcccatatatatgttttttttttctcaaggaaatcccatatatatgtaagataccataaatagattatttgaaagacaagaaaatcatgaagatatgatatatcaacaaaaaattaacacaagaagtcaaattaaatttctctgttggccactttacattatgtctcaaccaacaacagaacgccaagctgtccaaaaaaaaaaaaaaaaaaacccctcaagagtctatatatataacaacattctcaacacaaaccatatgacatttacattctctcaaaagaaactttctacataatataaaaagtcacacattctctctattaattaaac

SEQ ID NO: 1568 - DNA, 3000 bp, Unknown
  misc_feature (1)..( 3000): cDNA_ID_3063127_gDNA_ID_1620418_Annot_ID_156497 3000 nt of promoter + ATG
gactgactctcagtctaaaaaatgggagacgattgtgaaaacatcgtattcacaccatgatcatgttcgctattcagaggtatgtattaatcggtccgagtttcaagaaatctcttaagaatctttctctttttggtatgtttggtttcaataaatttggatgacgttcaattgtgcaggggcttattgttgttcatcctactcgtcaacacaaattctgaaaaccggaatcgtttttactccatacagagtttccttttttccggtacataaatatctattagtacacatatatgtattttgtacatgagatcatgatgtcggataaattctgtgtcggaccggatcgggttaggtttgaaatagccacattattttcacacaatatcaacatcaatccggacagttttagaaattgtgtttgatccaaacatttggtatgagaaaattgtattcgtttaaatatttagaacgaattcctttaaaattatttcatgttaataaatttacatcattataaatatataatgttattgatattatgttaatgttattggatgtcacatcatcatcacaaaaaaatgatatgtgtctttctacattatttaaattaaaagattagaaaatttaattgaaagaaataaaaaatttattttgttaaatcctctattaatctcattcttagctaattttttacaaacaaacaaaatcatggtaatgtatcaatcattactattattatactcttcttgtttcgttaaatgtttctatatcaatagtcattactcgataatgcctaaaaaggttaattgtgttgtaagttagatgtttgctacttaatcttttattaatttaataattttcttttgaatcttttttatcattacgttttatgaatatgacttaccatattgtcttctttcttttcatttatgtgtcttatggtaaattggtcatattgacatgcaaatgttttcatgtaatgacattttaaaatgttagacatactaaaaatattcaagacacaaaactctctcttatatgactatatggaagaagaaagatttaaaatgagtacttaaattactatcataatgtagttgaaatagtagatgaggagagaaaatacataaaaaaaattgtttgtttaaaatcaagttagacaagtttcaaaccacattataagtaaatacgattgtatcaatgcatcatatatagttattgtatgaattcatgataattaaaaatactaggatcttaggtatataaataattatatttaaaaaacatataattgatatttcgagttaaagatgaatctaattataaaaaccataactatataaaatgaatatgactttattatttacataataacacacataaattacaacaaaaaccataaaaatattttttatatagcaaatttcaaaacaaaaacccacagataatgtgggtattcacctaatctgatatgaattatgaatgatttaggcttctatttagattaaagcccaactaagagtacatcaaatcatattttttaaataagcccaacaaatgcccacaattttcatttataaaaaaaaagaagtctaaatcatatattagatgaagcatcaactaataacaccaatatagaaaaaaaaaaaaaattcataaacaaatcaataattatatggaaaaactaattaaggttgactacacaattaaaaattgattaaaatataaagtagtgggtgacatgtactactactgtatagagcacatgactcgaaaactaataataatctcatgtaacctccctcccttattatattcgccacgtcactaaacagcaccgttgatcatcacactaagtaatatttaacggtcgtatattggcatcgcagctccaagtcaactctaatttagaattaatgttaaatatcttaattaattttttactaatctttcgcgccatatatatgttcacgttatttaacaacggaaggaataaaagacgaaataatgaactaatttcttgtttattttcttagtttttttaatagtttaatttatgcgaatacaaacatttctataattatggaaaatctaaaggaagttaatagggtcttactcattgataggatatttttttaaaaaaataaaaaaacagagacagttttgtgggggaaaaattgttaaaaaagaattaaaaaataggaaaaaaagattcgacaagagaaagagagagagaagaggaagaaaaaggaaagagagaggaaggagagaggaaggagagagaacccaccaccctttggccctggagagaccaaagatggtcgaagagagaaaactctgagatcatcatcttcatcatcatcatcctgtaaaaataagggcaagttctacaagaaatcagaaaatatcaatccaatatttgtttttaaacagaaattctatctttttaaaagtttttttataatcattttctattttctggggattttttttatatttaatttttcatttctcaaaccctatacccaattcttggtgaagaagtttcttctttgaggtaattattttgcaatgttcttcatttatcaagagaaaacaaatgtttttttttgtttggtgggttccatgttttcttcatattgcttcttcaagagggttattcttattctttatttttttggtttaattattattggtatacatttgttgttaaagttttgatatatgtttgtttgtttcttgttggcatttgtttttttccaggattaacaagaagaagagaattaacgtacgagttgttgactcattaggacatgaacattgtttttagggttttatgagtttgcaaaactggaaacaatgagagaccctgaatgttcaatcatcaacctcgtcgttcttctcctaccaaggattctgtgaagtttgtatttttatattcgttcatttaggaaaaaatctggcgattttgtatagcattggtgtatacctaaaatg

SEQ ID NO: 1569 - DNA, 3000 bp, Unknown
  misc_feature (1)..( 3000): cDNA_ID_2025243_gDNA_ID_1620418_Annot_ID_156506 3000 nt of promoter + ATG
aatgtaaaaaataagataaaataaatagaaattagttcaactataattagtttgcttgagtggatggaattttttttttgtgtggatggaaaatttatcatgtggatcaagatcacggatcaacttttaagatgtctgaaattttcgtcattttgttatgaccatggtaaatgtttaaatggaaaaatattcgacaagctatagacctcaagaatttgtttcggttaatttataattttatatatcctttttgatctaagagaaaaggatatattttggaaatttgaatctgatcaatgttaatcttagaagctgatttacgaaatatttgaaaaaatgtagtcaaggacattgcaatactctcattcgaatttagaaactgatatatttattttatgacagtgcttgcatcctctaggctctaacatgcaagatagtttgcgtgcgcatgcatgtatggccatctcaaaatgataagtttttttattaaacgaaaatattctcttaaaaagaaacggttgcacgttgtaaattagccatgcacacatacatgtgtagaaacatagatatacgtgcgtaaatatgttaccttcgaggaatttgctgagacgggtaacgaattggacacggcaagtgtcacagtaaactgatccttgaatctggaaacgatcgaagtcgtcagcatcagcggcggcgaaacctgccagagaagacaaacacacggcggagacgacaaagaaagagaagaagatagctttggaagccatttttattagagatttttgttttgtttttggtcttctcttctttttgatatctctttttatattcaaacaataagttgagatatgtttgagaagaggacaactattctcgtggagcaccgagtttgttttatattagaaacccgattgttatttttagactgagacaaaaaagtaaaatcgttgattgttaaaatttaaaattagtttcattacgtttcgataaaaaaatgattagtttatcatagcttaattatagcattgatttctaaatttgttttttgaccacccttttttctctctttggtgttttcttaacattagaagaacccataacaatgtacgttcaaattaattaaaaacaatatttccaagttttatatacgaaacttgttttttttaatgaaaacagttgaatagttgattatgaattagttagatcaatactcaatatatgatcaatgatgtatatatatgaactcagttgttatacaagaaatgaaaatgctatttaaataccgatcatgaagtgttaaaaagtgtcagaatatgacatgaagcgttttgtcctaccgggtattcgagttataggtttggatctctcaagaatattttgggccatattagttatatttgggcttaagcgttttgcaaagagacgaggaagaaagattgggtcaagttaacaaaacagagacactcgtattagttggtactttggtagcaagtcgatttatttgccagtaaaaacttggtacacaactgacaactcgtatcgttattagtttgtacttggtacctttggttcaagaaaaagttgatatagttaaatcagttgtgttcatgaggtgattgtgatttaatttgttgactagggcgattccttcacatcacaataacaaagttttatagattttttttttataacatttttgccacgcttcgtaaagtttggtatttacaccgcatttttccctgtacaagaattcatatattatttatttatatactccagttgacaattataagtttataacgtttttacaattatttaaataccatgtgaagatccaagaatatgtcttacttcttctttgtgtaagaaaactaactatatcactataataaaataattctaatcattatatttgtaaatatgcagttatttgtcaattttgaatttagtattttagacgttatcacttcagccaaatatgatttggatttaagtccaaaatgcaatttcgtacgtatccctcttgtcgtctaatgattatttcaatatttcttatattatccctaactacagagctacatttatattgtattctaatgacagggaaactttcatagagattcagatagatgaaattggtgggaaacatcattgaacaggaaacttttagcaaatcatatcgatttatctacaaaagaatacttagcgtaatgaagttcacttgttgtgaatgactatgatttgatcaaattagttaattttgtcgaatcatttttctttttgatttgattaagcttttaacttgcacgaatggttctcttgtgaataaacagaatctttgaattcaaactatttgattagtgaaaagacaaaagaagattccttgtttttatgtgattagtgattttgatgcatgaaaggtacctacgtactacaagaaaaataaacatgtacgtaactacgtatcagcatgtaaaagtatttttttccaaataatttatactcatgatagattttttttttttgaaatgtcaattaaaaatgctttcttaaatattaattttaattaattaaataaggaaatatatttatgcaaaacatcatcaacacatatccaacttcgaaaatctctatagtacacaagtagagaaattaaattttactagatacaaacttcctaatcatcaaatataaatgtttacaaaactaattaaacccaccactaaaattaactaaaaatccgagcaaagtgagtgaacaagacttgatttcaggttgatgtaggactaaaatggctacgtatcaaacatcaacgatcatttagttatgtatgaatgaatgtagtcattacttgtaaaacaaaaatgctttgatttggatcaatcacttcatgtgaacattagcaattacatcaaccttattttcactataaaaccccatctcagtacccttctgaagtaatcaaattaagagcaaaagtcatttaactttcctaaaaca

SEQ ID NO: 1570 - DNA, 36 bp, Unknown
  misc_feature (1)..( 36): cDNA_ID_3063171_gDNA_ID_1620419_Annot_ID_156527 3000 nt of promoter + ATG
aagcttcagtctatacactttggagagagagaaatg

SEQ ID NO: 1571 - DNA, 3000 bp, Unknown
  misc_feature (1)..( 3000): cDNA_ID_3063154_gDNA_ID_1620419_Annot_ID_156547 3000 nt of promoter + ATG
acgagctgttgggacgtggtcttcagatctcttacggcaacgacatgatcttctccagcgaagaagtcaaggcgacaggtacagacgtagatattccggcgattaagatctttgtcggttccttcgcgtcggaggaggaggatcatagctccaagaagattacggtgaatttagtaaagcgtaaagagaatatgttcaggagaaagattcgcaagtttctcaaccatttggtctgaagaacaaaactcgagtttgttgtgttagaatctaaggaacatttagagaagcacattctggtaaataaatatcattatccatatgatgtgaaaatgatgaagatgattttgtctatataacaaattcagtagaatatgatttttgttttgtgaaaccttaagtctataatttgattatattagtagtctatatagattgtctcaagagtcaagtctcaagtgatttgattatgaagatggcaataaaacttacattaatctacatgtagtctcttagctttggagaattaggattggttttcacaggaaccaccttgttgtgtggttgcgcttagttcagggcaaggtgtggggttgaccttgtcagcggctcctacgacatctgagcatttccatattggagacctttttgttccggtcagtgtaacattggagaagcagagattggtgaaaggtgaatcttttaatccctgaaccatgccagcacgctcgactttgatgccccatacgttcttgatcgttatgcctcttactatgggaagagcggatgtgttgaatttatcgtctggatgatctccggtgtcgccagagatcttaatcccggtccggactttttctaggtaaaccccggagattgttatcccctgtatgcttcctcctcggccaatgtttgtcttgatgtggatgccgataccagaattgtagagagtgatgttttcaactgttacattttggattccgccagaagtttcgcttccgatggctattccagcaaatggggaagatccagtgatgcggcggatggtgatgtcacggcttggacggttgtatgcaatgccatactcgtcccaaccgctcttcaccgcaacaaggtcgtcaccagtagatatgtaggagtcttctatacagacgttagagcttgaatctgtggtaattagtaaacacatcagtcatgatttgaaacgtaacaacatgattaagtagaagagagaaactgataaaaaaacctggatcaattccatcggtgttgtacgaatcagttggagcgaggatagtaacatgatgaacaacaacattactgtaagaaaaaagatagttaagtactaatggccaagtgcatattaaagttcatgagagatttgtgaacctgcaataaaccggatgaagtgtccagaaaggggagttctgaagaacaacatgagagacgaggatgtttgttgagttgttgaattcgatgagaccaggtctggtaaactttagagttccatgtctccacatgttccaccaaggttctccttggccatcaatcgtcccatttctgcctagcaaacgcattgacagacaatctgatttagaagatacatttccacgacatctaagctgacacaaaaaaaagtaacaacctgtaataacaacgtcgttgagtccgtctccgtgaataaagctgatatatcttcgtccaggatgctcccgtcctcttccataagacggcaaaggatcggtcaaaggccatttctccgtatcctaaagtaatcaaacaatcagaaatcgcaatgtagaaacaaacaattcctaacaatcattgaatcaagttatgtaaattagtaatcattcacctgaacggctttaataacagcaccatcggcgaggtataaagtcatgtgactcgtaagattgaagctttgagtcaaatacacaccacgaggcacataaagaagagttccttcgttactgttattggagtttcgtatccgatcaatagctgaattgaatgctttggtgttcaaggtcttgccgtcaccgacagctccaaaatccgaaattgatagcatctcgtttctgtgtttcattggaactataccagagcatgtaatcggagctcccagtgagagatggtgaggcaaaacagtggagagcaagaagagtacgaaaacagagatcggagcttgagaaatcttcatatctgagacgagagactttggtagagagtgaagaagagagagagagagagagtaaaatctcaatggaaatttctcgccggagaattttgattactgtggatctagctagagagaagtaatggcacggacgaagaaagctaaaaagcagggagattgttaacttacgtttttgtccttctcttagcttaaaacggtctgataattaaacttcgaatctaaacaatttaatattttacagcataatcccagtttaactgtaatctaaacaaggccaattaataaatatgcaagcccataactacagtttggcccattagtttttccccgcgccaaatttgccctagttcctttcttctttcccgctatttccaaaatctcccaaaaggtcaagttccagcaaaatgacacaatctttgtaatcaacattgttctccgtcaagcttctccttcaaaattcgtaagctttctgttctctaactctttttggtttcagtatatgaatcaatccgactttggaatctctacttaaaaataaaaatcgatctttttgctgcccagatagtgaataaccttaaaatcgatgacgagagaggagactgaaaccagtggagaggatatgatgattgatgacccaaaacccaaaatcgaaaacgatttcaatgttcattacctccgaatttactacggcaagttttaatctttatcacatttgggtatatgtctcttcataaatcaaatctgacttttttcgctcataacaacatatatgcaggaaatctatttccttacactgatattcacaa

SEQ ID NO: 1572 - DNA, 3000 bp, Unknown
  misc_feature (1)..( 3000): cDNA_ID_2141585_gDNA_ID_1620419_Annot_ID_156546 3000 nt of promoter + ATG
gaaaaccagacaacattcatacattgaactaagtatgaatatgagagtaattacctggtaggatatattcaagaaacaatgaaagggacctgtttttggatggacgcagaagggtgccttaagcaaatggttcatttgttttgaaacctgcaataaaagaagaaaccatacaactaaacagtcacaaaacttgtcagttgctataagatctaatacggcgagggaatatctaccataatagcacaatgggtttatgaaaattgtagcatagagtagaacaaacctccaaatcaattcgaggatacgtaaaggtgaagacaatttcttctacgcacgtccgcagtgatagagcctaaaacattatggatacaagattgaagatgagcaaaactaagattcaagttcatcaagctaaaagctgagtgaaagacaaataaggttttcacaacacttaacatacatgttttgaattcctttaaaacattacacaccttgtttctcttcgattgaagagctttcttaagttgttcccaccttaaaaggctggtggcttcttctgatagagatgatctcgcagaattctcccactttcctctgaggtctgcttgaatatctgtcatgaagatgcaaatcattgtaaatgacacaaactgagattaggacgtcacgtaggcggaaaaatacatcaacactctttcataccttcatctgtaatcatcccaagtatcttctcatacttttctttgcttgagaatatactttgagttgcttgtaactcaccctcaaagaaactcttaataaagtccacatatgatctcctgaaaatcccagaagaaattagtaacaaagacagtgtttttgaaatcagaaaggcagaggtgatggagaaacccttacgcaagaaacggatgaagagaatgacccatcagatcgaccttttttgcattgttttcatttccctgtgtcacataggcaataattgaactcagacaatttcacaatgccagaaaccaacaaaataaaccatcgttgagctcttgagaacactaccttataaacacgaaagtattcagcaactgctgatctttgttcattagtcaacctgcaggatttaatcacacaacgtttcatttcataaaacagaagatgaaatgcagaaagtgattcatacaccaagcgaagtgaaaaacaatgttagtaattgtttcaccttcgagctttagcatcacaaacccaacagtgaactccacgacgtccactgaagacccagaggatgtgtttgaaaccaaaatcctctgcaattgacaagaccagaatgagtgactacaagtttgttctatgataagaccaagcagtcttgcacattgacaaacactagatcaagaagtgaactccacaatgacattcacgttacaggggctataaatattacaaaaactcatagggatggaaaatctcaggaacactacaaactctagttgtatcatacatttgagagttaagaaaacatttttgatacctcttaaggaagtatcaatgactttgatagcaactgtcattaaaggccagcatttggagcaaacatcggctcccgaacaacagtatctaacatcatcataatctgttatatcctgaggaaacaatatattcaagtcaagcaacaaactacgtaagaacaaaaacacaaaaccaattatacgaaattcttaataagatattaaaactcacaatatcaaagactaactccctctccactggagtaaacaaattggttccactttgagcatatgcatgtctcttatccggctgaaaaaacacatttacaaaactcaaatgagtaaatctagtttcatagaccagcaccaaagcttgaaaaacggatttttgcaacttacatcaacgctatacacagcaccaatatcaatcttgtatggaaaattcgatttgatagcagcttccataagtgaagcattcttgaaagacttataccgcaaataaacatcgttttcaagcgtaaacgagaattctcttctaccaaagtaatattcatcacaaccaggatgtttcccatctacagattcacaaacacagacaaatatacaattcatcacaaccatttctaacctttaaagagtgtgacagaaagaaagaaagacaagtaaacaaacaagtaccgtgcccataagaaagccatttgtgaatatcagtgtaaggaaatagatttcctgcatatatgttgttatgagcgaaaaaagtcagatttgatttatgaagagacatatacccaaatgtgataaagattaaaacttgccgtagtaaattcggaggtaatgaacattgaaatcgttttcgattttgggttttgggtcatcaatcatcatatcctctccactggtttcagtctcctctctcgtcatcgattttaaggttattcactatctgggcagcaaaaagatcgatttttatttttaagtagagattccaaagtcggattgattcatatactgaaaccaaaaagagttagagaacagaaagcttacgaattttgaaggagaagcttgacggagaacaatgttgattacaaagattgtgtcattttgctggaacttgaccttttgggagattttggaaatagcgggaaagaagaaaggaactagggcaaatttggcgcggggaaaaactaatgggccaaactgtagttatgggcttgcatatttattaattggccttgtttagattacagttaaactgggattatgctgtaaaatattaaattgtttagattcgaagtttaattatcagaccgttttaagctaagagaaggacaaaaacgtaagttaacaatctccctgctttttagctttcttcgtccgtgccattacttctctctagctagatccacagtaatcaaaattctccggcgagaaatttccattgagattttactctctctctctctctcttcttcactctctaccaaagtctctcgtctcagatatg

SEQ ID NO: 1573 - DNA, 3000 bp, Unknown
  misc_feature (1)..( 3000): cDNA_ID_2141597_gDNA_ID_1620419_Annot_ID_156549 3000 nt of promoter + ATG
gctttaagaagagtcagcttatcaattagttgacttcaagtgtgtacaagggttttgttctgttagatactttagagaattaaattcatattattgtaactaaccgttaaatcaagcacatttatttctaattacgtagtactcgctttcactatttctgaatgaataaactaaggcagggcaatatatatataacaaatactaattattgttattattttttgtaaaaacatatgcaatgttttaaatctattacttgtgattgttttttttgaatattgtatcagatatatatatggtcgaatatctaacaagctctaaagtgaatataaacaaaaaaaaaaaaaaaataagatctatgttctatgtcgcctctaaaataaacatattacatacccacaatatcggaaatggttcgaccattagtgaatcttcccgtgggttggccgttggaaggtgcaaaatcgatgccataaggcgaagaatcagcttttgacaatgtgaagatatagttgttgtttccaacatctaccaatgagtctccaaatatgaagtttgtgaacgattgagcagcctgaaaatgtgatagccaaaggagaagaaaagtgcaattgaaaggcttgagagaacatctataagtgaaatccatttttaactttctcaaaatatttgccaatgtggtaggaagaaacgaaagagacttgtttggttaaataaacttgattacgttaatactttttgaaccattccttttgcttacgtatgttacagcatgacttgttcaaaagatagcacatggttcttctacgtacactattattactttgttggtcgtgtaacacaaaaattgtttcgtcttgtgtgcacatatactcgacttatatgacattaacatgatctcaaaaataatcctaagttacttataaagaatatctcgatttttgacttccaagtttgtaatcaatgttataaataggacaacaagctaggctaggctgtcttttagatggttaatagtcaaagagagtgatggcaaagagcttaattaatggcacatgtgactcatcgaacacgcttcttcatatcttcttcttctcaaacaacactacagaaatttgtctccaaaaaaaaaaaaataataataacgctaaagaaattttcttttaatatacctctattgttcaatatatatatttggcagcctctatgttcaatatatataatatatatgtgggttagtttcaactaaatacaatacctgactatgtcgggattcaaacaaaacccaaacatttaaactttacaattataaatttaaaaaacctttaaaatgcaactaaaaatgttttcttggtaagaaaacacacaattaatgtttataaaaaataaactaaggatggtatttatttgaatgcttttgttaaatgttatataaatagttttaaagctattgttttaccaaaataaactaaatgtatattataaatactaaatttattggatttaatttattttagtaaattatcattatatatatatatatatatatacataatgttaaaacttaaaagatgtttaaaaataaaatttggttattcatgtaatgactatattcaagttgtgacacatgtatatatcgaccccaaaatagacctcttataaattgtcattccacgtcacttttatccgggattccaggttatatgtaaaaaaacaaaaactgatgttctacatcatttaatagaaaactgaaatgtgatggcacatacataatgcatctcccaagatggtacaaaagtaatcattgtccttattcttcagattcaaccttgagactacccaatctccgtggaggggtttgagcaggagattcaaatatccccaaataacttggaaaagtaattaaaatttcatataagagaacaagtgtgtaagcatgcaattcaatcgagctctcacgatatccccaataggacgaaggaggaactcagtcggaggcggaaagaaaattgacatgatgcagctattcctcgatccgacagatcgtttggaaagaacaatgccttaaaaaccaaacacgttattttttaaagaagaaaaacacattactttaaatatatcataccaaagcaatatatgaaaatcataataacagaagtaacaatatgaaatactgtaacgttcaaaccaaattaggtttgtgtcgagaagttaatttaaaaaaaaaaaaattatcaaagcttttatcaaacaaacgtttcacttgatgtaaaaactatattgtttttttgaatttaatttaatattagattcaaaaacaaaaaaaaaagaacgttccaatactcaaaaagaattgcattggaattatctctctgtttatctgatcaatactcaagcattaggttgtattctaatttaactgttaaaggtccaccggtgtcttcagtgacgtatacgaccttggtacatgtttttttacttcacatgagccaatataccacaatctccaaaagataaacgcaagatgataaaccacaaaattttacatgaatagtaaatcatattaaagagtactttttatttcaaggtaaacagtacttgttattcagactttagtatatgtaaaacagtattttcataggaacaaatatataaactagtaagtcatagtagttacctaattggtacttttagacctcaaaagtctctcaaaccataaattaatatagtacattccaaattataaacatattatgaaaaagtttaattaaaaataaatatttaatttaggtttgcaaaaaaaggttcaacctccacccaatttcatgagtttggacagcaaattattttaaatgaaacaataaattcatatatctgtcttctactataaattaccctctctctctcttatcatcatcatcaatttatataaccctctcaaaacacacatttttaagattcaaataaaatcccttcttcaacattcaccaccacaacatc

SEQ ID NO: 1574 - DNA, 3000 bp, Unknown
  misc_feature (1)..( 3000): cDNA_ID_2141547_gDNA_ID_1620419_Annot_ID_156535 3000 nt of promoter + ATG
cttgcaatatcccagccagctcttgacatgcctgagctgctttggaaggtaagttttttaagtcgaatacattcatagaatcgagattcctcagacttttgaaaccaattggataattgaaattctatattgtttgtggcaggcatacattgattttgagatatcagaaggggaattagagaggacaagggctttatatgagcgactcttggaccgtactaagcattacaaggtgtgggttagctttgcaaagtttgaagcttctgctgcggaactagaggaagacgagaatgaagatgaagaccaggaagaagatgttattgaacacaagaaagattgcatcaaacgtgccagaggtaactttaaaactacacattatatcagttttgatgattccttgcaacatgttataactgtttattctctctatatttcttctactcagcaattttcgatagagccaacacatattacaaagactccacaccagagctgaaggaagaacgagctacgctcttggaggattggctgaacatggagagtagctttggtaacctcggggatgttagtattgttcaatcgaagcttccaaagaagctcaagaaaagaaaggcgatcactagagaagacgggtcaacagagtacgcattgcgtatatataatatctcgatttttaatatctttcgaatgtgattagttaaatgctaaagcttaacgtgaaaaattgtttgaatgtttaaacaggtacgaagaatacatcgattatttatacccagaagaatcgcaaacaacgaatctcaagattcttgaagctgcatacaaatggaagaagcagaaggttgctgcttctgaggatgattgagattaagcttttttcttaagttatatcaaaagtcaaaactgtgaaatgtgttttgtattcttccttagctctttgtacacatcgtttggtttagcagtaatttttgttatccaagaacctaacaaaactcaaatttgtcctgttatgttttgttttggttcgaattttccggtttagaaattaatcaggatacttcttcattccggtttatgttctgatctctcggtttgtgatacgtttgaaacggaatctagtttaatctatatatatacattttagtttaatctatatatatatacatttttgctgtgaaataaataatggagttggaacttatttataatcgctggcttattcaatgcaaaaattaactaccaaatcaaagcaaatcttattcaaaacaatatgctcttattctatggtctaattatttttgctaaaatggttaaaatatttaaaaattaaataatcatttgaaagaaaactttaaattgatttaaattataaatcttttcataaaaatattattaataaaaaaaaaaaattcaccgaacatgattagatagtaagactagatggtagggcgtgtttataatattataatatataaactttataacaattaaataactatttgaaagaaaatttttaaattgatttgaattaaatattttttaaattaaaatattattaaaacaaaaataacaaaataatgtctaattttactgaacggggttagtggtaggacgagtttggtcgatagtattacgagacggtataccacaagtgaaatccattagatatgtttaatttcactgtggaggattagatggtatgacgggttttgatcgataataatacgaaacgatatactacggataaaatcctagatataacaattaaaatctatatacacattattttaaacactaaacaaagcaaacaatattaataaaacgaatatctacatatatattttattccgcgggtcaaaatctagtagctggatgaaatggtgtttatatattacaccaactttggttatattcaaattaccgaataatcttctactaattttgtttattatttgctttcttttcacttttgagtcggctaaatggctaatcaaaccttcgttaaatactcgaaaaaaattaaggtcacttggcaacttgcagatcaagcaatagatgtatgtcacgtggcaagattacagcttcagctaaacgagtggatattggaccaatcacctcctttggcaaaatatcgagagacgacgacgagaaattatgcaaactctttcgtttgtgtgtctggttatttccgtaattattaacgaaattcaatggcatttagataacacaggtagtgccaaattttgcattccctctattattaagccaaaaaagaaacctttaaatataacaatttattagactaaaaaagacacaacccctcgttttatctgactctgatcccattttgctaaaatcttctctttatttttgttttgttttaggcctctcttctttttcgttctttctttatcagcttcctcagccgcacggagaaagaaaatttgatcctgattttttgccggtgataatctaaacctattaatttctctgcggaaccaaacattgaatttagggtttaaattgcatcattggtggaacccagatgttttctcctcctatattaatggtcattctcggggtagggtcatgaccatgaccttcgtttagtttacatcctcttacatgttcttaattattcttccatttatttttccaatttctaaattctctgatatgttattacctatggaaccataatgaaagttacatatgttgagtctttataattcttctagtcaatcttaacgaaagaattaatttttgaaagctttcttgggatacaaggaaattatggacattccatttagggtcatgctgttttcgttagcttgcatgctaagttaaagttgttttttttgcatgaatttgatcgatgttgttaatttgtttctttgtgttttgcagagctttttgaatttgagctctttgttggctttcttttgtgcttaagcggagagttatagacaaataagcttcacgaagaaaacgaatctgttgcaa

SEQ ID NO: 1575 - DNA, 3000 bp, Unknown
  misc_feature (1)..( 3000): cDNA_ID_3063163_gDNA_ID_1620419_Annot_ID_156539 3000 nt of promoter + ATG
tatacaaaattatggtcagttcaattagttgagaaactttcagcattaatagatctaaatttggccacatgagataattatgtattttactagaaaaatgttaaattagagccaaaaattccaaaatttcaaccaaaaacttagaatttttatttgtctttcactaagaacgtcgttatcgtgggattaaatatttaattaataaacattagctgcaatactttcatgttcatacatatataaatgttaaatgatcagaccgtgaagcccataagaccattcataattaaccaccaagtacccacttctctctctctctccatacatatactatattatagataaatatcccatcaatacgtaacaaccaccgagatattacaattcacaggtttctagctattttatatagttattgtaaaccaaaagaaaaagatttttggggatagatcaatctcttgcgttcatttttcttctctttggtacgaaaatacaaagatggagatcaaagtcaaagcaaaagatgtagagtcgacaatgatgtcaactaaagaggaggatgagatcaagaagatgaaagagtgtgtggtgattcagaaggcagatgaggaggttactaaaggacaagaaactatgaagattttggatggttcaagacaaaaccaagatgaaacaagacaagctgattctaagaatattgactcaccatcatcatcatcacttgagatgaagaagaagttggaaattggtaagtttctaatctttttgtccctttatgtttgataaaacgtcttcttcttatccttttggtatgactaattcatatattaaaccaactaagttatgcttacatgtaacaatttgagacaaaaatataacaaccccttcgaatttttctcttacatttatataccaagtcttagaaatttgggtgaaaaagatataggaattacaattttttccaattttttaaaatttttttattcatttacctgttaactcttttgggaacagagattatcaaaagttaagtagtgtttcacaaattttgcagaccaaaaatttacgagtcaaaacgaagaaaacaccaaaaaggaagaggagaagaagaaagagaccaacaataacaatctttctaacatgaagcataagaagacgagttcacacgtatgggactgtgggagcactctctacgactcgttcgagctcaactcgttcaaacgtcaactcgactcagccatctctgcttcctccgccagaactatgtccatgtctcacctccctgaccgccgtatcccttctctcagctcactttcgccggagtactctcctcctcttcctcctccaccgacaacttcttcttcctcctcctccggtggaaagaaacactcgaacaagatctctcgttctctacagagattcttgaagtcaatgttcaaacctaaacagcaccaaagcttaaccactccttcttcgccggtctacaaggcggtgggtcacggcggtggcgataaagatcgatactacgtcgtttacgacaaatcgggttcgttgacaactattccagagtcaacggagaaagaagtgagccccgagatcaactctcttgttaggaagaccgtgtccgagagattcccggcgagtagagtcgttggtatttcatgtgcatgattataatattaatctaagtcgtatatttgatataaattaataaatataaacatgttatatgacttatgagattagagttattttttttttccctttttgtttttataaaatatacattttggaaatgaataatcgtgttgaaccttggacgtatgtgaatgtatagaagttttttttttcttttcaataattaatgtgtagaattgaattttgatgcatttatgatatgcaacgtacgtatcgtaaccgtttagtgtagattttatctacctttgaatgtgatgtataacaatagcaagggttataaaggaaactacgtgacggttttgtgttgaagttgaaaaatatgtgatggagttacgttcagatatagtggaatatatttattaacaattcatatttaatgagtcattttcatggtgacttgtgagtattgaaaattaggtgtggactcacgttatgtttgcgcgtttgatttattattgattttgttatgaattttaactacttcatgtaagtagacacaaagttaaaatacaaatttttgttataaattttgtgattgatgcacgacatgaggtagggtctataggataagtcaattaaagtgttccttaataaatgaaaggtagatataataatagtatatagtatacaccttggttttatttaatgcattgcaacgtcttcaataacgttgatgttttgatgagatatgtctcctctatctatgtaccataacctcgatttatttgcgtacggcgaaaataatgacattatattatacgttttgctttgaatctacggactacgaaaaattgataagtcctataaattcattttgtcttatttcatctaattccactaaattaaaggttagtcaatgaatgattgtaacgatatgtgaaaatgatgaaagatgattagttgttctgttttgctctgtttcttgatcgttctcgaagattttagtctgtataataactctattaagtgcagtggcgttgcttaatatatagcaattcataataatgaagaaagtgtcatccattccaagaagtaaacactgagtgctaattttcttcagcagtctagaagaagagagacaaacaaaacattatcaccattctcagtcaaaagaagaaagcatgtgtttaccaaaaaacaagaaagcatgttcgtaattttcaattgaaccggtatcgtaatttttgattaaactcggtttactcggaccggttcctttatataataagattgttgtttttaggtttccggtgggaaccctaaacaagaaaacgtcattgtgaagcaattccctatatctca

SEQ ID NO: 1576 - DNA, 3000 bp, Unknown
  misc_feature (1)..( 3000): cDNA_ID_2141571_gDNA_ID_1620419_Annot_ID_156542 3000 nt of promoter + ATG
cataaattatagttttgcaatatttccataaattatgatattatttaaatttaaaattcattatattaaaagatattttctataatatatatattgaaaaatgacctcgatattttcaagtaattatctaatttttaattaaaaatatactttgacaagcaaaacaataataacacagttacaaaatatgaaaatatgaatgattctatggtgaatttttaagaaataacttttaataatacttttatttttgaaattatataaaaaacattaatgtaagaaattattatgatccctataaacaatttttttgcctccaccactagcctctctatgagtctcttactaatataattaactattagtgtttttaatgtaattaaattgtttaattaaattctaaactataaaaaaaaattataaccaatcataacaggaaaaatgtaatttggattttttagagtttgttgtttaagagagtcttcctactctttctcctcactaattacaatttttcatactcttattgatgggtctctaattaagaagaccatcaatgaaattcactttaaatggtcatagtataatttataaactaaattaaataagtgaaattcttctataaaaatactatttggtttctatatattttgaaaaactgggtgattggttcgtctgtatctgtagatttattgcaataaaaactttattttagctgtaatgattgtagctgtaggttttatttatgtagaaattaggtagtatatttttactaatataaaattattatataagtaaattggatttagcaattaaatttggattgtatgtatgtatttttaaacaaaaataaaattggtaaataatagttatgtgttatataatattattctcaaatatcaattttataaattatgatatacataacatatatatgatgtatttaagaaacgatctgacttatatatatatatatatatatatatataacccaataaaaagagttatatatatatatatatatatttcataaagaagtttttttgcagaatacttatatccacaaaaataaattttcataatatatatggatgaaactataataattgttttaaaaaaaaaacaaagtggaaagaggaagaaaaaaatggtacatcccacctaaataccataacattgtattctaaaaaattgtacttacaaccaaaatataacaaaaatattgtttaggctgtgaaaaaaataggaaagctaccataaggattgtagcttttttgttggctttattaggcttgggcaaaaaaaacgctaaccgaataaccgaaccgaaccaaaaaacatggtttggttcgggtttggatagtttaaaataaccggctggatattatatgtcttagatttcggtttcggttaggttagtaaccgataaccaaaggataaccaaagcatatatgtatgatagataatatatcacatatattgtatgtattgagacttaactatgttattctctttattagtttgcaagttgaatttcgtgagttgtgaatcaggtgttttaatattatggagagtatggaccatatttgcatctttgtgagttgtgaatatgtctttttttacgtacgttctatatcagttattggtcaattgttttagttgtttcgttttttagtcggttatttcggttttggtttatttatggttaccaagtttaatatccgaaccgaaccgaaccgaaaaatatctgaaccgaaccgaaccaaaattcctcaaatatccaaatggttcttatattactataaccgaaaccatacgcaaccgaaccaaaaccgaatacccaggcctgtccaaatggttcttatattactataaccaaaataaccgaaaccatgcacaaccgaaccgaaaccgaatggttaaccgaatgcccaggtctgggctttatacatattctattgcccaaccaatcataccccaaacatttttttaaaaaaatattaaatatattgctcaacaaaaaatattatatacaataaaaaaatgaaatcagcaagattatccataacaagggacatgcaaaatatcatggatctgagttttgatacaattctggaaataggtgtccaaagcttatggatccaaattcagatatttagatattttatatgatattttctgttaacctttttactcattgaaataatagttaatcttattttcatctatttttttgcagatatgtatagtcgcatatattggcggatctagatcttgaaatttgttttatggatctaacggatccaaatccggatagttggtttatagatccagatccggatagttggataatggatccagtggatccggatctggatagttgtttcacggatcatctagatctgggtagcccaaaatttcacggaaactaattcgtgttcatctttctatctacgaccggaaaaaaaaacaacttgagaaattgaaggagttcgatgatatgagattattacctgtttgagtaaagcacggaatatctcgtctccagattactaaggacttttctcgaacaccgtcgtcatgtcctttggttgttttgaaaagtaaggagaaaaaataggaggccgagcaaatagatttaattaagattatgttatagaattcagagtgacgtatatttatataagatggtcaatatattgtgaattctagggttttcagaagatttatttcctaaatgtaataagtttttcgagacaaatatttaaaattttagtaaagacatttgtttgataaaacttggaaaaaaaataataatgacgaccgactatattgttaaacaatatcttactgacaaaattgaaataatcgcccatcagatgtttaaagtaaaatatttcaaataaagttccatagaaactattcctggaaactgttctccggagaggtccatagtcctatgcggagtgaatgctggtcctccagaagtggcacccagaa

SEQ ID NO: 1577 - DNA, 3000 bp, Unknown
  misc_feature (1)..( 3000): cDNA_ID_2141575_gDNA_ID_1620419_Annot_ID_156543 3000 nt of promoter + ATG
aatgtaacagttgaaaacatcactctctacaattctggtatcggcatccacatcaagacaaacattggccgaggaggaagcatacaggggataacaatctccggggtttacctagaaaaagtccggaccgggattaagatctctggcgacaccggagatcatccagacgataaattcaacacatccgctcttcccatagtaagaggcataacgatcaagaacgtatggggcatcaaagtcgagcgtgctggcatggttcagggattaaaagattcacctttcaccaatctctgcttctccaatgttacactgaccggaacaaaaaggtctccaatatggaaatgctcagatgtcgtaggagccgctgacaaggtcaaccccacaccttgccctgaactaagcgcaaccacacaacaaggtggttcctgtgaaaaccaatcctaattctccaaagctaagagactacatgtagattaatgtaagttttattgccatcttcataatcaaatcacttgagacttgactcttgagacaatctatatagactactaatataatcaaattatagacttaaggtttcacaaaacaaaaatcatattctactgaatttgttatatagacaaaatcatcttcatcattttcacatcatatggataatgatatttatttaccagaatgtgcttctctaaatgttccttagattctaacacaacaaactcgagttttgttcttcagaccaaatggttgagaaacttgcgaatctttctcctgaacatattctctttacgctttactaaattcaccgtaatcttcttggagctatgatcctcctcctccgacgcgaaggaaccgacaaagatcttaatcgccggaatatctacgtctgtacctgtcgccttgacttcttcgctggagaagatcatgtcgttgccgtaagagatctgaagaccacgtcccaacagctcgtggcatggttggcgtttgaaaggagccgtcgtcgttaacggacgtctagggaaatgacgattgatcggatggaagttgacgaaattcaccggcactgtgacctcatcggattcggaaaggcttgggtttgtggaatctggatcgggttcggctgatgaagtggtggttaggcttttgtcgatgatgtcatttcccggcgttgaagaagcgacggagagagccaacgtgaacaaaagaacggtgacggtaacggtaacggtaacggtagcggtgggggaggccattgttttgggaagaaggaaatctgaattgtcaaaggtatgataaacggtgttaactatcattaacgttttctaaaatcgacaaaaatagttatgggcctgtttttagttcagaagcccaagttttagtggcccaattaatttggcgcgaaagtcaaatcctatatcccattttccttggggatttgagtcaactgttgtctgagatttccaggtttctcgatggcttcacggaggaaaagaagaaaggtgaatgaagaatcagagattccatgttcgccggtcgttatattcgcgcacggtgccggtgctccctcttcttccgactggatgattaggtaactactaatcttcttctgagtttattcacttagtctgaatttgctcaatatatgtttgtgggtttgatgtagatggaaggaaatgttaaagaagacattagaagctgttgaagtggtcacatttgactatccttgtgagtgaattttctgtgaaatcataaatttttattattcatactttaaagcttaattcaattgtggaattgatgtgtagatcttgctgacgggaaaaaaagagtagctccgaaagcggagaaattgatagagtttcatttgaatgttgttaaagaaactgctgctaaattccctggtcatcctttgatattagttggcaaatcaatgggttctaggtacatttcttcttgtgtccagctcacacacgttgttttgtttgggtatgtttcaatgtttaatgtgatgttgttatcaccttgcagagtaagctgtatggtttcagctgtgaatgaagatgttacagtttcagctgtgatatgtttaggatatccacttaaggtttgagatttatgtccgtgaaaagttgattcctgttctcgtgaatgtatgaatgagcaatttaagggtatacgttgatttcagggcgcgaaaggtgcgataagagacgagactctactggaaatgggagtccctgtgatgtttgtgcaggtattttatgcaaaagtaacataactcttatgttgttgcacatgaatgaattataattgggtctttggattatgaatgtttttgtatcaaaagggaagcaaagatccgatgtgtcctctgaataagcttgaagctgtttgtaataaaatgaaagctgtgactgaggttcatgtgattgatggtggagatcactccttcaagattgggaagaaacaccttgaaacaaaggagttaacacaagaggaagtcgaagatgtcgctatgaaagcaatagccgcttttgtctccaaatctcttgctcaaagctcataagcatagtcaaggtttagaggcttgtgctaaactacattttcttcgcttgccttgtacatagcttcattcaactcttaatgggctaatgctttcatttttatgccaaatctagttttcttaatttgtaatggtaaactggagttttggttaggttgtgtagactattttaactaagcatcgctcttggctttgttcttcctttaataacttgtgtttaatgctttctccttttgactcagaatggtgatcatcttttgtttgtctttcatcttcttaaattagtgcatataagatgtatcatgtatttaacagattaaatctgtatcttggtttcatcaagtttaatcctcatggtggattaaaaaccgtgcaatgaatattctgagaaaattgactcattcaagttgtaattgttgatcagtctctgtctcaagatg

SEQ ID NO: 1578 - DNA, 3000 bp, Unknown
  misc_feature (1)..( 3000): cDNA_ID_2141551_gDNA_ID_1620419_Annot_ID_156536 3000 nt of promoter + ATG
agtctctgaaacccaattcaagaaaatcaaggaaatggtggaacaagggcttgctggaccagagatggcgataaagaagctggaagaaagcggggaattagggaaccgagtaacgagattagctaaagagatcgattcagcgagaaagtgggtgaaggagaaggacaacaatatgaagcatgaggtggaaactctagaagcgaagctagaatgtagagaagcgcaagaatctctgctaaaggagaagctatcgaagctagaggctaagctagcggaggaaggaacagaaaagctgagtctatcaaaggctatgaggaaaattaaaaagcttgagattaatgtgaaggagaaagagtttgagttgttgagtttaggagaagggaagagagaagccataagacaactatgtgttttggttgattatcaacgttgtcgatatgatgatctcaaaacttccatttgtcacgtagctcttcaagcatagagttcacttcttcttctccttttgggtgtaaaatgtaaatattatatgttgcaagatttgggtattttttcattaatggttgtaaactaaactaattttttttgtaaataacacattttaactttattttttttgtaaataacatattttaactttatttttcaaatattcttaatattgaacatcctacgcgttttataaaagtctccattagtttgttaacttttttttttttttgtaaaagtctccattagtttggtatgttttggccttcatatatttaatcatccttttgttggaagttaggttagtttgtattaaaatgttttaagttatcatcaattatagctcatctggtcaccactattttatagaaagaaatccagagaagaattatatatgaatgaaaatctggtaacaattaataaataaaaaagcataatgtgaaaaccctattaataagaacaaatcacaaataaactcaaaactaactactaataaataggagaaaatgaaagaaatataattgaaatgaaaattactcctaagaaaaaaagaaataaatcagtctcattttataatgtgaagataatgtagtctaaattaggattacgtaagtaaaatcagtctccttgatagatttcctaattaatagtatagatataagaaaatagagtcatatttcttttgacaaagacccaccaaaaaaaggcgggaaacgcacttagtgattgtgaggcattaatcatgtgttataaagttaagtacggcattagacatgctaaacaaaaaccaaaatccagctaatttgtatatctccgtggcaaatacgtaataatcttgaacattgataactacagtcaaatgatattttgaccggtgttgacgagaatttgaagagaaaataaaagcgtgtgatggcagaagcgtaataatctgataaaagggaggggtgtttgtggtaagacgaatttccaaaaagattcctccagtcttcgtctttctccctcaaaattgaaaacacacacaaaagttgagctttcataactgttctctcctctcaaataactccaaaaaccaaatcacctttttttttctttcttcttcaatctctcttttgcttcgatttcaatttcgtaatcttatcatctctgtagccaaaaacacacacatcagaccagagagaagagcgagagagagtttttctttggtagttttctggactttcttcaaatctcaggagcttccgtaatccgtatccaggtaaaattctaggttacgaaatgattttgttggcttcgattattgacttttgaagtttatttgattcttcgatcagcttttagtttacgctttcgttgcttagtagtgttggatcatgacttcatgagtagaaacatctgatggttttgtttgtttgttgatgtgccttttactggggaaattatgagtttcttgttatccagttcatcttaagtctcgttgaggttttgatgatttgcatcagattacctattggattatcgttgatttggttcgttagaaatagagtaatagggtttatatcaggtgaatcaaggtcatgagctgcaatttccaaatttgtttattattattcaagtttttgcgattgggatttcatgtttaggcacagtaactagatgtccttagattttactatcaagtcatctttagtttctcatgttagtagattttgtaatttaagcttctatcaactgctgtgtaatcatcaaaatgctaagtagaattcttggtttctatacagggaaacacgaaaaaccatagaaatcgattctggaccttaaaggaaattcgagagataaagtgtaagtgaaactagaaactctactcctttccttgtatttacagttttactagtaactttctttttaagaaagcgttggatgatcggatcgagattgttttagttgaaactgtattgttaaagccttaaaggtagtaagtaacatataagaacaaaaagaaacaactcacattttcctgaggtatgaaaattgaataatgatagctgtcttttatcggttctagaggtatgtgctttctggtccatttccaaaattgctgaggtggctccacttgagatcttttgtcttagccaatgccatcagattccaaatttagacccggcactaaaaagtgattagctttaatccaaactcgaaactctaatcaaattggcatttgttcttgtaacttctgttgaagtaaaataataatatatcacttggtaagacagttactcattgctgcaaagattttggatctatgatgatgttctttgcgggtcccacgaattctattattatctgcgtaccttgtcagagtacaattgctggatctacttctattattatattctctttatgttgaatatcaagatgcttaacctatgatctggattctgtaaaagccaaattattagtattagttttctaatttgttagtattatatacgaaacaaaaatgtgaaaagg

SEQ ID NO: 1579 - DNA, 3000 bp, Unknown
  misc_feature (1)..( 3000): cDNA_ID_2141543_gDNA_ID_1620419_Annot_ID_156534 3000 nt of promoter + ATG
ttgttttggaatcgtttattaaaccgaaattgtggagttggataaaggtcacgtgattgaagtttttgagtttctaaactgagagatttaattaatctaattaatcagttcttaatcaaggtttagaatttggtttggatattagattaaatcatagattataattgcatttaatcttgatcgtttagtctaaaccaatgcagcccgagattgttcctgaagccgtttttgttgttcctagttcaaaaccgaggaatcaacccattttgttaaggtgaggacgcgaccttgttttatttgttatatgaatatatttagttgattatttagtttagagttaagccgaatatatctatgagttacatattgtttgatgtgtgtctatgactgcttgtcttaggtttagactttgtgattctagatatatttatatatggaaaatttgtgagctctaaggtttaccttcaatgaaaaattttagattgctcacccctctcttttttgcaggttggttaagttgagagttcgttttccattattaattggtagttttgcgatgaaagttggttttgaaccgggctaagaagtgaatacgttgaccagctccttgtaccagattcgggtcctttcatttttaatctccataattaaaccagccgcgagtcttgaagaagaagtatgcagtcgatagtttctttcttccagagaatatacatcgaagcttgataggtaatcctaagaaagtaaggatcgtagtcatatttttgtcttagaacggattcttaaggcatctaacaccatcgccaaatttatctctcatgacagttattaggtttcaaaactctccaagattatattgaattgcacaagaagcatgtcggaagttgaaacaaaagtaatgttgctgatctaagaataaattttgggcttgacttaattgtagcccattatataacattcaggtcagtgtataaatcattttaatttattttctttccaaaatcatatataccacaacgaaagcataaaaaccacaaaaaaatattaaatgaaaaatacacattccaagaagaaggtaaacaaatcgtgaagtgttttgtgggtttaaatctctaccaatctcactttctttttttctgagagaacctgaattttttttctgataatggacatagcgagtaccaaccggtttaagaagaaggtttgtgatggttgcagtgaagctatgccaactgggaaaaagcggaagaatgaaaggacgttaatgaacaaagatgtgaatgccaaaagattgaagaaagatgtgaaaaggtgagttctcaaaggttagagtggagtgaggaagacgagatccgtgtgctacaaggtatgatggatttcaaagctgtaacagtacaaaatctttctaatgatatgaacgtaacttacgaaatcctttaggaatatataagcgttgatgtttgtagctatgcatttgtagagaagatgaagagtatgaaaaagaaattaatggagaaaatgaggattaacgctaaagatttgtcttcttcggttccgagttgttgaaacttatttggggatgtgatgtgaaattggcttgttctatcttaagtaagttatactcaacaacagatttcacatcatatctccaaatcagttttaacaactcagaaccgatcgaagaagacagatctttagcgttaatccccattttctctattaatttcttcttcaaactcttcatcttctctacgaactcatagctataaacgtcaacgcttatatattcatggaggaagttgtaagctccggtcatatcatcagaaggattatgccttgttagagctttgaaatccatcataccttgtagcacacgatctcgtctttttcacttcactctaacctttgagaacttacttttcttggcattcacgtttttgttcgttaacgttctttcgttcttccgtttctttccagttggcttagcttcaccagaaccaccacaaacctccttcttggaccggttggtattcgctttgtccattatcaaaaaatgttttaggttctctgagaggaaaagagagcgagaattggtagaaatttaaaccaacaaagcacttgactatttatttacctttttcttagaaatgtgtattttttatttaatattcttttatagattttatgcttttttgtgatatatataattttgaaaagaaaataaattaaaagaatttatatagtgacatgaatgttatataatgagccataattaagtcaaacccaagattggttcgacaattcgtttttggttaaattgatagcaagtgtgggcgtgagtggagattctgtgaaaagaagatggagtttgttgcacacaaacaagataaagatgattgaagacaaatggagagtcttgatgaccaaagaagataaatttgtgttgcaaaagatagagcttttgcatgaagtggtttctctgatcatttacgttgaagcatttactcactagatgcaaaatgtttcttgatttgctttttttgttggatttttctgtccaagtttttgctttatattatgtcattgttgcttctatgtttagaatctgacctctattaaatgtgaaacttcattagtatttttggttactatgttgctctttcgttgataacaactttgaaatgttagtcgcaccaaatttagtaaaaccgttttcttatacatgttacaaagcttgcttgaaggctataacaaaagatttcaaagggtttaacaaattaaacagatactaaatttgtgtttattacggcccattaagaacccaattaagagcgatattgggctaagactgatattttaatattaaacctattacggcccattaatagcccaatcaatatgtaaacatatgcgtcttcgttccatgtctccaatcttatttcttcttacccttttttccaaaatccagaaaccccagagaaagcaaaaccgcgagctctc

SEQ ID NO: 1580 - DNA, 2465 bp, Unknown
  misc_feature (1)..( 2465): cDNA_ID_2141151_gDNA_ID_1620420_Annot_ID_156561 3000 nt of promoter + ATG
aagctttatccctaatatgtaagtcatcatagctgatttttaatattttctccaccttttcgtcaagactagttgtgagccttcctagttcaagtttccaccgatccttgctctttccgcgcatatgagaacctaacacacggagacctaatggaagatgaccagaaagctctgctacttcaaccaccacatccatgaaatcatctggtgccacattttgcttgaaagcatagaggcataagatctcaagtgctgtttttctgcatggtaatttgacctcgtatatatggtttatctcatgtcctaccaatatctgtttatctttggtggtaacgatgatcctacttccaggaccaaaccagcgtgtctcgttagctaaggcttctaattgctctaccttatccacatcaccaagaacaatgagaactttttgcttctttagcctttcttctatcttccatagatgatttatcttcctatctttttggttgaatattatgggcaaaaactctttttgtaaacgagcctgtaagttgtactcgccgccactatcgacaattctttgatagtttcccctaacgttctccatgaaaacagtaaagcggaagtcaccagaaaagcggctgtgtaaaacccttgcgatggtggtcttaccaataccagcgggaccccaaatcccaaccatcctaacgtcatcatcgtttaaacataataattgaaccattttctccatatgggattcaattccaattatgttttcaaaatcatttgacggtgtaccattgagtttggccaatatatctttcgcgatttttgtgagaaaatctgcctcatttttcctgcagagaaaacaataccaagcctaaagttttgtctagaaaaacctatgttataaacgttctaaattttgtgtgaagactattttttttaaatactggtatttgaagcctaagaaatttcaccgcctcttaaatcatgttcatttgcttttttttttttttgtgataatgtgatttatattaagaagggtgcaccaaaaaaataaaactctaaccagctttgtgaatcctctcccgctatatttgccgcttcggtcaaggctgccttccatttattttgtgtctcatcattcttcccttcacaggtttctcggaagcctctcccaaatttcccggtctgatttcttacatcggatggattcactttgtagaaaatcggtattagcctcctctcctccttgcactttaaaatttcaaccaactcatccaaacaccagcttgaagaagcatagttctttgagaatatcaccacaaagatcttagattgtcttacggcttctttgagctccaatccgattgtctggcttctttcgattagatcatctttgaatgtaacaattcccttgctttcaaattctttcatcaagtggctgagaaagtttccgcgaacatcttcccctcggaagctggggaagacgtcatacttccaacagctactagagccagacgaagaacatggagccatgggaataatataaaacaattatttctatgttccttgtgtaatttctatggaacataatacatggagctaacgaatgacccttcttgtttaatttatacggaattaggtgatctatcgactatgtcagcggtttgaaaagttcaaaagtaaaaataagttaatggaggggaaaaaagttgtatgagctaatacatatcaaattttgaatgtgacatataattatttaatgttttttcttagttcaataataattgataagccaaatatgattgattcatattatattttaccattcttaaggacttgacaaaccttgcaatcggttttctaatattatcgtggacttagagaaattattagtctttagttaatcatttatttatgtttttttttgttgtgaaatgttaaatctactattcaaaaaaaaagaatatttacaacgaaaagagaagaagaataaagctcaactaaattttgaatttgaaaataaaaccacgaccttacaactacatctcttgtaattgtagttaagatatgagtttttaaaaagaaaatctaagctaacattaacgggatattatatatgttcttattgttttagacttgaaatcccaacagttcgcaaagcctttgacgttgatagccgctgatgtgcactgcatgtagttttttaaatgaataaagtgaaaaaacaaagttaaaaatcggtttagagtggttttcctccacgaccgcctcaaaccgcaataatggaaatcaaacggtttctattggacacgtgttatactttctatccatcgatcaaataattcggaagataaagaagaaacaaaaaaaaactaaaaaagtaattttcgaaattcaaatccccaaacatcacagcagttggcgctttcttccccctaaaaaacttcgatcgtcgcagtttctctttatcaatg

SEQ ID NO: 1581 - DNA, 3000 bp, Unknown
  misc_feature (1)..( 3000): cDNA_ID_3063185_gDNA_ID_1620420_Annot_ID_156583 3000 nt of promoter + ATG
caatttcggtggcccatctatatcttcatcgtttactactttcacaaacatgatttgtcaaatacttttactagtttcaaagcacgtaatcatgtgttgcctcaactcccactcagcttgatttgctaccacactagagattacatttcaactcctatgagtgcttgaaatttttgttagaccttaccatgatcacgctgaggactctccaacattcaagtaaaaaccggattttctacggtgaaagcggagagcatcctcgtttgcttatagcttcatcaaaccggatccaccttcttcagaatcttctagtggaaatgtgaagagagtatttttagtaattgtcatatatagctatcaaaacgaaaattatagtactcttacgtacaagacctagctcaacaatcggattagatgttgttgggtagattttacctaattagtagttaggactagagcgtagggttttgcataatttaggttgcattaatttgaagaaaatggactgccttgatcagaagaacgttctaagattagaagaggcaaagtcctaattaatttcttatttgaaaacatgtagtcccaaaagcaaccaaaatgtgactttgaaacctgactcttgagggcttatatattacttatcttcctaactaatttcttatttgaaaacatgtacaataataagtattaggaaacctacactattaattctgattatatatttgtttagtataaattttagatttaaactattatcattattagttatggtttaaaaaatagttaagtgaaacacaataatacatgcacttgcaatgtgggagagttgcatcgtgagtggctgtataaaaaaaaattgtaacttaaagaaaaaaatttgtaaagaaatattgaaaattgattaaaataacaatatatgttagttgtcaaaagaaaagacaaataaacgaaggttagttgtaaaaaggaagaacatgtaaccaaaaaattagctgaaagcctaaaaataaatataataatcgactttggattaaaacccctgtgctttaaggctcgaccagtataagccatttgcctttaagaataaaagaaatgaatttcatgagcatactacactaaaatcctttttcttcttaattttcagtattgtcttgacaattttctacacttcatcattagtaaacaaatgcaaataaaacagtggaagaaattcaagattcccttcaactttaccactaatttaaatatcacagataagatgaaaatatatttctgagttactaaaacactgaatccaacattaaacaacgcttcttccccttttgtaagctgaacaagagagccctgttggatacgaggatttaatttacactggctgttttgaaggagatattgagattctcatcaacaatattaatagttcgtaaaaaattgcgaaatagcaaatttacttatcgactaagtttaagtttaagttttcatccatatgtattagtttcacaaaagtttggaccataatgtagctcataatcttgctaaatttagttgtattcactcctttttctattccaaaaatgtaactcacccgcggtggcttagatactttttatctcgattatttgtattcgttatttaatttaaatcaaataatagtatatataatatagaaatagtcgaatcaatttacatgaagagacgaaaaaaacaagaaaaaacaaaaagagagtcgttggaatattcctactacattctggatgatacccgaattaaccgacccatgtatgtaagtatgtaagtatgtaactattactcaataattaaatcaacttcttcttttttttgtcaaagaaatcaacaacttcttatggcctaccacaagacaaaacatgtccacttacgaatatggaccatgatcttccacattaacgtctatgtattaacatagccattgtgaccgactctaatactcattagacgtgttcgtttcatagactagtgttctgattttatacgctgtagtattaatgttttttgtcttagcaatttctgattcgaatccggatacataaacggcctcataattgtactcttaggcttcaatcagatatcttataatgtaaatagtatacacctaatttattaattatactcccaaattaattaatatgtacaactagtatatatatatatatatatacattttgagttttgaaaactaacttaagcaccattcaacttagagaagacatgcaaaaatcctccaagtgacaaaatatccaagatcaatctcgtacgatctaagaaaattgcaaatcaaacaatgatcctattttttttttttaaacccttaatctaagaatctaacaatcgtaacttgttggagagaacggaaaccacaatcgtttccaatcacaaccttaacgacattgtttacgtcaaggttaaattaacccccttttaaaaaaaaaatatgatcgaggttttattgcagtttcttaccacttcaactattaaataatttttaccacctactgaagaggtgaaccaagtgaagaaaagaatgttgtagacacgctcattgaatgcatatacaagtaggtatatgcgtatagctacattacatgtacatgtatatgcatgaagtacgtatttaggtataaaagtatacatagtaataaatatcttgtaatcacggaaaaagggtcgagagggagggaccaaaggttagaaggagaggtacgtggagtgtcttatgtgccgatggtttttaggatggacaatacataacttttaattccaccgcaacgtggttcattccttcacctatacgaagtcattttcaaaccttactatctttctcccttttgtcctctcctatattaatcacctggatggtttctcctattctcactaactcactctctcactcaagggtccaaaagtgttttctctttttcagtttctctttctctttttgacagaagagaccgagaagcaatg

SEQ ID NO: 1582 - DNA, 3000 bp, Unknown
  misc_feature (1)..( 3000): cDNA_ID_3063208_gDNA_ID_1620420_Annot_ID_156568 3000 nt of promoter + ATG
atctctgtactagtagaaaaaaagaggtctttattctgtatactaattactaattagagctaaatcaggatgagtccatcgcaacttgtctaattactgttagccaagaccaccctagagtcaatatcatatgttaacaatgatgtaaaccttttagtattgaaggccaaagtagtaattaatccattgactaacttcttttaaaccttgagacagtgaaatactaactcattcaacaaaaatggatcaagaacaaggaaatattctgattaaagccaatgtagtaattaatcgactgaataactaacaattttatgattctgattaaagccaatttattcggttatattcggtttacatatttgatttagaatgtttagttttattggtttggttcgagtagaataaaatattcactgttcgaacaacaacaaaaaaaattccttcatttctctctcagccctaaaaaagcttcacgccggtttgtttcaccgccgttgtgcttcttcttcttcttctacctgggttctctctcaaacaaacaaatctccgacgactcattcgttcctcccaggtaagcttcttcgaccaattttactttcgcatttttctccgattcacagaccctagctgttcccattaatcaggatttagccagaaacttctagggatctaattgtttttgaatctgaatctgtatttgagtttaacgttttgtctccttgtgtagaatcagaagatttagtgaaatggctttttgcaataagctaagccgtttcgtgaggaggcagagtgagaatgcttccatgattggctctctcaggtctttctctgctgatgccactcaccatagattccaccaggagactcacaattttcttgagccagaatactatattggtagctgggaagctccgagtgatccgaaagatgcagagagaaagcttgctcagcttaggagagattatgctaagaaagttcgagtgtatcgtaaagagtacattcatgagattgagatgcttcgtgttgagaaacagcgtaaggatgaggctagattgttggctgaacgagctgctaatgaagagaggcgactcttgaaggctgaggctgctaaggttagagctgaggaacgtaagattgctgacgaagagttcaggcaaactctggtgagttcactttctctcttctccgttctttgtttattgtatagaaaccatggtggatgtttgatcaagtagttggattagtgtgagatgattcttgagtaaataggagaatgggtttgtctggataaggttcatctagcatgtggagaatcaaattgttgttttcctcttgaaaatttggaaccttttcctagttatgcatcagggtgtagtagtattatatagaagagaacttcaaggtatagtattatgtttgtgattggaagagaactttagattagagctgatggagatgtatgactaagagctttgataaacgttgcttagcatcaagtggaggttttgatgaatcctgtagttatcattgtctccttacattagctgttgttgttctggttacagctttagcatcgtacctaacaatcaaaaataagatggattttgatgctggatcttgatgcttttaatgggaattcttttgagggcagtgaaacttgttagttagaagcttcctttgttcgggctgtaggtagatgagacatcgcacacacacacactgaccaaagcagtattcactgattcattaattgatttcacgtacttatgtctgcaaattaattcagaagagtagtaccactcctaggtttctatttctagtttgagttcctcatgtttcttggtcacagcctcagagcagtaatggtcatagtgcttttcttcttaaagttgtaaaactgattcaagcttgattcactgactggtttatgtgtttaataaactgtagataaaagaaagagcagaaaagctagagatgtggaagatgatgggccaaaagagggaagagaagatcaaagagagagagaagctactgcgtgaacagagttcactatggatcgagcaaaaagaactggagaggaagattacagaagccttggttgacaacgttgttctctaaaccaaagcttctcctctgaatctttgtttaagaaacaatcactttagtccttttgttgaagacaagtcttttttttttcttagagaagaaagcgaaggctgttttagcctttttgcatcaagcacataatgagaattgtggtcttgtgaccaatctcttgtttgttgtggttctggtgtcgtaatatcatcattaataagaagttttctcttgttgattgttatcagtagaagattgttttttggtaaatcatcttcctcattggtttcgaatataatgaacctaggcccaatagttaatcgagtaatgggcttagtaggcctatcagcgtgacatgttttgtaaatttatacaatgccatgagggacaatattgtagttttctataggaaccgaatttgtaaatttctagaggcccaatagttaattcgagtaatgggcttagtaagtctcttcaatgtttgatcgacaagtacaagaatctttatcaacggttcgtaaaaattgtctacggtgatagaaaagatgaggctgtaactagggttaaagtagatgatagcccgcaaaaaacagagtcggataagatcaatttggagggaaaaaggaagagaggaatgttgctggaccaacctgagagacctctcaagaaaaggagaaaatttgctataagctaatccataagaaaaaacaaaggccggtctcatcaaaagtactaaacaacacttgtgttgtgtagagttatgatatctagggacataaaaatctaaccgatatcgaggaagatatgtacaaatgcgaagatcagatgttcgaggtagatatattgatgggagctctaacaagtgtagtggagagtgcataagaagttattaagggagag

SEQ ID NO: 1583 - DNA, 3000 bp, Unknown
  misc_feature (1)..( 3000): cDNA_ID_2141183_gDNA_ID_1620420_Annot_ID_156569 3000 nt of promoter + ATG
ttgttctctgacagtttttttttttgtttggttacaaataaagatgccagtaagtgtaagtgtctttttataagtttagttctgaagtctcttgtctttcttttactctcttgtccgaaattgcttgattctcgattttgacgaagcttgaaaaacaaacccagttcgttaatggtttctgggtcttcgtcatttcactggatccgttagaaaaatgattcctttttgttatctattgattcccgatctgaatttgaagctcttagtatgtttttattcaggtggcactagttttgctgttgacattgagcagtgtgattctgattaatgggagaagttacggcgtcggaaacatatgcgatcgtggtcggagaccgagcgagagaccacacagtgtcaaaatcactgattttggtgctgtgggagatgggaaaacgttgaacacacttgcgtttcaaaatgctgtcttttatctaaagtctttcgctgataaaggtggtgctcagctttatgttcctccgggacggtggctcaccggaagtttcaacctcaccagtcatctcactctctttctcgagaaagacgccgtcatacttgcctcacaggtctgtgtgtgtgtctctctctctctctctttgtctaaagtcttgatcattctaaagagtaaagatcagagtttgcagcttaactgtttcatagacttctgattagcttcagagaatcctgtttttgaattgatgtgtagaaacccaaatttggttcagtagttaggcattgtggcttaggatgacctctggctccaattgctagcaagattggggattataaaaggatatatctcattgcgctggttttcagttaaatcaatatatatatctaccaatgttccatggttctgcattgttatcagtcagaacatttgtgtatttgtttctcattttgtcttttatttgttgttcttacctcaaccgtgtgaaggatccatcgcattggcaagtcacggatgccttaccgtcatatgggcggggtattgatctaccagggaagagatacatgagtttgataaacggtgacatgctacatgatgtagtagtaacaggttatatacatattttgttccattcatttcattttgtttgctaatgctaaataaaaactcactgttgtataccatattcattggcttaggtgataacggtaccatagatgggcaaggccttgtttggtgggatcggtttaattctcattctttagagtacagtcgccctcaccttgtcgagtttgtctctgccgaaaatgtcattgtatcaaatcttacattcttgaacgctccggcttatactatccattcagtttattgtcggtaaaaatagtttgaaaattccctcttattattatacctcctttggttttgaaatcatttggtaacctcttgactcgttttgcagcaatttatacattcatagagtaacggctaatacttgtccagaatctccttataccatcggtattgtcccaggttagttgttattatccagatatatgtgtaatttgaaacaatttgttgcagcactaaaatctcaaactgttatttttttcagattcttctgaaaatgtgtgtatccaagaatctagtatcaacatggggtatgatgccatttctcttaaaagtggttgtgatgaatacggtttatcgtatgcaagacctactgctaatgtccagataagaaatgtttaccttagagcagcttctggttcctccatttcctttggtagtgaaatgtctggtggtatatctgatgttgaggtcagtgatgctcacatacacaactcgttatccgggattgcctttagaacaacaaatggaagaggtggttatattaaggagattgatatttccaacatccatatggttaatgttggtactgcatttctagccaacggtagcttcggtactcatccggattctggtttcgatgaaaatgcttacccgcttgtgagtcacatcaggttacatgacattgttggagaaaacataagcactgctggatatttctttggaacgaaagagtctcctttcacttcgattttgttatcgaatatctctctgtcgattaaaaactcggcttcccctgctgattcttggcaatgctcatatgttgacgggtcttcggaattcgtagtccctgaaccgtgccttgagctgaagagttttgatagttactatggtagagctgaggccttatgaaaccaaacttcattaggaatgatgattcatatttgtttaagagagagcaaatggttctgattcttttcttttccccaaaaataaaccacagtgtgtagaattattacctgttccttgttggtgttgttgtccctgttatttgcagcttgtgagattaatatatcttgtacaggttcatttcttcattcatgtgtaaccaaagaaattttgtattagcccagtaaccagatattaatttttttaaatatttgggcctcgttaaaaagcccagcccaataacaaagagctgcttcgtaaaaagagacgtcacgaaaccattcgcttaccaaaccacacagagacacatctcttcattttccaaccatcttcttcttttcgccacacccgtaaatatttactttttctcactatgttcaacttattattattaaattaactaatttagtgtatgccactagaattatttttatataaaatatttttcatcaccttcctgattagataataatataatcaaaaattcacccatttccttcatcttccccaatctctctaaaaccctagaaactcacttcctcagtttctccaactctgtacttcgtatcatcaagcgaaaccctaaaagaagcaatctttagtctcttctcttctttattttttctggggagaaagaaatttcacttttttttatccgatttctgcttcatctgggttttggatttttgcgatcgattttgagaaattagcaaaca

SEQ ID NO: 1584 - DNA, 3000 bp, Unknown
  misc_feature (1)..( 3000): cDNA_ID_2141187_gDNA_ID_1620420_Annot_ID_156570 3000 nt of promoter + ATG
cctattcctatggttgcggagtgtatgcatagctttgttcacttcgttgcatatagtcactgcaaaaatacacatcgccattaatatggagagatctagtccaaagcatgtcatggcctcaaatataggtcaaaatttgggagaaatgttttaggttttttttttgtcaacgactatatgaaaaggggaacaaaactttttcatacatttgaaaatgttagaccagctttgaatatagacttaaataaacactagatcaacttcgaaaatggttaaatagctaccttggtattgaaacttttggagatgtctctccaatatcagaagatacgatggatcttcatcgaagactaacactcgcaaaccttcaggaaagttgcttgaaaacatatcatagaagtttgttagatttctaaatggaccatcatcaccgtcggtcaagactccacggtgatccaatatctcagccatatttaatggctgcatataaacactctgcgtgtttttgtgaaggtgtccggccttttaaacgaaggaaatctgaagaaatctgttttttttttttttttttttttttttaaagattgtgatcaaattttgatattatcttatacaaatattaatgtcatttttaagagtaaaattaggaggtggaccccaaaatcatcatcttgttaacagatttagaattttgaaaaattaaaatcgtaacaattaaaaactataatgtgttaaaacaattaaaatcctctcctaagataacacgccaccatctattcgttttaataaaaccgttatcacgatcttcatctctttttgcaaagcttcttcatgatcataatttgagtttttcaaaattaaaatggatcctctaagcttttatttatttatttaatttatatagttagatccaaagctaaacaaaggtaaaaaaaaaaaaaggaataagattcttacaatttagaaaaactataaacattgtgaggtaaaaactcaactaattaatgtatgtctaactatcaaatataacaaactaaacattttgctataaaaactcaaccagtcagtttaaaacactcataaacataaaattgctatatagagaaatgactcttgtgtcaaaattaaattactatccaaattttccttattgatttcaaaaattcaaaatttgtaattttgtttcatgtattttcttttttgaatttttatttaaaatattttagtggatttatcataaggagtttcgaagttaacattagtgatatgaaaatatataaagagaaaaatcaaacagaaacaaaagtttaagagatcggatgaaactaaattggtcgaaatgaatagatatttaatcaataacaaaaggaaatagctattgaaaattgtgaaaacaaatgacagaaaaatggttttgagaaatatgtcaacaaaaaaaaagagttggaattaagcatcaaactacttctataaaattttaatagagatattcttcactaattactccaacaacctttaatttttataacaaattgcagtttttaaaaaatcataagtaaatgaatgaacgatgaagtatcacatttatgttaatttcagttcgaattatgaataaaaaaccaaaatacttgttaagaaaaaaaaaccagtttgtttttgttcttaacaaaaaaaaggaaattggggatctttttgtgcgtgaccataagtatttttactttacaaaatttgcatgcataaattttagtattaaaataatatatttactttataaaaactcatatgatattggctctaaaaaaaataacaagactaaattaaaagtgaagttaaccatgataactgtaagaaacattgttaggattaaaatcttataaggtaatatcatactttaatttatgaaaaaaagaaagtcttagagagccttacttattaattttttaaataaaattctcttgaacaatatcttccttttcaaatattaatgtaaaactttttttttttttaataccaatattaatgtaaaacttatgtaaaccaaaaccttctacatcgtcgttagcaaccggtttaacaatttttatgagttgctttctttttttaattatcactttaggtgactctccttttcagttgcttttaaaccttgtactgttctcccacttctccttgcttatatattgatcaaaagctcttgaaatgtaggaaaaatacggttcatataaaacttccttaatcaatcttagaagaaaaatcggaaaacttttttgatcagaagtttcgttcgatatatgtcttgagctctagggtatagtttcaaagattctaacatgagatatggtcgaagtcaaagtcaaaagaccttgggactcaacacgtcaaatcacgaagcttataatagtatgtccgatcaagaaaagatacaatgctcgatcaattgattttaatattttatattgtaaaaaattatataaaaaaaacacattcctctccataaaaattttgtagtagattaaccattatcaaaaataatagtagcataattaaaaagcttaaatatttccccaacatcaagaaaaccaaggttgctaatatattttttttgtcagaatttttaaaaaaatagtggttcatgtcaatgtcatttgctatccacttttctactaaaaccaaaacttggatacaaaaaattagatggaaaaaggaaggaaaaaacaaaaagcacacgagccagaaaaagtcacacgtgtgaaagtgaaacataatgaacgcagtacaaaacacaactaccactagtttcggtttggtcaagactgtaaatactcaaacaaactccgaaccagtagtagtagttctggtcacagctctttgtttccactctctctctctctacctctcacatcgttctacttctagggtttggctaatttagattcaacatctcctttaaaattctctgttcttttgtattcctaatctttaacaatttaagaagaaatg

SEQ ID NO: 1585 - DNA, 3000 bp, Unknown
  misc_feature (1)..( 3000): cDNA_ID_3063192_gDNA_ID_1620420_Annot_ID_156578 3000 nt of promoter + ATG
ttgacggtggtggaggagaaggtggcggaggagatgattggacaggactacatggattgtcgcatgaagaacacattgtacaagaaacaacctcgtcttttgatgtcactgtcggtgtcactgacactagcagcataacaacaagtgtagacaaagtgtataaatggtttgtttccattgtcagaaactggatttagaaacttaattttgtgcgaagaatatacagaggaagtagatgagagagcagaggagggagaaagagtaggagtgggaaagaagaagaagaagaagaagaagaagcacgttcagaggaggagtgttcttctttttatcgatggcttttacaaataatttataaataaatattttcagcataaaaaaggtgttttaataaagaaacaattagtaaaagttcggtggagtgtattaagaatttatctgattcttataaaatagagtttactggagattaattattggagattcttgggatattatatttatcaatagttttgtgtgtgaaaattataattatccattgcagatacaaaattattgtaatttttgtggtgcatgattttatttattcaaagcatgattttagtagtcgaggacgtagaattttttggtaaataattttaatttagaaatcacagtgttttaagaaaagaaatgaatagaatgcaagaaaaagttgacgcggacacgttaacctttttaaccaaaggtcttgtaataaagcaccggaaatacgcggatgtcgggggcaaagacgtcacgtaatctcttgaaatgtagaaattacgatgatacctctagtcccgtggcgacctcgtggcggctgcgtcgacgagccaagtagggttggggaaataaaagagaatcttcaacaaaagtcattatagtggggcttgactcttttgcaagctttcacacgtggacgtaattcattggttttttgttttatgacgtggtagctttagaagagtagacgtgaagatgacggaagtcccctacttaagcgattagtgtgaagtagcgttttttctcatcaacaacttctttcgtttcgacaataaaaacatatgagaaatttcgttgagtagcaaacaaaagcaaaaacattcctccatatataagacaaacaagaaaagttcaaagctctactaattagcgttgtgacttcaaatgtataacatcaagtttaaattagctctaggtttaaccatggtatgatcagttttatccagtctagacaatatgcaagtagaatatcaagttatgtggtatttttttccaaacaaatttcattattaacattaaaaagtatttatttaaaaaaaaaaaaagaacattaaaaagtaggcaattttacgaagcatttaaaacatcggatcgtcatgattataaatggcgtaaaattgggttacgtttttcttatttcataatcaaattaataaaattgggtcactgtatcagcagtgagagacttggaacataccacatgttcggatgttatgtcccgtattgagatgtcatattttcatagcaaaagaatatgtgaacattgtggaagagaaactaagtcacgaaacctagtggataggtgttgagcacatattttttgcattctataagaactcattttatcaaaaatatcataatcgaagtaaaatgataccgctaaaacgactgatttagttaaaaaagaacaagaaaaaaaaaaaaaaaatgtttcctgtttgtcttaatcttttaggtacttaaaataagatgataccaatcacaaaatctgagcaagcttagactcttagtttataatcaaactgaacaggcgattgaagatgatcacaccatgcttatggtgatctcatgattaaagttactctgctttttaaaagataaatattttgcttgcttttctgactcaaatcaattgttaatgctaaaacattttcatgttaacaaagaagaaaaaaaaaactggaaagtcatacaaaatcttaaactaatctctaaagtttgcaaagtatgtgaattttgcaatggctaaagagaagatgcgttgcagcgttgggttgagaattgaactctggcttaattagattcaaaatagcaattcaccatcctactagttattcgtttcgtttaaagacaacttttatatttcatttgattgttgaggaacaaaagttggttatataagtgagaactttttgctttttgggtttcaattgaataaaaacaaaaagttgtcgtcgatctgtgaaattcaatttatatctatagagagcatttcttctatttattgggccagttcttagtggcccaataacaaaaagcccaataaccctattggagaactgtattactctacagtcatgagaaacaccgctcaattcatcaccggaattaacaaaaagagtttgaaattcagaattgtcatcttttgtttcgatcggattccttattcgtgtatcttctccgattcgatgggaattggctctcatggcaatggtaatcaagaggtttcgcgttaatcaaaaggagtgaaacgatggcgttttgtatttggtgtttaagcaacttcagttcttaccgttttgagtgttgatcatttgtttggcagagaacttaaaaggttagatctttcttctgaaatgatttcattattaattgtctgcttgtacttgaatcatgttaattatgactgagcttttcttcttgaggatgaggaaatcgtaatggctaatgcatacaatttgtctactaaagattagttgaagttgataatgctaagcacgccacaagtatatgtcattatcatatgaatgttttgtcacagaagatattgacttcgtataatatatattttctaatgcaacttggtaatattcaatgtcaaccagtagtcgtagtccttgtatatatctggacaacatcaaacttttgcaatgtttttgaatctctgattgctatttatcttttgggctcaaacca

SEQ ID NO: 1586 - DNA, 3000 bp, Unknown
  misc_feature (1)..( 3000): cDNA_ID_2141196_gDNA_ID_1620420_Annot_ID_156574 3000 nt of promoter + ATG
tatataataaatgtgtgaataattatattttcatgcaggagctgttcccaaaaaaatattagatgttatgaaggttgattacatcagtcgagaaaacgtagccagtcatcttcaggtaacgtttcttatatacaacataattgttcattttcaacaacatttttgcttttattcttgaatagcatctccattttttttatacttcaaaatggagtaagatttcaaatctatttagttattgattttcagaatgaccctttataatttacttatgaaaattacaaattcaacccatatatttgtaattttaccttagttatgttatactctgatccctcatcattataagtgatgtttaaggtttctacacataaattatgaaaacataaatctttcatttaatatacctcttttacatagaaacaaaactaaataaaatgaattcaaccaatttgaaaacatactctaaaatataattggtcgaaaaaaacaacatttagatattgaattattgcatagaaacatgagagcatcacttaaaatgaaacaaaataaattttcttaaacatcacttaaagttatacatagggagtaggtaatatatgtcattttaatattaaaatattagttaaccacataattaacattattgtttatatgttttaactatgagatagtagcaaataactttatttgagtataaagtaaaaaaaaactataatttaatggattgagttacaaatttttttctataaaactaaaaaaaaaatagtttttaactaaaaggatagattaaaaaacaaaaaacacaccacgaacccttccaaactttttacctcaccttgcatcggtttcaggttgctcttcagatccaatcgaagaaggaaggatgagacattgtgctcttcccttctcccactctttccctgcatctccttggacactcccttcagatctgcttccctttgtaggaaaggctacgaacccctggaacctcaacacaaccacggtcagagtctgccccattttggcatcctgaagtgaacctagggttttccccagtggacctagactcttctgttggcccattacctataataaggtccaagcccacctgctggtttaatcattctaaggcttttaatcttaggtctgaactcattattcttatgcttagcccattactttctttgtgtcgatctcctctgttctatggtcatggactccatgtgaaagagacatcaacattgacggtttgggttttcatttaccttatgcgaaccttggttttagctacctttaaggctttatggtatccttataaagaattgaagattgttgtgctaagttccttgaatcgttcttattgttgtggcatttgtggtattggattattctttttcgttgctcatttgccactaagcagctcacttttcgtcttcaaacactgtaccctctttatcatctccatcttccagaccatatgcttcatagtctttgccgctattgaccggagagatcctcattcgagttggtttctaaagccaccctcacctgactatcgcaccatagtctcccgaatccttggtatcgtgttactgtgggtaatgaagcttgctccggcgagattcatatcattgatccgtttgtcaatgtcactatatccttcgactgtgactaatccgtcgtccttcgaactcttcgaggatgatctctcgatttaccgtgacctctcatggtgcattgcgcttccttgccttttccaaaaatgatattttcacaatttctctttacaatttcctttttttttttgtggtcaaccgattttgcatgtttttaattagatgatattaaaaatgtaacagattagaccatggtgttaccagtatgtttttatcagctgaatatcttagtcatcattacccatatttttgatcactctactaatagagatgttaggagaaataatagagaggtgttcacccaataaaatgcttatagatcatcttttgttagttattttattttaaagttatgtgtattagtgtgattttcagatttcttctgataacagtcacagaggttttccgtttttttaattgatattcatatatagttcatgacctcttacttattgttttaaatcatgatacagaccatactaagacatacttagtagttaaaattttgtatttgctttctagtctttcttttttgggaactttaattcatgggtagattccattcaactattttcttatttagaaataaagtagttctttcttttcttttgttggtaaaatattagcatgatttagctctttctttctttttttggtaaaattttaacatgatttagttcttattgaactgttggggataaataagtaagacaataagacatcatatacataaatcagagtatatggatgttaatatactagttatattatcagaaagctcaactaattaaactacaccaaattaaatatggttgacacaaatttagagtaaaatacatttaaaaatgtcaaaagataatccttatttggttatgttttaatatatatatatatcgtactaattttcttttgtcctgaattgggtgtgtagaaattccggctcatgctgaagaaggagaatgatgaaaagattaagaaagaggagatgaacaaatctttaataaccccacaaaatggaagaatgtatgttggagaagatccatcaaatttctacagaggaagaaatgatcatttcccaacacatcatgtcaacaatattcctcaaccttcttatgtgccgcaacacaccttgaaccctaacaatctcaacacacagctcataccatctctcggacatcattttgatcatcgaggctctattgtggttcccgatacaaacctagagatgaatcaacaattttttcaccaccaacagacctcggacttcacgccagaagagaatcttggtgataacaactttactgaggaagatttaatg

SEQ ID NO: 1587 - DNA, 3000 bp, Unknown
  misc_feature (1)..( 3000): cDNA_ID_3063220_gDNA_ID_1620420_Annot_ID_156563 3000 nt of promoter + ATG
cagatgatctgaagaagtgtcttgataactttgatgggttctcaattcctcagattgaggactttgtcgaagatcttcgtgtttggcttagtggctccattgcttatcaacaaacatgtatggatacgtttgaagaaactaactcgaaactttcacaagacatgcagaaaatctttaaaacatctagagaactcactagtaatggccttgccatgattactaacatctctaaccttctcggagagttcaacgtcacaggtaaaacattttatatacatgtttaagtcttacacaagaattatgaatgaacaagactacaatttttggtggcaggagtaaccggggatctcggtaaatacgcaagaaaacttttgtcggcggaagacggtataccaagttgggttggaccaaacactagacggctcatggcaacgaaaggaggtgtgaaagctaacgtggtggttgcacacgacggaagtggtcagtacaagactatcaatgaagccttgaatgcagtgcctaaagccaaccaaaagccatttgttatctacattaagcaaggtgtctataacgagaaagttgacgtcaccaagaaaatgactcatgtcactttcatcggtgatggaccaaccaaaactaagatcactggtagtctcaactattacattggcaaggtcaagacataccttactgccactgttggtgagtccaattctgtttctaatccctaaaaattcccacatttcaaccacaaacataattatcaaaaatttgataggacttaaattttatatccaagttggtaaaagtgatatgaagacatttagtttgcaaaatacccctatgttgatgaaaattgcgagctttatatttcatggtttcattcagtgacacttttttcatttttaacatgctatttttcaatatgtctcccgtaattactattttgctacttgtttttgtgcgatctagttaacccaatttaacatgcatactttgttacagcgatcaatggtgataacttcacggcgaagaacatcgggtttgaaaacactgcaggtcccgaaggacatcaagctgtggccctaagagtctcggcggatttggccgtcttctacaactgccaaatcgatggttaccaagacacactctacgtccattctcatcgtcaattcttccgtgactgcacagtctcgggcaccgttgacttcattttcggcgatggtatagtagtcttacaaaactgtaacattgttgtgagaaaacccatgaaaagtcagtcttgcatgatcacagcccaaggccgctccgataaacgtgaatccaccggactcgtgctacaaaactgccatattaccggagaaccagcgtatattcccgtaaaatctataaacaaagcatatcttggaaggccatggaaagagttttcaagaaccattataatgggaacaaccatagacgacgttattgatccagcgggatggcttccttggaatggtgattttgcacttaatacgctttactatgctgagtatgagaataatgggcctgggtcaaaccaagcccaacgtgttaagtggcctggaattaagaaactatcgcccaagcaagctcttcgatttactcctgctaggtttttacgtggtaacttgtggattccaccaaatcgtgtgccttacatggggaattttcagtagattccaattggtgaattttccactttctgtgtgctctttaaaaaaaaaaatgaaggtgaataatttatatgcgtgtcttgtcttaaagtcctgacttgccgaatctagtatcttactctcagccaagttactacattgaagataaaaggcttgtcgtgtgctcttaggacaaaattggtcaggcttggatctatgtttttggtacaaataagttgatcagtaaaactcatatagatttgtggttgatcattggccttatcattgtacctttattactaattggtaccggttcctcgaggtcaacgtgaagaaccagcagaattacaagcttgatgttattgatttttaggttcttgtttcttgtaattttttgatttgttttgttttattttagtacagattctagtttaatcatttatttttcgggtgcgcattctttaagattgagtttgaatgtatttgggaatggactaaccgaaaaagaaggtggaaagtgacaagagagtaaagactgaagagagtattaaatcaagcaaagcacctttactcttggaacccctaaccgatgtctaacaacaaatatcctagtttctcgatatccaaatccactactttcagtttcatggttttttatcttcttcttcttccactaataaatcaatgtaactatattacttcagggaaccactaataatataaacttttttgataaaagtattatttaacttaaaagaataaaagaaccatttaatacaaagttctagcatcctgaattttaacctagttcttgtattaaagaaccactcgtttggagtaaagtgtcatatgctttttgtgaaagtcatctcaaattcttaatggttattacataaacatagtaaatgtgtggaagaataaatgatgagaaggacccatgcaaattccttggtagtattaaatgttcaatggatcttaagattttcaaaacaaaagatatagtattacttttccgtttctagtgggtcatatatacaaaagcaaaacaaaacaaaaatcgtcaaaattacgacaatgttttgtataataagaaaccatacccatgtgattggttacagaatacaattctaactttttattatttttaaatacggatctccatttttttttttaaatagcttgaaagtatttgggatatagattatagactaaccgaaaagaaggtagaaagagacaagagagtgaagaagcattgaatcaaccaaaacactaacactagaacaccttttctcttgaaacactaaaaactaaagtcacttcaccaatg

SEQ ID NO: 1588 - DNA, 3000 bp, Unknown
  misc_feature (1)..( 3000): cDNA_ID_2141155_gDNA_ID_1620420_Annot_ID_156562 3000 nt of promoter + ATG
acagaacacaaatagacaaaaaaaagcactaactgtatatcttgatttagtttttgtgaatctaaagagaaccataccattctacaacacagacagaaaatttcacttaacctaatcactttgaaccatcatctaagttggttaagcttgtttgttattatagttgaaaaatccattcacagtagctagagttgtttttgttagtgatgactataatggtaaactttttctccctcaatctatacgaagagtgagaattctcttattccctccatacacatatatacacaacctttctgtaaactaagtttgggtttgcctttacttattttggcagaggatcggagagatccccgagactgtggagatggagcgtggtgatctctacgttacaagattgtataaagagcaatcgaatctggccaaattgacttttgtgtagtgaatttttatattgtacgagcttcctaatgtcttgatagaaacttttactctgtagatcgtgcattatcgaattttgttgttgttgtcatctgtgtttctattaataatgccattaaaagatataagaaggaactaaataagtttgcgaaaaaaaaaaaatccccacaaactatgctcaaaattgaaagataaataagtatattaatttgaggttttcaatgtatataaatctgattaactcatatgattattcatttaatagatttactagatcataacccgtgctatacagcacgagcattaatattttgtataaattaaattgtatactttgtttgaattacataaaaaatagtatagtataaaagtgatgccataatatttttcaatgttttactatttacatataatgctgcattagattgactttgtttaaaaatgttattgttataataaatacaacatatgtagttttaagtaaatgtgtaaaatttgtatagaagttattttggtaagaaacatgtttcctttgtattagaggatctaatttttggcctaatttagaattagtttttgtatagtattttggttatatttgtggacctaattggggcctatattagattatctttaatagggctgacgaaaaaacggacccgataaccaacccaatactcgaaccaaaaaatcgggttagggcgggttaaaattttaggaaatttccttattgggtagagttttagtaaacccgtggatatccgattggaccggaaattacccgttatctaaaaagagtattcaaaaacccaaacattaatttaatatccaaaatattaattatatgatattattttatttgattttaaatatatagtaaactgcgagttgtatatgttttcttgatattatttatattgtttagtgtttaaaattatacacttgtattttgattgttaattttagagtttcacctgtagtataccatcttatattaatatcgatttaaacccgtcaattctaggattttccagcttgtattaaaaattgaatcacatcatacacataaaaaaatctaatatgttattaattattgttgtatataagattataaattcttaaaataatatgcatgaaattgaatataaatatttaaattatgacccagtacttagtaataaatttttttaaatctatttttgacccgttataatatttttttatgtattgaacagtttatattcgtttttaaaagtttaaattatggcatatgcgaaaaaactctaattatttttttataacgatgatattattttttcgcaaaaatagaatcatataaagatgagaggtgaactataataattaataaaaaattaatatgataatttagatattaaatctaatttgttgattttaattggttaattttttggaaattaataatgtatttcattttttaatgaaatttaattaattaaattagtatttgactttttaatttttaaagagatgaattactttactctttaaattttatttctaatggcatacatatgtaattacttacaaaaagtaaggttacatttaaaatgtacttcccaaataatatagtaggatcatggtaaaatgttagttctcgaaagaaaaaatattgttataaatcataaacctaacgagctaactaaaatagcggcatcctaccaatttgagatttttcgtatatatattaaaattatccatttgataaacacttcatgataaagtattagttttgaaaataaaaatattgttcttgttataagaaaaaacacacacataaaagtattattggaggatctcattgttaagttgttaaccctcaacatttcgtctaaaaatcagacttttttctatcaaaaaaatatctatactttgtagtcaaataaaaatcttaatcaaaataatactcgtatactttgactgttgactgatggaaagatattagaatataaacattagagatagaaacaaatctgtaaaaatcttaaaattaggattatttatacggaatattccccaaaagataaaatcattgaatcataaaaagccatttatggtagccctaaatattcaggcgcggctttttttcttatttcgttttcattttaaaaaagtttttagcgccgtttattgccgcgcgtcgttttcgctcctcgtctcgtctccttttattattaccccctctctctctctcccactcttcctctcaaatcacacatcactgctttcttcaacctctctatctctcagaccaattagggtttcgcaatcttccagtagatttcgcttctcaacgtaagtttttctctataatctgtgtcgatttcagtctaactacagtgattgttaaaccctagactcggaaattttcctgggctttgttattatttgcgtcggtttagtcaatgcgatgtagtgaacgcttcgattacatagatttgtgtgaaaattttatagtccaattgcgttatagtgatgattttgttggtaattttgattttgaaactagggattttgaaa

SEQ ID NO: 1589 - DNA, 3000 bp, Unknown
  misc_feature (1)..( 3000): cDNA_ID_3063260_gDNA_ID_1620421_Annot_ID_156594 3000 nt of promoter + ATG
ccttgagttgtttcttcttctttatagccaattcttgattatctaatcctctatcaaaactttcttgcagctatctggctcctgagtatttccagcatggtaagatatctgacaagaccgatgtttacgccttcggggttgtgttgcttgagctaataactggccggaaaccaatcgaagcaagaagagcatctggtcaagaaaatctggttgtttgggtatgtcatctaattttacaacttgaatgataatgtgaccatatcctaaagtttgtgtcaatacatttatgattgttttggaaaaagatttatatgtattctttctataggcgaaaccgttgttggatagagggatagaagctatagtggagctgcttgatccaaggctaaaatgcacaagaaaaaactcggttcaaatggagcggatgatccgtgctgcagcggcgtgtgtgatcaatgaggagtcccgaagacccggtatggaagagattgtctcaatcttgaaaggcgaagaaggtgtagagccagaaacacattcaagcaggaaaactacaaatatttcgggtatgattgactcttatacacaattgcaacaaaccaaatccgagatgaaatgtcatcttgatcttgcgatgctcggagtaaccgagtttgaagatgatgatcatgtgtacggccgataaaagattctaagaaatggatttaaaagtgtgtaaataggtatttatgaaaagtttgaaacagagttcttagtttctgaattagtgatttgctgtgtgtacattggtttcgtttttttttttggtttctactttggagaaaaccggtttaggttttgattttccggtttggttatggagacagccgattctccggtttcgttttcagttttcaatatttttgggcttttttttttgagaaatccattaaaatgagggttggaattgttatttatttgattaccttttgtgaccacgtatttgaaattgacttaaataatataggaagtattaaaaattgcaatcgctcaagtcctaattgttattgttgttgaatttgtgtttcctaaacctatcaggactatgactagtattttcattatatatagacagaacaaactaaaccttctaaacattctatcacttcaaattaaatcgatcgaccattagttcaacatatagagatgatatcaatgaatcgtctatcgattctcctttttgttttcgcctttggtcttaccatgatgagtaacacagccttatcgtacaaacattccgtgtggatcagaaactttcttcatgaaaaaaacgatctcataatccattgcaaatccacgaaccatgatatggtataccataggttgcatccaacaggatcgtaccatctgctagttgatgatgattccgactatttttggtgtcatttatggcaaggacctaatttcaagcatcaccaagtttttggtgttaaccatggagacgtatgggaagctagggaagacggaatctacttctcgcagataaaatatgctcgagatctccgtcagcatgtgttcatgtatgggtggaatgttcctttgaccttgtcaagagcttcctcgttgggattgtgttgtgtctctttaagcttattactctcttccttggttttgttttatttttatctagttttagttttgaaatttattttttttattatgaattttaaaaatttaatttttatttgtgttggaatttttttattttctttgtaacctatatgaacttggatattttttttctttcttacattaattaagtacgtaagtttcgacaatcaagaatagggttttgttgattccaatcgtgttacccaaaaattagaataaggtttgtccaacaatttattaaatttggtcttagagttgtatacgagcctacgaggtatcttttagatatgccgaagagatggtagtgcgaagaagaaaagaaacctcattttccatggtattaaggatttcaagctattcaaacttttgtagtgacccaaatacgtgtagaactggcccaaagacaaatagcttaattaagattatcacctaatcttaggtattggtgataggtgattcgctcaagccttatgatcaatattagctccatattatggagagtgagcagcacatactcgtagatagaaaagtattgttgctcgagtaatatttttctgatgataattgtgtttcgaccactgttggcatctttcacacatgaatacatgatgtacatgtacgacatgcaatctttctcttaacgctcgactgctgtctgctgtgatggatcatcacaagtaaactttgtgaagcatatttcgtgagccaaatgatgttagaaaacaatcgtgtgagccaaaggcgtgagagcgcttgtagaaagtggtttatgttgtagttaaaataatccgaatattcatcttccggaaaaaagtgaagttcaacctctcaacggtacgtttttatacctcaactaagttacattgtgtatatcaacatcagctaactttttattaatatttcggttcacaatatcattatctttttcaaaatttattaagatttcttttgctcattttatttatgtgaattttaaaaataaaataatttttataatatagaaacaaaatattactaaaagtaatttttaaaaaataaataaaattaatgtcatatcaacgaaaaattcatagtttattaaagtagtaaatataaaagtaataatattttaattattttggtattaaattatacacttttattaatatatgtattttcttctaaaaattaaaaattaattgggtttttgtttggaatttttccgacttaccttttctccttctttttgtcgttttgcttagatatttgtttgcatcattttcaaagagagacgactctgaatccaaaaaaaaaaaaaactcattaagtaaagacaaaggaagagaagaaagacgatttctcgaagaagctatg

SEQ ID NO: 1590 - DNA, 3000 bp, Unknown
  misc_feature (1)..( 3000): cDNA_ID_3063243_gDNA_ID_1620421_Annot_ID_156607 3000 nt of promoter + ATG
ttacagtttataattgttattaagtaacggtataccacgaatccatgagacaattgttaaaaaactgaagtttaacccctattaaaacagcatattaataatattttaaaattttataaatattgattcaaatacatccaccatataacccaattccaaaataaaacccgttctgtaattcctttacccgtcccgtaatatttttttaaagtaataatttttaaaatttaagaattatttattatatataaaagttttgcaaattgtatcattctctaacacatttatattttatagtttaattttatatatagtaacattatacataccacataacatttttggttttatataatcttttctaaattaggatgatttgatatgtttaatattaatggtcttaaaaaataataaattaaagatttaacccgtattcaaacagtggattaattatattttatttttttattaatgttgattcaaaaacccgtctctccaaatccgtcttgccaaaaagccatttattttattaatattaattttatttatgatatgactctgaattataatctgaacattttagctaataacataggagtgcaccatatttatttaataggagaatgtaccatatgacccgaatgcacttttatccaaatccaccaaaaaagtcttgcaaaaatactgtagagataagaaacgatagtcggttttgataggtataagattagcaaatatattaggtagcttaaattagttaaagaatacaaattgaaaaggtatattacactttattcgaatataatatcaaaacttatataacacagagatttgataattgtttaattgttgaatacttttttgtgctaatttttatgtgattaagatttaattgatttcgtatataaaatattaaattgttttacgaacttatttgtttataatttggtaacagatagatatttgaatattcagtgtattttgcttcagtttaggaaatctttgatgacccgtctttagatccaataaaccttataattaagagatgaatattgttgttaaatgattttggtaattttaatgacgtcattaaagatttttgtttttgattaaatttttttaatggcattgtcatgtaattaattacaaaaattaaggttacatttaaaatgtacttcccaaataatatagtaggatatgatattctataatatttatacactgattaacaatcacgacttaaaaaattcctttaaaggtagtaaactttgtacgttcacgtgcatgcatgtttgattaatacaacgtgaggactcgaagatatgaagattttttttacttccaattataaatcacaaatattctttgtttgtgttagttttttttaattcattcaattagttcaattctaatataatctggattgatgagaatggtccaaactattttatatcgtgtaattggtagtcattcattattgcaggaatctttgatagtttgtaatattaatttaggaaacggtattttttaatgtgcaagtatgactatcaatattattcgtaaatctactcgaaatctgatgatcttcaaaatatatactactttattattctctactaattcaattaaaatatcatccagaaataccgtttataactaacactagatattaatcccaatatttttgttaaattttttttttataaataatttataaacatatgctattgttttgtttgatttaaatgtatgatacaccgtgataagataatttataactaaatatataaaattttaagttgtatctattttgttaatattgtttattttatttagtatttaatactgcattattgtattttgattgttaattctagaatttcaccgtagtatatattatgttatatcatctaagattgaaaattgtaaatgtttgagagaatttttgaccaaaaactctaccaaaaatatatatgtatatgtaattttacgtgaaataactgaagtaactttacagaattctatttagtatataatttctatgttattttttgtttttaatggtcaatctacaaaaagaaagaaattattagaacagtaagatttacatctataagatttaaaacagtataatcttgatgtatatgtaacaagaatcttgaaaacacatttccattgagatcagtcatctcttgaagtgattcgctcaatcggttaaaatgcatagcatcaagcatgggtcgaactttatcgatggtcctactcaaaataaactttcaatggcctataaatttttagatcataatccttggcttatgttatttatgctctaacccggcctacatagcatccaggtctaaaatatcaaatttaatatcaactataatgcaattaaaagagactggatgatgaagaaatcaaaccaaaacctcatcaagaaacacaagccggaatcacttttagacttgcaccagaacgcaaggaacccaatggtcttgtcatcaccaaacccaacatcgttttagctcgataccgaatacgagcccaataatgaaacaaagcctcaaacattctaacaagacctatataattggatcatccctacaaaggtggtttgtttttttcaacttttttttttggtcaaacattctacttttgttatacaatctgattttaacaggtctacgactacgtagtgaggaaaaataataactcctacaaatgtgcaactccaactagactcccattttagcatcttttacccatctccacataacatatgatcctacttttcatctgttgcatccaatcacaagtctactattccaaatcattagattcaatccaatacttctgtgattgtttcatttaaggtatatttcattttaaaaaaaaactctttatcactaaagttttcgtttattttttctttctgaaataaaaatctctccattcagctttaggaaaaaaaaaatttgtttctaagaacaaatccaaaaa

SEQ ID NO: 1591 - DNA, 1544 bp, Unknown
  misc_feature (1)..( 1544): cDNA_ID_3063235_gDNA_ID_1620421_Annot_ID_156609 3000 nt of promoter + ATG
taccggagagttatgtccggtaatatacatgttggcgcaaaggagcgtttagagatgttaatgctttcaaggagaacggtttctgatgttggtgcagcaagatctgacgtagtaggagatgggcctgagcttggacatacgagggtgaggttaaggctgcctaggtctcagataacaaagttaatggaagagagccatgatgcttcggaagtggcagcgaagattatcagtgcttatatggagagttccggtgggatacaaggcggtagggataacgatggccttcgccagagacttggaattgcggagataaacaaccattacaaagcacgagaggtaaatgtccgagaaaattacatgatcgaaatacatttgaagttatcaatcctaaggtcttatatatagcataagtgcataactaaaacaaaggtcttatagcatagctaaatatttgaaattacgttttttttccaacaacatgcattttatccgatttgaatataaatggtgacacatcaacaaagaaactattacaaaccaataaactacatgcaatagtcatgaagacattaatatttatgctactcaattgcctaaagtttttggaaccagaacgtatgatgaattatcactatgtatagtatatgatcaaacatcaaatccgcatttaatgtactttgggtttcgttgtttcaaactgtaactcatattttttttatattttttttgccatgaatatatttgtgaaatgaacacgcaaactaaaggagatctctttgtttgtatttgacattttataaaacgttgttgttccaaataaaatgcagaagcatgtgagtttcgcagagaaaggaggaagaggagagatcgttgttctatgaagtacaaagcaagagtagccagcaattacatattgtccactacttcaaaatgcatttgttaggattcttattttttatttgtttttaggactcatatatttttatgggcatatctagctatcatctctactatgatgtcaaaaacgaaatgagacatttaccaccaatttttaatcaacattcagaaagttcgagtcaaatttttactaccgcccatgagctataattttaacatgcgtccaccaatgtctcaattaaatatgcttaagctatccaatcccaatatatatcatagtgtagtagctaattacgctaactcaatcctaatgtatcaaactttattaggctaattagatccggatccaaaattcaatcggatatccggatgcgatagattcgaatctgagtaatagtaaaaatcaaaattgggatatcacggttattggcctactttcgcgctaaacccaatatcctgatccggtctaatagataaacatcgcacattcacatagtggtgggcttaaaatacagatgatgtacctatctactaggaaattcgagaaaagatggaataggaaagacgtgtttccaaataatcctatgactaacctagctcaaaaattttaggacaaaaaacggaatccgcgggataaaagggggatg

SEQ ID NO: 1592 - DNA, 3000 bp, Unknown
  misc_feature (1)..( 3000): cDNA_ID_2141249_gDNA_ID_1620421_Annot_ID_156595 3000 nt of promoter + ATG
ggagataacaatgacaacaacaacaatacaggaatcaaaacccttttgaaaagaatgatctttgatttgggtttcgcttgtttccttcctcctttaagctcaaccgaaaactccggcaacaacaatggaggaggaacaagcggcggcggaggaggaggaggaggaggaggagagaataacaaagcttggctattggcggaaacagcaccggagaatatgaatcctgatcctcattcagttcattcatcgtttagattcagtctttgttcacaaatcgagcttgagaaaatgaaaggtgaagaaccgtccttgtctgcttcgtcttcttgtcggaatttgtcggtttctggtggttccacgacggttttgatggttaatttggagaatggtgttaaggagactactgggaatgcgactgatgatttgcggtggactagagctaggtcgcttgagaagagtatttctccggtggctaatactttggttcggtttagctacggtgagattgtggcagctactcgtaatttctctaaaggtaaagctctaaattagtcattaaacatgaaatttgaaaactatttgtttggtaataataagattcgggtgatagcgggtacgggtaaggatccgatacgggtaattagggtataaaactattatccagagtaattagcgagaaattacgggtagagtttggttaattcgcatatctaaaatcactatagcactttctaatttcgtaaggattggattttagacctgatttctagacattttgggtagattttagctaattgtttggtaattaggctatatccgatatcgacaaacgggtacgggtcggataattcaataattcaataaggccgttgaatttgaatcatatatttcattatttttttgataaattttgtgtaattatgagtatttttgggtatttcacttcagtaatttgtaaaaaaattggataattatgacaaagtaccggatagaaaatgcggatcgggtatgggtcgggtcgggtcaaccctatttggctatttggaaataggaattagggtgaaaatgaaaatagtgtttgacttatttattcaatggtttatatatagggagagtgttgggaagaggagcttgtagctatgtgtttagaggcaaaatcggaatgtggagaacggctttagcaatcaagagacttgataaggaagacaaagaatctcctaaatctttttgtagagagttgatgattgcaagctctcttcatagctccaacattgtacctcttcttggattctgtattgatcctgaagaagggttattcttggtttacaagtatgtctctggtggtagcctcgaacattatttacacggtaagcgaatggatatctcatttgtgtttatatacagagatagttaaagacttaaggattgtgattttctgtttgtaatagataagaagaagaagaaaggcgtaaaagccgcttttggtttgccttggtcagcaaggtacaaggtagcgttaggtatagcagatgccatagcttatttgcataatggaacagagcaatgtgttgttcacagagatatcaaaccctccaatattcttctttcctcaaagaaaataccaaaggtaaagattcgcgaaacgaatgatgtattcgataattatcggtaagcaaaccaatgatttgttttgacctgttctttttcagttgtgtgattttgggttagctacttggaccgctgcaccttcggttcctttcctctgcaagaccgtgaaaggcacattcgggtattgctcgaaacttgccttgagttgtttcttcttctttatagccaattcttgattatctaatcctctatcaaaactttcttgcagctatctggctcctgagtatttccagcatggtaagatatctgacaagaccgatgtttacgccttcggggttgtgttgcttgagctaataactggccggaaaccaatcgaagcaagaagagcatctggtcaagaaaatctggttgtttgggtatgtcatctaattttacaacttgaatgataatgtgaccatatcctaaagtttgtgtcaatacatttatgattgttttggaaaaagatttatatgtattctttctataggcgaaaccgttgttggatagagggatagaagctatagtggagctgcttgatccaaggctaaaatgcacaagaaaaaactcggttcaaatggagcggatgatccgtgctgcagcggcgtgtgtgatcaatgaggagtcccgaagacccggtatggaagagattgtctcaatcttgaaaggcgaagaaggtgtagagccagaaacacattcaagcaggaaaactacaaatatttcgggtatgattgactcttatacacaattgcaacaaaccaaatccgagatgaaatgtcatcttgatcttgcgatgctcggagtaaccgagtttgaagatgatgatcatgtgtacggccgataaaagattctaagaaatggatttaaaagtgtgtaaataggtatttatgaaaagtttgaaacagagttcttagtttctgaattagtgatttgctgtgtgtacattggtttcgtttttttttttggtttctactttggagaaaaccggtttaggttttgattttccggtttggttatggagacagccgattctccggtttcgttttcagttttcaatatttttgggcttttttttttgagaaatccattaaaatgagggttggaattgttatttatttgattaccttttgtgaccacgtatttgaaattgacttaaataatataggaagtattaaaaattgcaatcgctcaagtcctaattgttattgttgttgaatttgtgtttcctaaacctatcaggactatgactagtattttcattatatatagacagaacaaactaaaccttctaaacattctatcacttcaaattaaatcgatcgaccattagttcaacatatagagatgatatcaatg

SEQ ID NO: 1593 - DNA, 3000 bp, Unknown
  misc_feature (1)..( 3000): cDNA_ID_3063256_gDNA_ID_1620421_Annot_ID_156596 3000 nt of promoter + ATG
gaaattgttagagtatgtaaactttaaatataaagtatgtaaactttaaatataaagtatgagtagtttcttttctaagagtatacttcaaatataaagtttctaaaatgtgtgttttgtattatagtccttatattgtttataattattttaaaactatataacttttataaataactctaaaacatacattaaaatattacacataatcttaattaacaaaacaatacatttataaataaaatacatataaataaaaattaaaaatacataaattaacttataaattacaaattactcaataaaattatttccgtaatgctcctatatataatcaatcaatgcattacgaagagatatatgagtctctttatttttaatatgtagattacaagccaaaaattgttgaaatactttgaatatataaaaatttaaggactaaaatgataaacatagtaatttgtaagattatttatgaaatattgaattttagggacttaaatacaaataaaaagatgaaacttcaaatttagagtattgaatagtgatattccaaatatagagtgtcactatttaatactctaaattatgaagtattagagtatctcttggagaacctaaaactttatatttgaggagatagagtatctcttggagatgctcttaagaatgcttttccaagactactcttttttaattatgtttttttctgttggatatttttatttatattttcttttaatttttaatgattattttatctctattttgaaaaaattttaggctaacaaaataaaatttaattttttctcgtctaaaatattccgaagaaaattttccctccaaaaaatattgaaaaaaaattcacagcacttttcccgcaaaaaaaaagaaaaatgacgggaaatatatttaacaggttttttaaagatttaaaaaatttacaagagtttttaaaagatttacaaagttttaaaatcctttaaaaattcttataaatcttttaaaaatcttttgtaaggatctacaaaagttttaaaatggttcaaaaagagttaaaaataaataaaatatttataatttttttttaagagttaaaaaatgatttttagtaatgttttaaaaactttataagaatttcaaaaatattttaaaaagatttacaaaggttttactaatatttacaattttgtttattaataagaaacgcatcgtattatccataatactataataggtacatatatccatatgccgctttatatggaaacaaacacaccatcacatgagatttgtaaacgcactagccaaaaacaccaaaacggtcatcattatgtccaaaagaccgttgactcttggttggtacttttggtttgtctttggaatcgctgaatgtgctatagcatatcgcggcctacctccaaaatgcaacgataatggccatctcttgaacgtcaagatatatttctagtttataaaccttttttaggcgttcttgtatactatgcgtttttgaagtaagttcagtctgtatgaaccaatgacaaacattctttggatattaacaccacacaaattctttttttttttattttttttttaaaatccataaagttctaaggcgaagtccgtaatctctccatacctgaaaccacagcatataatattagttttgtcccaaacatcgtcatcacacaaatttaataatatcccattaccattactagagaacattttatgagtttgtaatacatacgttaatattgttaaaacaatcactatatagccaacagttacatataaaaaaaatatgtaagttaactaaacaacaacaaattatatgtttttaaaaacaattaagaagaaaaaaaaatcgctagtgatgctagatctccaatgataagtgttataaaagattctaatttgacatttaaaaaaaaaaatatttttagtcaagtggtaaaaagattcaccactgcagtctgcatcttttaataccgaaattcgattacagccttacaagaaccaaaatttaaatagtagcgttgtcccgtttaataaaaatgggatatagatctaaatacaatgttaaagacaaacaaaataaccttaccaaaaaaaaaaagacaaacaaaataaattccttaaaatctgctttcatatctctgtcttctttcattctctttgaatttcttgaatattttgtaagtttttaattatcatacattggtcttataacaaaatgattgtttctcaccatgtataaattctttcttttaaaataggttcatattaggtgaaaaagaagattcctataattaaaagcgtttctaaatgaccaaagaaagaaaacataatcatgaaataaatagtggcctgacccaagttcttaccaatgttgtcaaatatttcgccacatgtacgaatcagaaaacacagagaataaaaactaaaaatagtaacacttgaattatatttatttcgatagtaacacttgtgaattttataacttctccattatttcagagaagcacaacctcgtgggctctgcttttgtccccttttaagtataagctaacagcctttacccatatgacctaaaaacattttaaaatcattacataataaacacttgtttgattggttttgtaacgctcacaattattttaaaactcaataattcaaaaccaaaaagaaaaatcattaattatacctaattaattcccccttcttctcttgttttttcttgcttaagatcacaccaacaacttaacggtataagaaaaattaaaataaaactaatgtttccaccttccaccactaatcacacattaatttaattaaatcttcttcttcttcttcttccaattataaactttataagaaaaataaatacatattctctttctcttccatcaagcaaagcttttcaaaaagaatcaaacttttcgaatctttttgcttctcgagatctgttcatagagagagagataaagaatg

SEQ ID NO: 1594 - DNA, 3000 bp, Unknown
  misc_feature (1)..( 3000): cDNA_ID_3063285_gDNA_ID_1620422_Annot_ID_156616 3000 nt of promoter + ATG
gatctacaacaattctcttcaaggaaatcttccggattcacttatcaacctcaagaacctcacaagaatcaatttttcaagcaacaagttcaatggttcgataagtccattgtgcggttcaagctcgtatctctcgtttgatgtcacggaaaacggatttgagggagatatacctcttgagctaggtaagtctacgaatcttgatcggttaaggctggggaagaatcagttcacaggaagaatccctcggacatttgggaagatcagtgagctttctttattggatatttcaagaaactctctctcaggaatcataccggtggagctcggtttgtgcaagaagctgacacacattgatctcaacaataactatctttcaggggtgatacctacatggcttggaaagcttccattgttgggagagctaaagctttcttctaataagtttgttgggtctctccctactgagattttcagcttaaccaatattcttacgctatttcttgatggtaactcactcaacggctcgatcccgcaagagattggtaacttgcaagctctcaatgcgttgaacctcgaagagaatcagctttcaggtcctctgccttctacaatagggaaactgagcaagcttttcgagcttcggttatcgagaaacgctttaaccggagagattcctgttgagattggacagctgcaagatcttcaaagtgctttagatctcagctacaacaactttaccggacgtataccgtctacgatttcgacgttacctaagcttgaatctcttgatctgtctcacaatcagcttgtaggagaagttcctggccaaatcggtgacatgaaaagcttgggatatcttaacctctcttacaacaaccttgagggaaagttaaagaaacagttctctagatggcaagctgatgcgtttgtaggcaatgcaggtctttgtggaagccctcttagtcattgcaacagagctggatcaaagaatcaacgaagtcttagtccgaaaacagtggttataatctctgcgatttcatcattagcagcgattgctttgatggtacttgttatcatcctcttcttcaagcaaaaccatgatcttttcaagaaagtgcgaggcggaaacagcgcattttcatcgaactcttcttcttcacaagctcctctatttagtaatggaggtgcaaagtcagatataaagtgggatgacataatggaagctacacattaccttaacgaagagttcatgattggatcaggagggtcaggaaaagtttacaaagcggagttaaagaacggcgagacgatagctgtgaagaagattctttggaaagatgatttgatgtcaaacaagagctttaacagagaagttaagacacttggaacaatcagacatagacatttggttaagctaatgggttattgtagcagtaaagcagatggtttgaatctgttgatctacgagtatatggcgaatggaagcgtttgggattggcttcatgccaacgagaatacgaagaaaaaggaggttcttggttgggaaacaagattgaaaatagcacttgggttggctcaaggagtggagtatcttcattatgactgtgttcctccgattgttcatcgcgatattaagtctagtaatgtgcttcttgattccaacatagaagcacatttaggagatttcggactcgccaagatcctaaccgggaattatgacaccaacacagaatcaaacactatgtttgcaggctcttatggctacatcgcgccaggtacggtacatacatgtctttctcgggtttcttaactacgattcgactattaaacctaacgtgttggataccgttcttttttcgcagagtatgcgtactcgttgaaggcgactgagaagagcgatgtttacagtatggggatagtgttgatggagattgtgactggtaaaatgccaaccgaagcaatgtttgatgaagagacggatatggtgagatgggtagagacagttcttgatacacctccgggttctgaagcaagagagaagctgattgattcagagcttaaatcgctgttaccttgcgaagaagaagcagcttatcaggttcttgaaatagcacttcagtgcacaaaaagttatcctcaagagagaccttcttcaagacaagctagtgaatatcttcttaatgtcttcaacaatagagctgccagttacagggagatgcaaactgataccgataaatgattttcgagacgtgaagctaagtaaactcggaatatatcttttttttgaaaactctgttttggttgagtagattgatgcattatttgcgtagtatcattttgtgataaataacgtaatcaagtatgtattgctttcttatgattcttgagactattaacaaagaaaaaactactattgcttaatttagagattaagtactattcgttcatataattatgtacccagtctttagtatttagatagtgtacaatattttaacatagaaaatctcattataaaaatacaataaaaatacataaatcttaccaagtatacacagttttattttcttatataaaaatatccagtgagagcaagtcctaaagactcagcttcttctctagatatatttcttcttaccctgttcttgcctctttgatagtcctctgttttgttcttctgtttcaagttttcagaaagtaaatttctgttatcttaatatccaaaagtttttcgagaaacagaggactaaagaacaggaaaaacataacaattattattcgattttatcaatttctctgttataatctttttttttcccatgttctactcaattttttttttgttctgagcgtctgtagaaagcaaaatcattttttttgtagtcgtttgcgattatagtttctctccttccttattcttgagtgtaacaaaacaaagcaagtttaaaaacaaagcatagggtttgttttgatctttatttttttatttagaaaatg

SEQ ID NO: 1595 - DNA, 3000 bp, Unknown
  misc_feature (1)..( 3000): cDNA_ID_2141433_gDNA_ID_1620422_Annot_ID_156629 3000 nt of promoter + ATG
gacacttttaaaggcttttcaggttttggatgcgatatacctaatacctaatttctttgacatgattatactataacattaatttacatttgacttaatactattattgtatgtttttgtaaattaaactcaatttttagatatgaaagatgcacacgagattataaaggcaatttgaattgaataatattagtttggtaggtggttcatgtaccaaacaaagcttttgatgcgtgttttgtaatttttggcgtataaaaaatctcttgttaattcttaaaagaaaaaaagaaaaaaaaagaaaaaagaagaaagaattattttgttagtagattactttttcttatttcattatcctacgaaaacgtacaaaaactatatatgtgaggtttgctttcagaaaaaaggaaaagtgtacaaaacgaaatatgacaatcttatataattattttaaaaagattgcataattgatgtctttggttactcaatttctaatgttattttttttttcgtttttttttttatttttttttatttttaaatgtactacacaatttgtgattactccattgggaagctatatgtactacatatattttaccgtcactcttttgaaagctatatgtactatacaaattatgttttaaggaaccatgaattgtttttaagattacttgaagtctacgttttaggtcttgacaacaaacaaagaaaaaaagaaaggaaaaagactaatagtctaatacatttaggtcaaagcttatctcttgatctttcttaagtggaaggttcatattgttatctttgcctttgtttttcttgttttttatttgttcgtagaaagcataatgaatgattcagacagagagaaagtatatttggtgtattagcttttgataagtggagtggaagtcacattccaacgaaagaaaaagtaaactaactattccaatgtttcagaatttggttctctgtaatagttccgagtttatatcataccaaaaaaagaagaagaagagttatagataaactcattagatatgcgattttggaaatacaatagatataaaatgaagaaaaccaaaaccaaaaccatagctatatttttttaagaatatccaatggcaatagctagtatcagaattcttagattaacgcacatattattagcttcacattgcatgatatcattcgttacaattactatttgattaatctaagaatataattaatatctaatggcaagagctaagaattagaattcttagattaacgcctatattatttagcttcacattgcttgttatcacatggtacattagattaattgacgccatggtatactcgtttccagtactattagactaacttctatcatagtttttattttgacttttgtctttgttagttttttttttgtaattgttttatgcaattattttaccaatcaatgtttttttttaccaactctagtctactactatgtttagtagtctatattagtcagtaaagaaataaactatacatattaatttttcaatgttttttgtatgcatttttattgggtaaaaaaatagttcaattggtaaattttgtatgcatttttttcaacaaactaaaaatagtatcattggattttcttaaagatatctaaatgatactattttgatacaatatttttttaacatcatcttgaatttgaataatactaatctgctactaaaaaattagtaaaatattggcaaatcatatatttgttctaaaagtcatttataattgaaaagattcttataatttgatttaaaattactgacaagttacaacatgctatcaaaaactagaaaatttatcgaaattagatttcaaacatatattattgcatttttttcctcattttcaacgtttaagtataaattaattataaacaatgggtgcatttatttgactactactactatttaaaaatataaataggtctcacgagtctaccactcctcgggatcagactaggctacatccattgaaccatagtaaaattaccgtggaaaaaacagtacagctgtaacttcctatataaacacaaagatccatgtgcccataaacatttactactagtctactactatcgtattttttttccttcgtctatgactacactaggttgtttaattttggaatcaaattaattagtagacgacgacttcaaacaataattatttaacatacacgttttgaacaactgtatgcaataattaaaaaatcaacaagaccaatcaaaatcattaacaaatgctgtaaaaaaaaccattaacaaatgtcatttaacatgtttctaagaatatttaatgaaaaaagtatagatcaaagctctagtgctctagatttttcattaaaaatctattaatattttcagttttttttttaaatgttttcagatattttaaaactctattaatatttccagattttttgttaactcttgaacaagtactattaatatttcctttaattacatacgtacatagtaataatagatttctcctataaaatgcttttctttttttacttcagctcctatataaaatactcggataaatagatcctaatcaataaataaatagattcagtttttcttttgatttagtcgtgtacaatgacgatcacaacaaaaaagcccataaatataatttactcaaagtgattaagggtaaaattgtcattatctgatacgtgttttagttgaaaaattgctatcttccaccttcttctatctctctacgaaaataatatttttgagttttgtttttactttttgtttttttttttaaaatttttttttcttcaaaaattcctccattgttattacataaaggaaaaaagaaaggtctctgagattttcaaatcaccatcatcatcatcgttgaagaagacgaagaagataccttcctctttatcttctccgatttctcaaccttcccgtctgcttgtcgtaaagaaatg

SEQ ID NO: 1596 - DNA, 3000 bp, Unknown
  misc_feature (1)..( 3000): cDNA_ID_3063281_gDNA_ID_1620422_Annot_ID_156622 3000 nt of promoter + ATG
aactagagcaactgatagcaaagggaaaagaagtgcattgttgagattctactcttacagttgagagtgacttcaaagcacgaggtccgggaaatgtctttccagaaccatgacttttggggagaaggcgaccttgcacttcttctccactgatccctcttgctatattccataaccaagtactacaagtcgggggaaaaatcagaaaaacgtattaatagacaaacaagcacgagttgcatgtctttaaatttctattatcaagcaaataagcaactattgggaatttagtatgctagaaggtactaatcaaataatgaacaatctacaatagcctacgagtccaggacaacaaaaattctatcttttccaaagctattacccagtatttactccgtaatgttcttgtagcttcgtttcagaaaattgcagcaagtcccctactgtgtcaactcccaagtcagtttgcaagctagtgcccagctttcctcccagttgtttcctgcacgttatgtctaattagagctcaatgattaccagcactaactgaaaattttatgatcctgggacagcgataaaagatgcaatacacaactttggactgtcttacatcttataaaacacagctgtgttgatactgacgcaaatatttaagtgtattccgtagaatgtgacaaatactaaaagttctcctacgaaaatatgtgttgtgatcaatacactattgaaacttacttacattttctttattggcaaggaacttagtaattcctgtacagctgcatatggtacaactgtctgctgcgcaggtttgttcattccactagcaagtttggctagcatctgcttgttgaagttatatgttattactcgccatacaagcgataaaaggaaaacaaaataaaatagcttcttgccttgttatgggctatgccagcagaacaagtaaactcagtctccttaagcacctgtttccggagttctgcaacaatgataattccacaacttaataacttatcacgtcgatcagcatcttctcgacaaatccaattgcggacactctccttgaaatcatctccatcctgaaagtaaaataaataaattcagatcataatattgactatcgactatacttttgttggagactaaaagacaccaaaacagacctctctgttcattccaagaatatgggatttaagaacttcctcatctatcaattccaaactctctggaggtgcatcagcaagcatgctttctgctgcatcagtgaggtcaagatacacttcatcaatcgaagccctctcacattttccgctttttgctagaatcgaaaccacctgcagcgacaacacatagaatgagatgaatttagcaaatgtcattgtttagacaaacacaaacagtataataataacttccacttccatcaacctcagaaccggcactgcgatataaattaaggtcagctttaccacgagccacaggaacttgaaccaattgaatctgaggacaagcagctttagcctcatcacctctcatcgacctgaacattaacccaaaacacaatttttccctatcctcaaaagattgatacaattgggggaaagaagcatttctgtaattacacactaaccgctttacgccacatttacgtgcttcgtaactaacagcaatcaaaccaccaccttgccattcattgtactgtacaactgcactaggcagtcctcgcaactccggttgcttcctctgctccactaatcactcactcataaaaaaatcccttaaccaggtaagtaaaggagacattttgataaaatagaaacaaaaaagcacactttttggtatttggtaatttcccaaatccctaaaacaaacgccaacgagaaaaaaaaagaaaagaaaccgttattaaaattcgattgaaacccaaaattccaacaaagctaaaaagttcaaaaaaagtgttaaaaagctttgctttctctcactaaagcgtctagtggctgaatacaattcgggttagagagagaaggaccttgaacgtagaagcaatccatgtcgacatgagcgataactctagcatccgatgcttccggtctcgctaccggcatttctatttcagaaatctccgcagaaatcagagggagagagagagagagagagagagtttttaccaccgaaagaggggtttcttggggatgatgactgatgaatagcgcgcgaaaataataattaggagaaaaagcgagacagattaataaaatgagaaagtttcaaaacgaaccctcaaagaaactaaactttgcaaaataacccgtttagaacacaagtaatttgacaacaaaacatgaaattcattgtaatgatctcaaaccctaaatatttctccaaatttgccgtgtcaaattatttgtaaaaataggttgaagattgacattgttgtttttagagatttagtgtggtaacaaaattatggacatcaagctgcatctttcgaattatggttgatcgttcggtagataaacaaaaagtatagataaaatatttaatatttattcattacataaaatttttattgagtttatttttatttatataaaacaatcataaaaataatatgggtcatgtttttttcatccattactatttgttcactactattattaatttcactattattgtgaaatgtcgatttttattgctcattaaatttggctagataatcttcactaactaaagatttggattcaagaaaaacaattttctctcaattatgtttatgattacaaaaataaaataaaaaaattaggtattaaattataactgtaaaaattaaaacttatggggatttttggaagtatatacaagtttaagtactaatctgaaaatgtttgtgttttagtatataaaccactcacaggttgtgactttacaaattggaaaatttcgttgaatgcttcttcttctccgtctcgttgagattcctccccaacaacaaca

SEQ ID NO: 1597 - DNA, 3000 bp, Unknown
  misc_feature (1)..( 3000): cDNA_ID_2105010_gDNA_ID_1620422_Annot_ID_156618 3000 nt of promoter + ATG
gctgaagttgaatcacaccgtgttcatacactctatagaaattcaattgactctaccatctatatactaccatgaaagagacaacaatggattacaaatgcttttattttccttttacttaaatgataaatacagaatattttgaattcttgatcatagtttaacagttgatgtaatcatgagcggatctagagttatatttttactggatgcatataatttcttttcgaaatagatcggagacatttaaaagagcttacattattttattttatctgttttgtttataattagacaggacatgtggtacactggtatttatgttcatcttagagctcctcaagatcacgagttcgattttaacttttaagagtagattagactagtttaacttcttcttatctacgatccaaaaactaatgaatccttgttaaagtccaaggcttcttgattaaaaaacaaaatgtcttctttaacaatattttagttatatatacgagtcaattttctagtaagaaatcgtattacccgttagtctaaaatcgattaatttaagtatcaattgatgtgaagatggtgatacgtcgtattcattatggtttatttgtgtgaaatgttaaagtgtacaagtcttatcttatggaaaaacattctccttttgtataaatgtgatgttattcctgaaatatgatcagtctcaatttgcatagttaattaatcgtcttattagcttgtggttgtgcctattaatgaaacccaattgctaacaattcatcttctttcttcttttggctcctactgaccaaacttacccacatataaaactataggtaatcaatctatctcaaagcattgggccctttgactactttcaacgtgtatatctaaatgttctaaaacttatcaatgaagcaaaacgttccacaattttacatatttgaaataaatcggtttttcaaatgaaaatacttaatgtttttttgggatttatactcaaactaagcatcgctaagccaatatatatagactaataatttttaagaaaatgacaaacatatatttactaaaaagttatttctcaaaactaattaacatattttcataatattcttttattcttttattgtagtacattgacagcgttttaaatattagtactgacaacttggagattctttaaaaatctaaagaatttgtttggcaaattagtcatttccggagaatatttttttttctttgactaaaatatatactttatattcaagattttaaccagatatacaaaaagttaggatcaaagacaatcattctagatcaaccacattaagtattacactaagcaatactactttctttctcaaaaagatgtttcagccaaaaaggaaacccgattgctacatacgattggcggcgatcctccattgtcacgctcttggcaataagatgagctccaagattagagcttcttatttcaccacacaatctctggagaatgttctaaatgagataatttttgtggacgttgtgcaaatatcacacatgacaaaaaaaataaaaattggtataatcgtatgaatgatctttcaaactgtcttttattcgaaagatgattgtatatgtggatagatgtcaacacaccaacaaacattttgatcctatctgtatagcgaacaaaatatttgtgagaatattgaaccaagtcttaacaatgggaagattcatatcttagagatcagtgcaaaatttgagggatcaaaagattaacgtcaagtgtgtcatcagacgaactcctacttttatgatacccataatctttcaatctgttccgatttaaaaattttaaatgtaattactgattgtttgtaattgataataaaaaaaaactatttcatattttcaatttctaacattattgtttattgtttgtaattaataaaagaaaaaaacatttaatagtttttcatttttgacattatactttcttcaaatctaaaactaccaacgatgatatttatattttattaatccatttattctttgatattttcaaaaatgtccattaatgttttcattgttactattactaagtaataaataatataaataaacactgacaaactgaagttacagactataaataatttaccatactaaatgtaacatcaaagctttcatagctcagttggttagagcacccgtttagtaagcgggaggtcttgagttcaactctcaatgaaagcatttttctccttcttcttttttattgaacccataccctcgaaagctttttcttttgttattttttgaagtctatttctcttttcactgtctctcgcaatctccgactctctccttcttatttcgtcgccgtcgctactctttctcgtcggtaagttcccctctgtcatttccttcttctccaacatctaatcttattgtcgattgtgtaaattgctatgttttccagttatttactcgggcacgaaacatgttcgatgaaatgtctcaaagagtatttttttagactcataacgaaactgcttatctctttgcttttgttcgtgattttgtattgcggttctaacgttaatatgaactgggttagctttcaaattgtaaaaaaagtttaccagattcgtctggatctaatgctcatgttttagttttggaataaaaaatgtccagtctttagaaactattgttaaggaaacggaacctagttttggagaatcgttagttagagttgatcgcattgacatagcaaccttaattttatggtctcatagtttgcagattctcgtatttcagaagctactgtatttcaacatcaaagtttgtacctttctatgatgcatttaccattttggctttgaagaagatatatctgaattttgattgaaatgtttacgtttttttgttaaatctatcagactataatgagtgattttgtttcattgtgttgcttacgttaaggtggtatagtgtcaactttcaaggaag

SEQ ID NO: 1598 - DNA, 3000 bp, Unknown
  misc_feature (1)..( 3000): cDNA_ID_4256554_gDNA_ID_1620422_Annot_ID_156619 3000 nt of promoter + ATG
cttatttcaccacacaatctctggagaatgttctaaatgagataatttttgtggacgttgtgcaaatatcacacatgacaaaaaaaataaaaattggtataatcgtatgaatgatctttcaaactgtcttttattcgaaagatgattgtatatgtggatagatgtcaacacaccaacaaacattttgatcctatctgtatagcgaacaaaatatttgtgagaatattgaaccaagtcttaacaatgggaagattcatatcttagagatcagtgcaaaatttgagggatcaaaagattaacgtcaagtgtgtcatcagacgaactcctacttttatgatacccataatctttcaatctgttccgatttaaaaattttaaatgtaattactgattgtttgtaattgataataaaaaaaaactatttcatattttcaatttctaacattattgtttattgtttgtaattaataaaagaaaaaaacatttaatagtttttcatttttgacattatactttcttcaaatctaaaactaccaacgatgatatttatattttattaatccatttattctttgatattttcaaaaatgtccattaatgttttcattgttactattactaagtaataaataatataaataaacactgacaaactgaagttacagactataaataatttaccatactaaatgtaacatcaaagctttcatagctcagttggttagagcacccgtttagtaagcgggaggtcttgagttcaactctcaatgaaagcatttttctccttcttcttttttattgaacccataccctcgaaagctttttcttttgttattttttgaagtctatttctcttttcactgtctctcgcaatctccgactctctccttcttatttcgtcgccgtcgctactctttctcgtcggtaagttcccctctgtcatttccttcttctccaacatctaatcttattgtcgattgtgtaaattgctatgttttccagttatttactcgggcacgaaacatgttcgatgaaatgtctcaaagagtatttttttagactcataacgaaactgcttatctctttgcttttgttcgtgattttgtattgcggttctaacgttaatatgaactgggttagctttcaaattgtaaaaaaagtttaccagattcgtctggatctaatgctcatgttttagttttggaataaaaaatgtccagtctttagaaactattgttaaggaaacggaacctagttttggagaatcgttagttagagttgatcgcattgacatagcaaccttaattttatggtctcatagtttgcagattctcgtatttcagaagctactgtatttcaacatcaaagtttgtacctttctatgatgcatttaccattttggctttgaagaagatatatctgaattttgattgaaatgtttacgtttttttgttaaatctatcagactataatgagtgattttgtttcattgtgttgcttacgttaaggtggtatagtgtcaactttcaaggaagatggctagtggtagcctgaagagccttatatcttcagcagtgggtcgaggtgtgaccgaagcaagagcaaggattttcggacatatgcttaacccaacgggacagagatctcctcataagatattaaggaagaagcttattggtgataaggttgcagaatggtatccatacgacatcaagaatgaggatcccaatgtcttggctagagaagaaaaagagtactttcctaaacctctcttttcttgtttactttccaattgattgctttgtttatcatagaaaactctttgagtgggattgagctggaacatgtttccacaagctttttagttcaattgctatttgggggttagtatccaaaatcctagacatgagaaagaaactagatgtagattgtatgagccttcttgtgatttgtggagcttacgcagagtcatgttctttggtttctggtgtaaaatgcaacatagtcacgaactaatcttatttggcaaggatagtactgtctttgaaattcacttacacttggttttatattcactgcttatgttatcattgttttctctctgttgagaggcattttaacttaagtttgggtgttgttgttgtaggcggatatcgaagcttgagatgttgaaacgtcgtgacaaaggaccaccaaagaagggtcatggaaaacgtgctgcgaagcgtaacaagtagaagtaataaccatagctacaaaaaattctctgcactcttagagtcaaactcttctggttgaatcagatagaacttataagtgaaaatttctcctacttaaaactgaattggtttccaatgatgttactatgttgagacatagttgaaagctatttgcttcccttttgactaaaaatgtcaatggcttttgtttctcttctcttactcttttagtctttagagttttttgagattaatattggtgagatgtttgtacttttttgatctagtttttcttatctcgtgatagatttcaaatcctctttgtcagtctttgatgttggattgaaagtgaatttatagatttttaccttttcgaatttaaatattaaggtgactaaatactgaagtggtaggtcggccattctaattctgagtactagttcaactattctgaggtggtaggtcgaccattctaatactgaaatggaacgtgtcacttgttacttgttcttattgagaattgattttttacagggatcctaattaccacggatttacttgaatgagtttagtccatcaaaaagttgaaaaagaaccaaatattaaaagatggttggtgtaacctgtctgcttatataatccacgtgtgaaaaatgcataaaactcaaacgacaacattttgaaaacgatggcaaattcttgaatgattcttctttttatgttccctttttactaaagctaaaaggattcattagcaagtgtttgtgaaagggagagagaa

SEQ ID NO: 1599 - DNA, 3000 bp, Unknown
  misc_feature (1)..( 3000): cDNA_ID_2141421_gDNA_ID_1620422_Annot_ID_156621 3000 nt of promoter + ATG
tttcatgctaagatagctattgtgctgcgggaaaatgcagaatcgaagaattggccacggctttcttttatttcctttacttttagaaagcagaagataaataaaatagcctagattgaggaaattaccaaatcaatgtggataatggttgacttcttggccatttcagctgtattctggcctgaatctgcccatttaagtccattggaagagccatgaaatcttttacggtacctgttcctccatgttccaataaaatgcagccttgaattctgcagaacaaaaaaaatacatatagagaaagcatcttcagaatcttcattggaacaatactatccatccaattatttgtagttatataaactggcaatgagactcttactttcagctgaaaggacttttaatacaggcgtactatctcaggcagagatcattgtttatttttcagaagaaaccagcagataatgaatctattgtaagttgtaccttaaagtagttttctacaaaattagggtcctcgagagttgaatgacgccttgtagaagatccagcagcagttgcaattgatttgccaccattcttcccatttgcatgaacggacttgttgtctgaagtggaatgaagattagtagtggattgaagttcactactaacttctttttcttctatgtcataattaccaagtccttctgcattcatttcagaagatttcagatcaccagttcctgtttgttctgtcagttctggagtagtgttctcgatataaacgccatcaatttcatcatcgatgtggtcccttgcttcctctgaatcatctgctctaattgaacttccttcttcagcttcactgtatccagtatcaggctgaaaagatgtaaccggcgaagccatctgaggggtcaaatggcttctgggtgcaaaaaaggcagacaactttggctgggtatcatttagttgatctagctggtaaggaacccctgtgatgcgatggcattgaatcagatgattaaatagattgtgtgcaagataaatgaatgcatacgaagttgacagtagacaatgatcaaatccaaacatttatacttatgtctacatgatttaactgaaactaaatcatcttgtatagacttacagcccagaagtctgttggcagagatagagtccactatccatgtaggtttcacaacaggtaatcctctgctgaatgtcctgattggaaacaaaaatccattataagacacgaacttgcaagaaattagcgaagaattttaaagaaacaactaacctaagattcttgactttactatctggaaggttgctgcaaatgatatgtgtaacagaacgcctagaaaagtagttctcaaatcttccaccatacttcatcatgtatcctttcaactcctacacagatctagacactgttaaatcacatataacccaccagcaaaactgcactacaacaaattctaaggtttattcacctgcaacagtttgtacgatataagagttaagccatttcaaatcaggaaagaactagaaaccaacaaaattgaaaatgggtagaaaccaaagcaatagagcttaaacctgatgagaaggaatagtgaacccatccacaaagattgaaaccccttggaaaataagtttctcagaacccgaaacaccacgagaagcagcagaagcctcagtctcaaattggttctgaagtttcctatttttcacttccatgtaactaacatcaaaaacataaaaaaaataatcaacaaccacgatagtataacaatgcttaacgcatcttacttcattctaacttcataaaatttccaaaattcaatctttctcagaacatcacttttcagagggaaagtttcaacttttacatgggaatttcaaaatctaaccactacccaacactaaaatggcagagaatgatagaaagaccttccgaaatcggagaaaggagaagaccggaaagaagaacgagaagaagcagcgccccatgccgcgcctagggttttctgattgctcggattattattcttcttagacttcttgttacttccactgccactattgtttgaagaatttgaacccaagctacgcttcattgttgttgttggggaggaatctcaacgagacggagaagaagaagcattcaacgaaattttccaatttgtaaagtcacaacctgtgagtggtttatatactaaaacacaaacattttcagattagtacttaaacttgtatatacttccaaaaatccccataagttttaatttttacagttataatttaatacctaatttttttattttatttttgtaatcataaacataattgagagaaaattgtttttcttgaatccaaatctttagttagtgaagattatctagccaaatttaatgagcaataaaaatcgacatttcacaataatagtgaaattaataatagtagtgaacaaatagtaatggatgaaaaaaacatgacccatattatttttatgattgttttatataaataaaaataaactcaataaaaattttatgtaatgaataaatattaaatattttatctatactttttgtttatctaccgaacgatcaaccataattcgaaagatgcagcttgatgtccataattttgttaccacactaaatctctaaaaacaacaatgtcaatcttcaacctatttttacaaataatttgacacggcaaatttggagaaatatttagggtttgagatcattacaatgaatttcatgttttgttgtcaaattacttgtgttctaaacgggttattttgcaaagtttagtttctttgagggttcgttttgaaactttctcattttattaatctgtctcgctttttctcctaattattattttcgcgcgctattcatcagtcatcatccccaagaaacccctctttcggtggtaaaaactctctctctctctctctctctccctctgatttctgcggagatttctgaaatagaaatg

SEQ ID NO: 1600 - DNA, 3000 bp, Unknown
  misc_feature (1)..( 3000): cDNA_ID_3409564_gDNA_ID_1620422_Annot_ID_156620 3000 nt of promoter + ATG
tcagctttccgaggaactaagcgagcgcctcggttctgacttggagcagaataagcggattgcaagcacccttacccttcatgctagcgctttcagagtacctacttctcttgttatatatcatttttctctgcgaagactacgacttaaaacatatttttcctgaaaaatattgcagtcaaaggattcagattctcataagaaatttccttcaaaatcatgtcctatgagatatggagtaaccaagatccaagaagatgcctttaacttgttccaagctgccttacgtgagtacatgggatccttcgggatcaaacctcaaggaaataagctagagacatggaggataacaggtctttctgtttcagcgagtaaaattgttgatataccatctgtaagttcttagagccattaaatgtcttctacttacttatctctttcaaacattggttggtttcttcactgatttggtaggagtgatatcttattactgtagggaacaagctcgatcatgagatattttcaaagtcaacctactgttccttctcgttcagcagatggttgtgttcaaggaaatgtagcgatgactgcttcaggtattctagagtatttctgtatattttcagaactttctacttctcttgattctggtacttaatgtcgtgatctaatctgcaactggtgcagctagcgaaggatgttcagaacagaggtcaacagaaactcaagcagcaatgcctgaagtagacaccggtgtaacttatactttgcctaattttgaaaaccaagataaagacattgatctagtctccgaaaaggtatcagctctcatttccctttactctaaagcatattttaggcctttcttagaggtgtgatctagcaaaaaggctaaacatatttaggctcaattacgttctcagtttcaactttcaaaggagcttctttagtaattataactggtaacgaagtgattggttaggccctgtagtgtttgaatgactcaagagcttatatatatgttcttaaattgtgtatccttgaagaaccaattccacacattccttgtcaggatgttgtctcttgtccatcaaacgaagcaacggatgtttctacccaatcagaatcaaacaaaggcacacagacaaagaaaattgggcggaagatgaacaactcgaaagaaaagaatcgggtacgcaatatattgctttgtttggtgcacgaaaagcttctacctttactgagatttgtttgcttgtttgttctcagggaatgccttcaattgtcgatatctttaagaattacaatgcaacacctccatcaaaacaagagactcaagaagattccacagtgtcatcagccagtaaaagagcaaagttaagtagcagcagccataatagtcaagtgaatcaagaggtagaagagagtagagaaacagattggggatataagactgatgaaatcgatcagtcagttttcgatgaattaccggttgagattcaacgagaactcaggagtttcctacgcaccaataagcagtttaacaccggtaaaagcaaaggtgatggttctacttcaagcattgctcattattttccaccattgaatagatagatctaagctcctttgtctctgttgttgactgtatatagtgtagtccttgtctaccttagatttggtcttgtatcttgagtactacagatatattatgcttaaatcctattaaaaatgtcatttttgagcaatagaaaaactaaatatatatatatcgtctttaaaatccatcgagacctcttgttttttatggtatgcacagtgatagaagggtttttttttttttttggtaaacatgtgaagaagtgatagaaggtttatcagaagtttgtatatctttgctcaaccacggaatctcatgaaatattcaaacatcctacctaattgctctagtttctctagtatgagttctttttggatcaattctatatcaaacgattacattttattttcaaaagtcaaatcaatcgaaatgttaattacaacttcgcctaaatatgacttttttcttaactaacttatttttcatcctactttctagaatagaattctctaatattaattgacctaacataagttttttttttggtaaggaggatttttttttttggtaaggttgaactaccataagtttgtttgctatcaaaacatttttacttcattttgagcgtaaaaacggtaaaaaagaaaacacaaaattcgaaaacctgaaaccgtttttggggttaggacaatactgcaggccactgtcatgccatccaatgggtttactttttattattgttcctcctgtgtgtaaaataccctaaataccctcgaacttgctctccaaaattgcaattaatttacctttaaaagcttaattaagagtgtccgatttctcaagaaatctatctaacaccaagattataatttctattagctgcctaaaatttgtctgtgtgcgcaataatccacacgtacacacgcatctactgtattcgatttcgtctctatatataaaaacacaaagacagtcttcttcgtgatctctcattttactgttgtcttaaagcaaacacaagataagaagaaacaaacaatggcgatttctttcatttagatattttcctcgattcttagcttctgggtacttcaaatctctctctctccttcacgggttcttccaaatttccatactttttaccttgtttcctgcgaaaaaaagctatcttttttttatttgtgaccctacattgatatatgactcaactgctgaaaaattgatactttgcctagattccatcatttattgtttcttgggttaatcaatcaccactttttagcaaaaaccctgaaatcgaatcagttttttctctgtaaatttcatttcttttctgcagaaattagcctatttgagctcagtttcgtgtatttgtgcagattttggtgaaaggatttgaaatg

SEQ ID NO: 1601 - DNA, 3000 bp, Unknown
  misc_feature (1)..( 3000): cDNA_ID_2141417_gDNA_ID_1620422_Annot_ID_156617 3000 nt of promoter + ATG
taaaatcttgaatataaagtatatattttagtcaaagaaaaaaaaatattctccggaaatgactaatttgccaaacaaattctttagatttttaaagaatctccaagttgtcagtactaatatttaaaacgctgtcaatgtactacaataaaagaataaaagaatattatgaaaatatgttaattagttttgagaaataactttttagtaaatatatgtttgtcattttcttaaaaattattagtctatatatattggcttagcgatgcttagtttgagtataaatcccaaaaaaacattaagtattttcatttgaaaaaccgatttatttcaaatatgtaaaattgtggaacgttttgcttcattgataagttttagaacatttagatatacacgttgaaagtagtcaaagggcccaatgctttgagatagattgattacctatagttttatatgtgggtaagtttggtcagtaggagccaaaagaagaaagaagatgaattgttagcaattgggtttcattaataggcacaaccacaagctaataagacgattaattaactatgcaaattgagactgatcatatttcaggaataacatcacatttatacaaaaggagaatgtttttccataagataagacttgtacactttaacatttcacacaaataaaccataatgaatacgacgtatcaccatcttcacatcaattgatacttaaattaatcgattttagactaacgggtaatacgatttcttactagaaaattgactcgtatatataactaaaatattgttaaagaagacattttgttttttaatcaagaagccttggactttaacaaggattcattagtttttggatcgtagataagaagaagttaaactagtctaatctactcttaaaagttaaaatcgaactcgtgatcttgaggagctctaagatgaacataaataccagtgtaccacatgtcctgtctaattataaacaaaacagataaaataaaataatgtaagctcttttaaatgtctccgatctatttcgaaaagaaattatatgcatccagtaaaaatataactctagatccgctcatgattacatcaactgttaaactatgatcaagaattcaaaatattctgtatttatcatttaagtaaaaggaaaataaaagcatttgtaatccattgttgtctctttcatggtagtatatagatggtagagtcaattgaatttctatagagtgtatgaacacggtgtgattcaacttcagcagctagaatacttcggcctttgtttcaaagatgacatctacaaaatcttttatttattaatcgggaaaatatcaaagagaatcaaattagaactaaccaatatgttgccgagtttggggtgatgacaaaaaatatggatgagagaatgcctttgacctagcaattatttatagggatgattgagcaattttctttttaaagataatataaatttaaaagataggttacatgtaaatttgaggaaatataagagcattttgtttagattttagggttcaacattttaaaatctattctttatatgttggactattttgtcaatctaaaaaatttagactccttgcttaatttgctatgaaatttaccctctttaaagtttatcaaatatgataaatatttagcttatcatatatactcaacaatatatatgtaatatttaacatattaattccacccatatatttgtgtgtgaaattttctataaatctaaaaacagaaatacaactgccctcttttttgatgaaaggacttaagtaatgagaaactaacacacttcacaacaaaagcagaaattaaagaaatgtcattcaaccaagtcatcgtctctcatctcaaccactctctttgcttggccaaggtcaaagccatatcaatttatatatgtaaaccattatcatataacttatttatctcattgtcataaatctcttttctcattaccattacttacacgacttagactctcatcaaactgaacttctgtaaacaaatagagagacaagggttgaaaaaaggacaaattgaaagactgcacaatatttttactgtatttcaagtttcaaccaataaaatttatggattggaggcaaattcatcgaatctacaagatcacaaaattcacaaatttttattgaatgaaataaaaaatcattaaactattttaagaaattgatcacttaacatacaaaatacataaattgttatttcgaaaacctataggcttcataaaatatcgcaaagtagcatataacccattccgagttccgcatattatcttggtataagtaaatcaaccgatgcgatatcgacccatcaaaaaaggttttaaaatccatatttcgatcattagcaacggcttaaaaaaatatttgtttaggtctctggttcgaaagagattattaggaagaatctaaactttttttacaaaactaaaatccaaaacaatttaagtactagtactagaaaagaacataaatacacattggcatagccgcaacataaatggacacttgcaattgcattttccaatgtctcttctctgaccctctttgaccttcttcttctctttctcattactctccttctcaatgaaagatccgaaaacagaagagatatatatataaaaaaaaacactctatatatagttctagcctttatagccgatcccaaaactttatcctctgcatttacttctcctcctacttaccacatcaaacccaaacacacatacttagacgcgtatacagaacagagatacagagatagtccccatgcaccgttcttataaccaatcgtcttacttcatccaaaaccaaacagttgtcttaaattctctatgtttccaacattagtcgtctcactaccacaagaactcgaagaagcttctttcattcactattactctcacagatctcttgtttcttgaagaagaagaagaagaaaaaaaatg

SEQ ID NO: 1602 - DNA, 3000 bp, Unknown
  misc_feature (1)..( 3000): cDNA_ID_3063323_gDNA_ID_1620423_Annot_ID_156643 3000 nt of promoter + ATG
tattaatcaagttgtcattgtattatgctatttcgctaattataaggtttgacatctgtataggagactttgacatttgggattcaaagtttaggaaataaaagtatttagacgcgctttggtgtttattattctaagattaagataacttgtagaaataaatattctaattaacatccgagttttatagcaactagggcatatccgcataatatatatatgtgtgtgtgtagagaggataaggtttaatgaggtcaacgtctctaagtctatgctaattattatctaatttatcttgtgcaacttccatttgataaggttaattggtttaatatagttttgagtaatatattgtcggttgtctcccctcttctcaccaaaaaaaaaggttaattggttaaccatagttttaagtcttaaaacaaacgaaaacttctgtacagatcaattccctaccaaaaaaaagaaagcaacaagaaaacaacatgcatagatcaaataatgtgaatataaacattcaagtggtgcttcaagtgatgatgtagtgagtattctatataaactacatgcaagcatcattatttatttatatttttcttaaaactgtatccagttcaatcaagggaaattaagaaatgctaatatatatgcaagatctaaatttcaaatatggttggaaatttgatcatgtattggaatattattaaaaactttgacggtttaaagatagtgtcatccccgttagaaaagtttcaaatctatgcagtttcaggtatatatctttaaaagtcgaaaaattctttttctgatttcgttatacaagagtctccaagtttatcatcatttattactaatttagatattgaagatgctgcacaaaaagtaaaaaaaattgattaatacttaagggtttttgtcacttaaatctcttagttaagggttttttcattaataatatagctgagggctttaaaatggatttatcgatacttgaggggtttttttcgtttaaatctcaaaaacttgtttttttcttttttttttggtaaaacaatctcaaaaacttaataccaaatcttattaataatcaggttacaacttaaaagacttttgtttataagactttgaagaataatttgtttctatagataaaaactgaaaggtgtttgttcaaaaaaaaaaatgaaataaggtgatttaaagattttcttattaataaataatttaagcaatttataactaaaagatatacatatgtagaaagagtttggattgattcgaggcatataagaatttaattgatttggtcatctttaagatcataagtattaataaggaatccaaaagtgatttaagattttgttagaaaagcaagataggcatcatgagttagtatatatataatatagaactttttgatatttttaatcaaattatattatatatttattagttcctcgaattaaatattttaaataaaatgtgggcatcaatagtaatttttgaaatctaaagttttaaacatgtaattgtttgcacttattagatgtatattactatttataccaatatataacagattttaataactaaaaaattataattttaaaacaaaaacaaacgtaatatgttactaaattttactttataacaaaataaaacgtttaactgaaaattaactctttatataacatatttatctacagagtctataaatatgactaaatattgctttaatactccagagcaaaacaaaagaaaaacgattcacaataatatttaatatattttctttgtgatattggttaatttctaccaagaaatgaagttgcctattatattcttaactctattaatttttgtttcttcatgtaagtttaaattatttaattaggataatgtgtcagtattataatcattacaaaaactgtttaagaatttgatatatcttttgaaaatttgataggtacatcagtacttataaatggatctagtgatgaagagagaacatattctttcagtccaagagcaagtccttttgatccacgctcactgaaccaagaacttaaaattgggagaattggttactgttttgattgcgcaagagcttgtatgagacggggtaagtatattcgtacatgtagttttgaaagaaaactttgtcgttacagtattagtgatattaaataaggtattgtaattttgttaaacattaataaaaaacaaattatattactgcttaatgttcatccatgcccttctttttacaataatgaacatgtataataatctaaaaattttatagtgtgcacttaacataaaatttatctggaaacataagtcattgaaaaattaaaaaaatgttgaagatgacataattggcgcggatcctcatttgtaatgaccagttagagtaaaagaatccaaacctaaaatacaaatcaataatcaaatattggatgttatacaagctatggagcaattaaagaaggcaacacgaataaaatatttgggtcgaatccagtcctttggattgagaaaactgaagcgaattaaccgaaaactcagaaatctaaaaacattaactgaatttcaacaaaaaaaaaaaaagaaaaaggtgttggtagattttatttttatttaaaaatagcagatatccgaaccaaataattttttatcataatttcggtaagatttttgaaaaagcaaaaaaatcgattaaccaaattcgcttacctaattttaaggtttgcaaaaggaaatactctaaatatcctgcaaagaggcaaaattttacacataaatttggtaaattaacggcgagatttacagtaatttcggctccaaaaaacaccccgccaattttattaccaaacccattcacttcaattcgcgccaaaactagaatcccaaaagaccaattcctatttaaaacccctacgccccccactctcatcctccattttcgcctctctcttccctctcctcctttcttcccaa

SEQ ID NO: 1603 - DNA, 3000 bp, Unknown
  misc_feature (1)..( 3000): cDNA_ID_2141345_gDNA_ID_1620423_Annot_ID_156649 3000 nt of promoter + ATG
tggtggatcttgatttacaatcttgaattctgatagcttcacttttcgttttttagctatcgtgttagcagattcctgaattttcttgatcacggtgtttcttctcgcttcatcgatatcccttgtatctttgaaagaacacaagaaaaagaacttagtccaacgatcaaaccaaaaaaaaataggactactctcagcttcctcaagagctcagataaagcacgttatatttaccagactttctctattagtatgtgtaatgaaacataaggaattaccgatttcaagatgggatttgcttggaatgctgttgattgccccaggatgtagctccagaataccttaaaccacaatgattcattctgtgaatacgttctattgagagtaagttctttagaaattagtgaggcaaaacttaccaacagttccaacagtatctattgactccgactctaatacatgtttctccacggcaagagccaactctgcagctgcaagcccggcatcatttctaagaaatagtcattatacagtgatcagtatactagtgcctagtggttaaacagatggttcagttgcataatatagctcacctatatggcataagtacagcaccagcatgacctccattgccttcaaattccaccttcaaacttgctggagcagcaatggcggttacaacaccgatatctaaacctgtggtcaaaaatgatcttattaactataatgaaagagagaaaaaacacaaaattcttccacgcagaaaaggtaagttaaccggaccttcgtcttcaagtataggtccctgttcaatatgcaactctagaaaagcaaaataacttcctttcttcaagaacacactcgataagtcgtcatctttgtcttctgcgtatcctgctgatctagctgcttctataaaagacacattttggccatcaacaactgtagtctttagtgcttctgcaagttctttgcttccagcaagcaagcggctgtatcaacaacatgtacaagtaagacaaaaagaaacagaacaaggattttttctctgttcataaagataaacacaaagggtaccttcctaaacaactgatcccaaatcgggtcggttcttcagatgtgaacaagattatctccagagacctcttcggtttaaaccccgaccttaagaaaacaaaagaaatatccaccaaaaaccatcaggaaacacaatcttagactttactttccattatccaaagatccttcataccttttcaaaacattgatagcttcaatcgcacctaaaacaccgacaacaccatcatatttcccggaatatggaatagcatcgatgtgagaaccagtggctacagcaggcagatttggctctaaaccatccctaagttagagaagtcaaaacaacacacctcacatggataacataatcaaacctatcttcttaacgaaacaattagcaacagagagcgagaaccaaaccatttgccaaatatgttaccaacagcatcttctctaacagtaagaccagcaagtgccatcaaattcttcacatacctaacaaaaccaatcaacttagcttcacaaaatctaatctttatgattactcaatcaagtaaacagattcaaattaccttcgagccgagacatctttgtcagtataaagaactctggtgactgatggagaaggagcatcagagaaactagatagctcatctatctaaaaccaaaaacaaaagaacttcatccatcaaaatcaaagttctaaactttagttatctactgttccactttaagaaattgaacctggttttgcagtcctggagcatcaacggagagtgaagaagcgagattgatggaaccgaattgacccggttcgtgaattgggtatccggaaaaatcttccattgttctgattgattcatgttgttgttgttgagctaagcttgaaggtagaagaagggagataagaagaagcgcaatagagcagaggaaacgtttcaaagattccatttttatttttttctccttcagtgttttgattctgagagagcaatactattcattcataatttggtaattatactttggggaaacttattaattaaattttgagcgttatcattgtccaaatttgttttttggggaatcctcaaaactaagtgggaatctgacagagtgttttgttgtactctattgattctgatctcatctcatatgtaaaatactactatttttataaaaaaaatgaattaaagtttatatgttttggaatctttgtattttgtatcattagagagttagaaggaaaaaaatccatcatttatttcatagaggcccgtttcatcatctgaaaagcccaattcgttggatcaattgttaatcatatcttacttattgcatagagcctacatacaaaatattttgttcctgattgttttaagaaaaaacatatctttcataaaagtatcatatgctgtttttataaactaaaaaatatgatacactagctttataagtcatataactcgtctgcaaatttttctacatgtatttgcaattttgcatccaccatttgaaattagtcatactataatgatatgtcattttcaatagattcttcaaaagatttagataaacattaaagtaatcttttattttaaaatatagatttatatctcgacttcgtctcaagaactagttgttccaaggttattataataattaataacaaagaaaaggtccaaactaaaatcacggttagcacgaatgtattaagaaagagtcttatcgatcccaaaatttgtcgtttcgaatctcccactcatttagttgtgcatttttataatatacacacacatgtgtatataagacgaaaatgtatagaattattgcattgatcttcttcttttttttttggtttctaaaccaatttttagatttaaacttttacaactcaaaagaaaaacgagtcattaactaagtatggtccagtggttgatg

SEQ ID NO: 1604 - DNA, 3000 bp, Unknown
  misc_feature (1)..( 3000): cDNA_ID_3063311_gDNA_ID_1620423_Annot_ID_156651 3000 nt of promoter + ATG
ataaaaaaccaatttattaagaaaaaactaccgttgtaaattagtgagagaggagaaaacaaaaaacagtctccaagctacttggcctaataaaagagcatatctttagaagaaacatgcatgaggccgtaactaaaagaaagttcagaagagaacttctccctcttaatcatctctcatctttttctcattctctcttctctctctgtctttctgagccaaaagttcaggtgaatgatgcctggctcgagaccattcaatctcatgatctcatgattataacgatgatgatgatgatgtcggaccaggcttcattcccctcaacttacacgttttgcttctcaatcttcaagaccaatcgttagccgatcacctaattctctagtaagccaagaaagatgaacataaatggtgtatccgtgtatatcatctttttttgtatgtatgcgtctttcatcatcaatccgcagcaatgtatataatatggtgtatatcaaaaacacattaggcatatctattaaaattgtttccttaatatatctgttaaaccttgctgattaagagaaataatataatcgaaatttcttttgacatgcatgcatatatataagagtaacagatcaccgagtaaagttgaggggaaggaagcctggtttaaaatgttatcaaatgctatattttctgaagaatgtaaagcatgaaaaaaaaaacaagaattgatgatgcagcttgaagctgagttggtcaattttgtatatatattataggatcaataggtaatcaaaacttcaatactattgttttcttaatttgttttaacatcgtactttataatatggacttaattttaggtctaaattaattgtaggaagaaaggtatcgtatcgaaattaaagtcagctttaattagtgaagggcgtctctttttatctttaccaatttcgttgaaatatcttgttgtaatcagtgtggaaattggctaaaaataactgtttttcctttctttctttttgactatttagctttcaacatttcgtatgtattatttccacttgtttctagttgattaatcaagaattatcctcataagattaattaatgtagtctatttactgaggaaatagttaaacttttcaaagatatatcttacggtttaatatgatatgtaatgtaaatactatatagctaaaaaagtcttatataaaaaatggtcgatcaaatttgtaatcatcagaagagaaaataatcactgaaatttgatttttcgtgagaatgtgaaaaacgttgttaaactgaaatgtgacgagacaaacaaattcattacacatgataaatacaatttaaatatgcaataattagtgtatttatggttaaattatagagccaaacaaaaaggccgtaacatatattatggatgcctgcataattatttctaaataaatactttcactttccttttcttacttgaccgcataattattatattttcttttgctttctctatggagcaaaagatatgcaatgtgttcatagatatactccatgctttggaagagcttagtatacaaattgtttagaaatcgaaactgtgttttttttttaataatgtatctttctcgaactaggttactaacctcgcgcttagtgttcaaaattcatatattcaataaatctataaaaaattattttccttatatatataatatttgaattgatattgtaagaagaaaaaatgaccatccacaaatgcatgccgccgcaaacactatgggaaaagaaattttgaaatatagcgatttaaagtggtctgaaatggtttatagcgatttgagtgatagtatgttgttaaacgctaatctgcaaccacccacaaatgtaatgtttttgagtagttgcatagaaccaatgtaccctttaatgacatttctctagtttcactaattatattattattgttattcaactagcattcactacttataaatctagtttctttcttcatcttgaataccagatgatcacaaatgtttttttattacaatatattaaccttgttggttgttcatcaaaaaggtcgtttccatttgcacaatagcattatgttactatgttacaattagaagttttgaatataaaacatgacctgaaaagaagtaacataatcaatcagtctccaccatgaaaacataaaaagcttgatagatttattgttcaaacatggatagagttctaatcaaaaacagcaatgttgtcaaaaaacaatcaggtcttctgatgaaaatgagggagactgattcgccggaaattggtcatcacccaccaaagactcattgatatcacattcttggttcatgatattggtcatttgattttgctatatttgggatgtagcttttgtaatactgtctaaagcaagactggatgagtactcttaatgctgtagacatattttgctgttgagtacaaaataactttgatgagtacaaaataattttgggctgtggaaagactttacagcaacaaccaatcatcccttttgttgttgttttttagatctcctgttattcaactaataatttctaattaaatatctttctaaatcctatgttattaaacatgaaatttatttaaagtcattcaaaaccatttataatctcttgtaattcaattaaacatttataaaagtcatactacataaacaagaaattgaaaaatctgtcacaatctcaaaataaatgatataaagataagataataaactaattgcggttatattaacgttagtcttgtcattattacaacaatcctataaggatatatgcgttatagcattactataaaagatttatttttccaaactattgaaacacagaacaaaaacatctatagaaatataagtctcattcctcttcttcaccttgtctttaagagacaagcccagtttttttcatctcctccctcaccaacaccaaacacaacctctaagacaaggtgaagaag

SEQ ID NO: 1605 - DNA, 1810 bp, Unknown
  misc_feature (1)..( 1810): cDNA_ID_2141382_gDNA_ID_1620423_Annot_ID_156658 3000 nt of promoter + ATG
cttgcctcaggatttcagatcacaactaaaacaccttttcttctgcatttccatttgcagctctttgttcagagagatgcaaacttatgacaacgaattccgagactggtgcggtcaatgcgcccgtgaaaagaaagaaaagaaaagccagagtcttgcttccaaaagaaaggttaagaaaagaaaaaaggacatgattttgctcaagtttataagatgttttgtttgagcatggttatgaacctgtgggggtccttattgcaggagatgattaggataatagagtgaagccgaagcccgctgaaaaaaatgaagtctatgctttgaattttgactctttacttggaaaataacactgagtatatgtagaatcatttgatgtaaataggtctttgtgtcttcgaatttcttacattactactatgtacatgaaagttaccagttacatgtttaggatcggctatatgtttacagtttactcgccgtatcgaagcagtgttcagtgtcagctgaaaaagagtacatatagccggtccattcggttagactcatgaaaaccggtttagtaatcatatgtttacagtgtcagctttttttttgaaatgtatgatttggttaaccggttttaaaattgtgaaccaattcaattgtgcaattccgaacactagcgattcgaagtagagaaagtaacattgtaccaagctaaaccaacggcgatgaatgctagaaccgcgatgtgatgtgtgattaaagagaaggttaggaggaagtagaggatgataaattgattcggaaatgtgtgaggttttgtgtgacgcgtgtggtggcgtcggcgatggactagcggcgctggtgattggttgtgcggtttctttaacgccggagattacttgattcgccaccattgttgctctggattctagaaacttctgaaaatcctaaattcgttgggaaaagaggagaaagtcaaactgattcatgagaagttaagaaagcccaagcccattaaattgagtatcacttaattcgttatttatactaaaaaagatcgttttctagaatcgaagttggtagtgtaaaagaaaaagaagttgaagaagcaagaattttccatcgaagtggtcaattatccgagtgtagtaaagataaaatctcttatcagaaaataaaataatcgaagttggtcaatatttttagtcaagtcattcacacgaggaaatttcccacccaagagttaggatacgtggaaagaaaatctcaatgactaatgtgttacaataattagacgaagaataaactaatgccacacacacacacgcacaaattccacttgtgatgactgatgaacttaattattattattaaaccctaaggtttgataaaacggtatagggccggctcttttcttttctccacggtgttgtgttttttgaactcacaaaggagattttgtactttaacttcaaaaagaaaattggttaatttgaaaacaaacaaacaaatagttatagcttttacgcgtcacgtaatgtctaaattttgttgccaagacacgtcacttgactttctctagagttcacctttgatacatcatttgactgtctctggttttctcctatatacgtcacttcatctaaccaagaagctgagaaaactattcattgaccacgttctcaatatgtttcacgtgtgttaaatcaacaaaaccacacgtgattaaatcataataggtatatagacacaccacacaaaagacaacatcaaaaatcacacaaatcaagattgtcaaacacactaagagagaaagatg

SEQ ID NO: 1606 - DNA, 3000 bp, Unknown
  misc_feature (1)..( 3000): cDNA_ID_3063303_gDNA_ID_1620423_Annot_ID_156657 3000 nt of promoter + ATG
gtagaagagatactctctagggttccattaacatctctaagcgcggtgcgatctacttgtaaaacgtggaacgctgtaggattaacatctctgtagacttatattggtatatggtttatgcgtaagatttctcttttaaaccttttaaaagaagaatcttttattttgttaggtaacccctcgtcggccctttaagtttcttacaccacgtgatcggttatcctatgtatatactacgttcgtgaatgacctattgggtatccaatgcaaatcacaaggttagactaatactgtttggccccatttttaatgactctctaaagcacaagcttcacagttgcaactctatcaattatagtgatactttacttagggttgaagtcttgaagaggctgaagtagagctacatgtgtccacaatcaccgagaggtaacataaaccatagagtcgcacctgtgaatctacatgtgcccacaatcttttttcagcaatcttaaaacttctttcacactgccatatatatattctataataaccaatatgaaatcccgaaacaaatcaggaactaatggagacccaaaagccaaggtgactaggattctattacgtagttgacataaacaagaggtcggtataatacccataaccaaaccattaactatttgggacctattgctagctgttttcaatcaagcagctttcaactttaagtttataaattcttcaccaagttaatacaacctcttatttttatttatttctgagaatattaaatgggctacaagaaagatttgtgacttgtgagtgatagatttttttttagaaaatgaagacaaactttgagacaaggtctttatgatgaaagaaactttattagtccgtgatgtttcaaccccaactgtttcattgttttctttttttttcccttcttcttcttctttattttttggatcataagaaattaaggaatctattgcataaggttggcatgttgtagatatataaattaattagtctccatatatatatatatatatctaggttatatcttcaaatttgttgttgcagacgaaaaatacctacaacattcaaaacttcagttaattgtttaagaaaaacacagatatgaccaaaaaaataaatatagagataattaatagaataatcttatctacatatatatttattaaaataatcgttatagaaatgttcttttgttcaattacaaaaagaagaaaaatatttatttcgttttataaattaaaatatttattaatattctctaaatctcgcatggttattgaactacaactgtaaaatacaattacaaaaagaagtaaaatcttttgacgaccacctacaaaatgatacgacggagacacacaaagcgagttcaactattaacattaagctcagattattgaaccaaactagaataactcaaataagatatgttttcgattcggcaataaaatttgattcgagatattttagaccaactaatttactatccgacaactgagtttggggtaaaaacccgtaatttattaaaaacattgaaataaataaaatcatttgatatttctattttctcattgttcattaattgtaacatgaaagctcataatcttcattttatagactcaaatcaaatgctctttcaaactaacccaacaatgtagtaaaaaaaaaaaaaaaaccaacccaaaattggaaatcataccatgttttagatagtcaaaaacaaggctaaagaacggaaaaatccaaaaaaaagaagaagttatttatgaaaaaaaaagatagaccgacgttaatggaaagaagaaaagacccaaacatgtggcctatatacccatgggacttatacatgattaagattggcatatacatcaatgtttttcttggtaaaacatatacatcaatgttatgccatcaacattaaattattttaaatagaattttttaaaatatatgatattaatttcttctaagctaagtgaaaaaaatatcaaagcagccgtacagttacagaatcaaacaagaacttgacagcgtaagaagacataactcatcatactttctttttttttcaaacaaaaactacatttacatatttacgtaattttcattattattataaaaaatttctaggctcataagatttttaggataaaagagaaatttgcaaagaagaaaactagtgtattaatttatgtatatgtttgcatttgaatgataagaaaatatctcgcatgactacaaatctttggatatcattatcttactatttatacactaacttctatatatcattttatcgttttatagccaaaatcagaaatattgcaaatcttattttttaatatggtttttaatatttgagaggcgggaaatgtatggagaagaatgtgtacacgtggcggtctggggaccttgtaacaaaaatgcaattaaaaagcttttgaagcaagttagccatagccgcttggcgctgtgtcgtcttcgtcttcttcttccttcttcttcttcatctctctctttcgttttctcagtaagtgaaggatttgcagaagtagatgattgaatatccatggaggtaatttatggtttctaatttggttttaattctttgaaagtttgatttttttatgttatgagatttctgggtttttgattctcaagtttttatggattttagggttttcagtaattgcaaaactttattctgaagattgagtgattgcttgagatataggttatcaatttcctttatccctaatattccaaatctcgaaatttcaaattacttctctaagttgttctatgagtttatgatcttagaaaataaatctagtgttttgattactctgttttgcatatttttgatgggtttgtgttacttgttttgtaagctaagtgatattcatttttgtggttgaggtcaatagtgtatggattctggttctttatgtctcagggtgattggtttcaggaggt

SEQ ID NO: 1607 - DNA, 3000 bp, Unknown
  misc_feature (1)..( 3000): cDNA_ID_3063315_gDNA_ID_1620423_Annot_ID_156645 3000 nt of promoter + ATG
acttacgaatcggctcgatggctacaaggagagaaaacgtcgtcgttgaaggaaatgaaatcgatttggagctgcgtcttggcttatgatcatcaacttcttaccctctatagatgtataataatacgtttttttggtgtatattatatggttttcgaggttgatatatgtaatctaggaaagcgtatatgagactataatatgtcaaggtaagatatttttggtgggtatttatttatgcatgttttgtgatctatctatgagatatatataaatcttttatcttatatcatattattttcattatagtttttttccataacatagtgaaatctgtcccataattaattaattgtccagatcttcgcattctatatataaaaaaatttggcaaatagaaaatctgtcccctgtaaacggattaatatgctgcacccgtggttctaggattgcggtttttaatcccaccactggcggtttggtggtattgccccatgttaaagccaacggaagagacatctacacacgtctcggatacgatcctgtcgatgatcaatacaaaattttgtgtgtgatgatgttccttaagtgtgacgacggccatagacaatacgttatagaacaagagcatctggttttatcactaacatcacactcatcgtcgtggagaaagatcgagatctcgggagatgcttactcctacttagaaggtgggatttgcatcaatagtgctatatactatggtgttggacatacaaagatagctagatttaatattagatccgagaagataatgtttattcaagcaccagaggattataatgcaatctcatgttattcaacccttacaaattacaaaggaaaattagcatgtgtaagctatgactcctattgtgaatctaagttgcgtgtatggattctacacgatgttgagaaagaagaatagtcaagcatcatgacttgtgttgtgccttgtgacaaggagctatctttgtgcagtggagagagtcataacaacgaggttgtagtggtatctagatgcttaaagtcatctaagcacttttttgtttactatttcgatatggtcagagagagtatcatcagaagaattgaggttgagattgatggaatcgccgattatgagtttagacatatcaatggaattggtaaacatgctcctaggattttgtgtttccctggtcacattgagaatcttatgtacttgtaagttctaagttctactctaccataagttcattagcttctattttcatttttagccgtttcaaatcgttttttgtagtttggttacttgttcatggactccttttagccgtttgttttctcgaacgccacaactacgtctaccattagtcatggactcatggtgatcacctaatgtaaatgaagcacgagtttaccaaattacaatgactgtaaattaatattttcattcagtttgaatggtcaacgcaaatacggcatttctttagatgggcttataacgataatgggttacgaacggcttatagcccattcaaagttcttatctttcaatttcaagtaatttgctttcaagcccttcgaatctaccaaattccaatgactgtaaattatttttttttcccctcaaaatacatatttacaaatattaatttacttatgtatacagacattaaaaggcactaaaataagctaattatcatgatataaaagtaactcaagaggaaaagtaactaagcttacatgtaattcataattaggtgacatcaaatttactattttttaattttctgctgaatttttttatttattaaatatacttattaatatcgagatgtctaataaatatgagagagtgtttaaaaaagagtttagacatcgacatgagacaaacaaaaaatgaaaaatagtggtacaaaatacagatatataacttgaaaaaataaatataatttatcaacacaaatacaagtcctaatctgttatttataaattaataatctcaaaatattactttgatataaaatcagtgttcgtgtaatctatcatttatgcgattttttaaagagataacaatttttttttctttagtgaaacattaatataccgtttatttagtatgttaagtactttaataaaactctttaacaaaacaaaacaaagttaagtattttttaatatataagatatttctctgcatgatccaggtggaatttttttaaaagttaacaatagttttttttttatagtaaaacatgaattttgtttgattattccattagataacaactatttttcttcttgacaaaaaagacaaattttttttaagtaaaacgttaatatctcgtttgttttattccgttaaataattgaaatatataaaatattttcccgcatgattcacgtggatttttttaaaaggtaacattttgttttcttaagtaaacatgaatttcgtttggttattccgttagatgcttttaatgtatacataataattatccgcttgatttatgtaattttttttaaatgtaacaattgttttctcttaagtaaaatatgtatatctcgtagatttattccgttagataattttgatatataaaatattttccgcaaaatttacatagaatattaagaaaagatcacaaaaaacagaaattttgtttgtttattccgttatatacttaatatgtaaaatattttcctcttgatatacatatttcaaaacgctaatatctcgtttggttattctgttaaatactttaatatataaaataatttttctcggatatatttttaaatatacataaaatttctcttttaagttttaagtaaaaaaataataaatctttcgtttgcctttttatgaaaatatagattaaactaattgatgacaagaaaagacattagttttcttattaccatattgatgatttcatctctttctcttgtaatacaaaatggataaaaaaagaacagagcagaaatgaaaac

SEQ ID NO: 1608 - DNA, 3000 bp, Unknown
  misc_feature (1)..( 3000): cDNA_ID_2141458_gDNA_ID_1620424_Annot_ID_156664 3000 nt of promoter + ATG
tcttattaaaggttattgtaaagaaggtaattttcatcaagctcttgtgatgcatgctgagatgttgagacatgggttgacacctagtgttattacttatacttcgttgatacatagtatgtgtaaggctgggaatatgaacagggctatggagtttcttgatcagatgcgggttagagggctttgtccgaatgagcgtacttacacgacgttggttgatgggttttctcaaaaggggtatatgaatgaagcttatcgggttttgagagagatgaatgataacgggttttctccttcggttgtgacttataatgctttgattaatggtcattgtgttactgggaaaatggaagatgcgatagcagttctcgaagatatgaaggagaaaggtttgagtccggatgtagtgagttatagcacggtattatccggcttttgtagaagttatgatgttgatgaggcgcttagagtcaagagggaaatggttgaaaaaggtatcaaacctgatacaatcacctactcatctctgatccaagggttttgtgaacagagaaggactaaggaagcgtgtgatctttacgaagaaatgctgagagttggtcttccaccagatgagtttacttacacagccttgatcaatgcttattgtatggaaggcgatttggaaaaagctctacagttgcacaatgaaatggtcgagaaaggagtattgcctgatgttgtcacttacagcgtgctgatcaacgggcttaacaaacaatctcgaacaagagaggcaaaaagacttttgctcaagctgttctacgaagaatcagtccctagcgatgtcacatatcacacactcatagaaaactgcagtaacatcgagttcaaaagcgtagtatctcttattaaaggattctgtatgaaaggaatgatgactgaagctgatcaagttttcgaatccatgcttgggaaaaaccataaacccgatggaacagcatacaacattatgattcatggtcattgcagagccggagatatccgcaaagcgtatactctatacaaagagatggtaaaatccggattccttctccatactgtgacagtgattgctctggttaaagccttgcacaaggaagggaaagttaatgaattgaatagtgtgattgtgcatgtattaagaagctgtgaattgagcgaagcagagcaagccaaagtgcttgtggagatcaatcatagagaagggaatatggatgtggttcttgatgtgcttgctgaaatggccaaagatggatttcttcccaacggcataagttaatctagtgagtaaaatcatttacatgggcaatggatcaaccatgcaccagcaacaatgatgctaatcgtgggagatttttcagaataccgcggtttcgtagctgctattcaccgtttgaagttgaaatggtacaatgttatctttgcagtttgtgtaatatatataaggcaaacaacttaattattgtaagacattgtttataatccatcatcaaagaatgaagatagagaaaccattgcaaattgaactaagagaacatcttataggttttggcttgaaggatgatctgtctcgctccacctattggtgctaacaccgcgattaggactccaactattatcgagatctgtaaatcatcaaatatgttcaagagttaactttttaattagcattatgttataacatagtcgatatatatttgtttggaagaaaaggtaggctcatttacccaagatgcaatccaatgaaagctccaacgtttttgttgtttcatgaccaaccatataatgcatggcaactgccagaaaacaaaacaaaatattattttgttatattgaaactgttctatactaacataacattcatatatatactcatgcataaacttagttttaggtataaacttacgaagtaggacgttgaggagaaaacaagaccgccgaaaaaatggaatatatactgctataaatcccaccaacgctacaaaaacaacaacacatatatatacatgtaacatgttacataaagtaaccgtaatctaattaagaacttaactacgtacgtacgttttagtaaaatacatgttttggttacataccaacgtatgaagtacgtcccacaatacgaaggcatgtggaaggagtgaacttgagattcttcaccagacacgactctattccatcaaatacgggcattgcaaatacctgtttacatcattatactacttatctctaccagtcttgcgaagtttattattcaaagagaatagttggcgttcaagaaaaaactggatttaccataatattggaatgctagaaatcagcttattcaaactaaataagaggttgtaaacgtgaggtgccagacccttgttgagagtgggattataggccaaatgcatcgaaaaccatctctactgtgatctctaaacatttgaccggaaaatgttcaggagtgacgatacaagtttaaaaacaaactgttgatatatacaagggtaactcatatttgaatttgattagattgattaaattattaaaaagagacgtacctataatgccttttttttgccaaaactttagttataataatgttctgaatttgtttttccctttaaagacattgaaatagcagtcttcaagaaaaggaatatccgtgtcgcatatttaagataacttatcatcattgtaaaaacaactttaattagatatgtatccaaataattgccgacaaattagaagaaaacaaaaggaacacgaaggacttgctttcatacactaactggtgtcactagtcgtcgaagactaacgctgtcgtaagaaaatcagttccacgtgttccgtacgctggatccgccaactgtttagatttttatttttcacgttattatataaagtcaaactctaattagagaacatgaaaccaaacttattataagaaagaaaaaaaaaacagaaacaagaacggtggaagagacaaag

SEQ ID NO: 1609 - DNA, 542 bp, Unknown
  misc_feature (1)..( 542): cDNA_ID_2141504_gDNA_ID_1620424_Annot_ID_156681 3000 nt of promoter + ATG
cccatatagattctactctagaaaaacgtttgacattagtcggtcaaagtcgtatcatcattaagtcattaaccatatagttagattttttttggtagaatgcatctataagatatcgaaacaaaggaagaaaaacgtttccatatcatattttcctaaagataaaccacatacgtaatgtaagtataacttttcctatattgttcgactcgtccgtagcctcgatttcacgaagtacgcaataaccttgaagtttgaatcttctcataagaaaaataataattttaacggcaaaattcaagattcataatatctttcttgtataaatctcctcttattcaagagacattggtcttatacctacgcatcactttctggtccaattatcgtttccctatgaacccatttcttcttctctaagaaacttcttccttcttccccaaacttactctctctatctctataaatctctctgtttctcttcatcaaattttggtatcccaaaagtactaattctgtgtgtgttaatggttctagttatg

SEQ ID NO: 1610 - DNA, 3000 bp, Unknown
  misc_feature (1)..( 3000): cDNA_ID_3063350_gDNA_ID_1620424_Annot_ID_156673 3000 nt of promoter + ATG
gttgttctatcaaatcttgatgctcccataaactctcaaacccatttgtatcttcttcttcttcttcctctgaatcagaaccagaaccagaattgtcgcttttacggttttgtcctttcttcagtgatgtttctgcgaaatctgaatctgataaaaacccatcttcgtcgttgcttgtgaatgtctgacttgaatcaacaaaatcagagtccgactccaaaaaatcttcctctgttaaaaatctgatttttttcttcttaaaggatgaaacagagtaatcctctgtttttactttatcctcgccgtgaaaaacagagtaacctaaatcctctgttttctcttgcttctccttcaaacaatcttcaaccctaaaagtcgccgcctttgggttttcgaggacaaaggtgagatttttcgccgacggtgtctcgtatttcctcgccgccgccgtaaaaatcaccggagaagaatcagaagacaaaaaactgctctcgctctccacaccgcaatcatcactcaacgatctataaccttctctgcttaatctctcgaaagtttccgtctgaaacgcgaatttaaaaaccaatttcggcgattcactaacttcttcttcatcttcgattccagaattttctaattcaatcatcttcgcttctactgattcttcgagtacagataaaaatcgagtctttgttgtgtcggtttcaacaattgtacctcttcgaacactgtgtttatatttaaagaaaagttaaaaagtttccttttaattacgcgtattttttattaacgcgtctaaaatgatatatagtatataaaaaaatatcacagaaatggaaattaaaataaagtacctggagatgaagaaagagagagcaaaaccagcatgatgatgtgagatcaaattctgaaaagtaaaaaatggaattgacgagaaatttcttaagagatgacatataaatggattagtttttgctgacgagtcgttgttaagtcggtgaagatgttattttttcaatgaaactgttattatctaggttgaaaaaaactcatgcagaagaaagtgtaaatttgcagataaagagactttttacctaaaaaccaaaagaaaaaacgtttgtgaaatcgaaagatgatgacgatgatgcatgaatgaataatactaataataataataataataataggatattgaagtgagaactaacagatgagaaatttaagggaaaggaacaagtgagcaacatgtaattgtcaacaaaaaaaaagacaaatctaaagtgttgttctttgagctaatcttatggttgctttgaaccatggatttctccactctgttattggatgccacatacccatctatcactacaagtcacttttttaaaaaaaattattcacacaatttttactttaatttttgtcgtaattgaaagtcttttatataaatcacccaatgccacaaaagtatatttttatatgaatcacccattttgacttttttcggtatttgatgtggtcattttatttatatttgatctttaataaaatcaagaacatcttgccgtgagccacctctctccgccgtgaaatttccgatttgactgtaacgatgttaccccggtttatataccttaatgtgagctctagaaatgttttcttatgtcttagagtgttaagaataggattctaggcttaggttagccttaaactcccgggaaccaccacggtcagtgaaagtcaacggcgttgactccggcactgactggaaatttggtgagttctccaggcatgaggaagcttttcagtggccattctgatctagaatcatcttacgttgagataagttgggtatggttgattcaaaccaaaagtcaactcggtttaccaaccaagtcaaagtcaacaatcttaacttttcctaaaccggtttggtttaggataagtgcctcccccgtgtggttcgacttgatgaaattaaataaaaaccggcccagttttgatttcattttggtttaacttggattgagatttcaaaaccggttcggtgtaattaagaccaagattcttttcatatcgaaaattttgaaaattggattaagccactgtttcagaccgaggctcttgactagtcacgtcatgacgtcactcaacgcattttagtcaaatccccaatttttgaaaattctcaacaaaacgcctaaaagcacttatcaaacttctccgacaaactaaagatcaaacctttacgagaaatttctcgcttttttgtgtaacgaatgtaagcaatgcatcaaggaatttgatagattgaaactttttgaagtgggtagtgatgattgaccagagaagggtaatgtgtccaaaaaaccaaggtttagcagactatgtgttgcagaagaagcaagaaaaacattgtttgtactggggatgcaacaataataatatacgagattttgggaggtgaacggagctggttctttttattaacgataacaaagatcgagagattacaacaagttagtttcgtcgcgggggttatagactatcctccgagccgagacttaatcgtaaaagcagaaagacaaagtgcagaaatgggcgaggcgacgatttcgggctaggcggcgatgtcgtgttaggcaacgatttcggacaaaacaacaattctgggcaaggcaacgatttcggacaaggcaacgattctgggcaaggcaacgattctctttgtctctcagctaatctcctctggatttctctccttcccaatagtgcttctgagtatttatagagaatctaaatcctaaaatcccttatgtctcctctgtaaattacatttttgcccttccaagcttaatgggcatttttagtagttgaagccccttttaaacttgtgcatatctgttttgggcctcttaacatataaggggcaaggcccatgtccaacaatacgcccgcccttagtttgttgtgcgagagtttgattgagctcggcgggatatg

SEQ ID NO: 1611 - DNA, 3000 bp, Unknown
  misc_feature (1)..( 3000): cDNA_ID_2990578_gDNA_ID_1620424_Annot_ID_156665 3000 nt of promoter + ATG
acttaactacgtacgtacgttttagtaaaatacatgttttggttacataccaacgtatgaagtacgtcccacaatacgaaggcatgtggaaggagtgaacttgagattcttcaccagacacgactctattccatcaaatacgggcattgcaaatacctgtttacatcattatactacttatctctaccagtcttgcgaagtttattattcaaagagaatagttggcgttcaagaaaaaactggatttaccataatattggaatgctagaaatcagcttattcaaactaaataagaggttgtaaacgtgaggtgccagacccttgttgagagtgggattataggccaaatgcatcgaaaaccatctctactgtgatctctaaacatttgaccggaaaatgttcaggagtgacgatacaagtttaaaaacaaactgttgatatatacaagggtaactcatatttgaatttgattagattgattaaattattaaaaagagacgtacctataatgccttttttttgccaaaactttagttataataatgttctgaatttgtttttccctttaaagacattgaaatagcagtcttcaagaaaaggaatatccgtgtcgcatatttaagataacttatcatcattgtaaaaacaactttaattagatatgtatccaaataattgccgacaaattagaagaaaacaaaaggaacacgaaggacttgctttcatacactaactggtgtcactagtcgtcgaagactaacgctgtcgtaagaaaatcagttccacgtgttccgtacgctggatccgccaactgtttagatttttatttttcacgttattatataaagtcaaactctaattagagaacatgaaaccaaacttattataagaaagaaaaaaaaaacagaaacaagaacggtggaagagacaaagatgtgtagttccgattctcttcagcttcacaatgtcttcgtctatggtagctttcaagatcccgacgtcatcaacgtcatgcttgatcgtactcctgagatagtctccgcaacactcccgggcttgtacgtacctttctctgtttcttcttcgattgagttatttttctgtatagacttaagatttaatggccggttttggttttgttcatcagtcaaaggtttaggcttaaaggacgtttgtatccatgtattgttccttctgagaaaggagaagttcatggcaaggtttgattcttagatgattctttggttttaatttgtgtatgaaatatgggattttagggttttgatttgggaaatttggtgaattggtttgtgtaggtactaatgggagtaacaagtgatgagcttgagaatttagatgcggttgagggaaatgaatatgagagagtgaccgtcgggattgttagggaggtaaaagtttaaaggttgatgattataaattttggaacatgttggatgattataaattctgattttgcacatgcaggacaattcggagaagatggcagtgaaaacatatatgtggatcaacaaggctgatcctgatatgtttggagaatggaatttcgaggtttgatgatttaaacaatgtatttttagcttttgtgaactcattatgactggaaaaatggtacattgtttcgattcgcttcttaggaatggaaacggttgcacaagaagaaattcatagagactttcaagaaaatcatggaatgtaagaagaaacctcagggacagggaaatgatgatattagccatgtcctacgcgaagatcaataggataagactccatcgtcttggatggacttgtgtttgagtatgttctatatataaccacctttgttaaattatcaacaacaaaaaaccttcgtttttaaaaatctaaaataaataaaacgtagagagtgttgtattgatgtaagatttttgtttttgtataaatttaaaatttatttaacaaaaaaacggttttacaataaatacatcgttactgaaacaagtataaactgaataaaagagctaacgacaacaagtgctaaaccaatatcgtagtccgccttcgtagataggtgaacttgaagtaactaaaataaactaaaatacttaaccgattccgcatattcttatcgaccattttggcaagagagagggctggaatggatgactcgccatgccttcttccatttctctctttctaaagagctgaaacacatatctgaaaacaaacatatgaatttgcgtcaaggccgaatttgtagatagatcaaaatatcatgtggattatattattatatatatgttatacttgcaagtatttagagatttttgcatcttacttagcttgtgtgtgtttggtctatttgaagtatttgcagaaattctatcccacaattttgtttgtccgcctctatccaaaactgatatgcgttcaattattctgataaaaatttagatacatacgcaattaatcatgagtatttaaatccttaaaggttccaccatctaaatgactaaaaccaattagtaatcaataccaattgggttagtgggttttgggaaaatttaaagttttgtactcaagttggtgtgtctaattatttattatttactttatgaattagcataattaagcaaagaacaaagaatattttggtcaaatatataaaaagattaacatccatctgaaaaatcttttacctatagtttttgcaacttgaatatttacctcaatagataaaaactagagttatttttttttttttttgtcggcaaaaaactagagttatttatcaaagccaagttagcaaaataatctactatgatgacaaaaatttgtaactaaagaacataattccacgtcgttcaccgtttcgtgttcctacgtgttattcttttttttggtcacgttataaaacctcaaaaagctctagaggatcagagaaaataacataaccaatcccaagaagaaaaaaaaaacagagtagagattgataaaaaaaaa

SEQ ID NO: 1612 - DNA, 3000 bp, Unknown
  misc_feature (1)..( 3000): cDNA_ID_2141474_gDNA_ID_1620424_Annot_ID_156671 3000 nt of promoter + ATG
gatatattatttatcaaaattttaaaaatttaactataacaaaaaaatgaagctatattgcatattatttttgatttcatacaattattttgcatttttttagagatagatgataaatttgtaaaaattgacgtctttgaaagttatttttgcacaaaattccttttataaagaaaaagaaaaaaatttgttttgagacaactcttaagattaccttacaatacattgatatttaaaaacaaatttatatgaatctctagtagctatcaccctagttacattggctaatggatttctcataatagttttggatcctctaataatctctagttttggatcctctaataatctctagtatatgaaggacggaatttcgatcattgctctcaacttgttcatcaaaatctagcaaaattgacattttccgtcgaatatcacccatataaacttaaccatagtggaaacctaaaaattcacccccaacttttacaagaaagtgatctttctcattccttcatttgaaaggtttgaccttaacgtttttgttgtagtcgaaggagtatctttcacaacattgctgatcttagaacaaatgtaacccattattaccataagacttattttttctttttcagttttgacttgtgcctttatgtttaagacactagtagccacatttattacgctttttcaccgcaaaatttaacacgcactctctttgtcgatcccacaaactccatctacctaaccatggttaaaaatcatcaaaccttggttcccttgattaaaatatccctaaatccaagtctctttattatttcatttaaaatcataaatttagtttaatacaattgtcctttttcaaaatattatttctttatttgcttcagcaacagtcgtcatagtcatcatatcattttcttcttttcctcctctaaacgaatattaccaataaaaaatcaagtggaaaatatgtaatattaaaaaatctccaacagcttaagaagttagaacctttttacttatctttatttcttcttcttcttcatttttctattcacattctctgaaactcataccatattttcaaagctcttaacccaaaaaccctaagtcttttttttcttcaaattattggttatattaatgttttaagctatgatggatatgactcctacaataacaacaacaacaacaccaactcctaaatcacccgaacccgaatccgaaactccgacccggatccaaccggcgaaacccatttcctttagcaacggcatcatcaaacgccaccaccaccaccaccatcctctcctctttacttacaaagaatgtctcaaaaaccacgcggcggctttaggtggtcacgctctcgacggttgcggcgaattcatgccgtctccgtcgtcaatctcctccgatccaacttctctcaaatgtgctgcttgtggctgccaccgtaatttccaccgccgtgatccagataacaacaacgactcttcccaaatccctcctcctccttccaccgccgtagagtatcaacctcaccaccgtcatcatccaccaccaccaccacctcctccaccaccacgtagtcctaactcagcttctcctccaccaatctcttcctcttacatgctcttatctctctccggtactaataacaacaacaacaacttagcttctttctccgatcttaacttctccgccggaaacaaccaccaccaccaccaccaacatactcttcacggatctcgtaaaagattccgaacaaaattcagccagtttcagaaagagaagatgcatgaattcgccgaacgtgttggttggaagatgcaaaaacgtgacgaagacgatgttcgtgatttttgccggcagatcggagttgataaaagtgttctcaaagtttggatgcataacaacaaaaacacctttaaccgccgtgatatcgccggaaacgagatccggcaaatcgataacggcggaggaaaccacactccgattctcgccggcgagattaataaccataacaatggacaccacggtgtcggaggaggaggagagcttcaccagagtgttagtagcggcggtggtggcggaggatttgatagtgatagcggcggagctaacggtggtaacgttaacggatcatcgtcgtcgtgaagttaaagatgagagtgtcaggttaataagaagcttagagtaagcttattcgtattatcatcgttaataactttctattaaatattaattaagatctttagctttgtttgtttttgcattattattagttttgatttaatgttctttaccacgtcggtgtctcgctcgatgaggaataataccataacaatgttcgaattatatcatttgttgtaaacatttctattaatgaaccctgaaatgtgactaagtactccaataaatggtacacttttgatgtggtaatcttgtttcggatgaagaaacaaaaagattaataaacgagtgaaacatgattagttactataaatattcatttggtttcttatcttttaaagtactcttcttaattttatttgcaaccaaactagatgtagtaggtgtactttttttctttcttagatcctcttaattttattttatttttttattctatatcaaatgattagccatcattagtatattagtagcattgttgttaacacccagtgttttcacgtccgacccggaccgtccggtccgaccggttgaaccgtgacccgaacacttttccggtttgggtttagtattaaaatccaacaagttcaaaaccgaaaaaacccacaaaaactcatcattaacccgtgacccgatgaaccagttgaactggccggatgtgggttttaaaaaattctcttgattttggaataaaatatgagattttagactttattcaatcaatttttagatatttttcagttcttaaacccatttgatgtttaagattttgatgaagacttcacaatgccgccttaaaaa

SEQ ID NO: 1613 - DNA, 3000 bp, Unknown
  misc_feature (1)..( 3000): cDNA_ID_2141464_gDNA_ID_1620424_Annot_ID_156666 3000 nt of promoter + ATG
aatggtacattgtttcgattcgcttcttaggaatggaaacggttgcacaagaagaaattcatagagactttcaagaaaatcatggaatgtaagaagaaacctcagggacagggaaatgatgatattagccatgtcctacgcgaagatcaataggataagactccatcgtcttggatggacttgtgtttgagtatgttctatatataaccacctttgttaaattatcaacaacaaaaaaccttcgtttttaaaaatctaaaataaataaaacgtagagagtgttgtattgatgtaagatttttgtttttgtataaatttaaaatttatttaacaaaaaaacggttttacaataaatacatcgttactgaaacaagtataaactgaataaaagagctaacgacaacaagtgctaaaccaatatcgtagtccgccttcgtagataggtgaacttgaagtaactaaaataaactaaaatacttaaccgattccgcatattcttatcgaccattttggcaagagagagggctggaatggatgactcgccatgccttcttccatttctctctttctaaagagctgaaacacatatctgaaaacaaacatatgaatttgcgtcaaggccgaatttgtagatagatcaaaatatcatgtggattatattattatatatatgttatacttgcaagtatttagagatttttgcatcttacttagcttgtgtgtgtttggtctatttgaagtatttgcagaaattctatcccacaattttgtttgtccgcctctatccaaaactgatatgcgttcaattattctgataaaaatttagatacatacgcaattaatcatgagtatttaaatccttaaaggttccaccatctaaatgactaaaaccaattagtaatcaataccaattgggttagtgggttttgggaaaatttaaagttttgtactcaagttggtgtgtctaattatttattatttactttatgaattagcataattaagcaaagaacaaagaatattttggtcaaatatataaaaagattaacatccatctgaaaaatcttttacctatagtttttgcaacttgaatatttacctcaatagataaaaactagagttatttttttttttttttgtcggcaaaaaactagagttatttatcaaagccaagttagcaaaataatctactatgatgacaaaaatttgtaactaaagaacataattccacgtcgttcaccgtttcgtgttcctacgtgttattcttttttttggtcacgttataaaacctcaaaaagctctagaggatcagagaaaataacataaccaatcccaagaagaaaaaaaaaacagagtagagattgataaaaaaaaaatgagtagctccgattctcctcagcttcacaatatcttcgtctatggtagctttcaagagcctgacatcatccatgtcatgcttaatcgtattcctgagattgtctctgcaacacttcctggcttgtacgttacctctctctctcgatcttgatcttgatctcgaatgataattctctctgttttttagatctaaggtttaatgccgattttgggttgttttcagtaagagatttaggcttaaaggacgtttgtatccatgtattatcccctctgagaatggagaagttcatggaaaggtttgatttcttgagatcattctttgtgtgttgatcttgattcttgaataattttagattttgagaatttttttggtgaattgtttggtggtccaggtactaatgggattgactaatgatgaacttgagaatgtagattgggttgaaggaaacgaatatgaaagagtgtttgttgaagttgtaagaaaagtaagtttcaagatttattgattgcatcttcaaaaacactttttagtggtcttgatgaggttatgagaatatatatgcaggacaattctgagaagatgagagtggaaacatatccatggatcaacaagaatgatcctgatattggtggagaatgggatttcgaggttcgatgatttaaccatttttgttttgttttgttagctctttatgaatgatgaagtggtgcattggtttgattcgcgtgtttttgttaggaatggaaacgattacacatgaagacattcatagaggcgttcacggagatcatggaaaggaagaggaatccacaaggaaagggtagagatgatttcagcaatgtactcaaagaagaagatcccgcgaatgctccatcgtcttgaatggatttgtgtcgagtatgttctatatatcacctttgtgtctaaactccatattaaataaaaaaagctggagagtctagctaggttattgtggagactaatgacaagaatgtttttgtcatgttgtattgtaagatttgagttatatatcatgtggattgtattattgtgttatacaagagtctttaagagattttggcatcttacttgtggcgtctattgaattaagcgtgtatggattaagtgactgaaaagagaatttgtagtaccgaccatgggataagggttttgaaatatcctcaatggttaaagaagcatactataaacattggaaaggtatgtaacatcttttggttacacaagaaagataaggttcttgaagacttggtatgtaataagaagttaagaaccaagtaagaagtgaaggagagacgaaaatggagaaattcacagagtacttgcaaattttataccttttacataatttacaaatattacactctcccaaagagtaaagaaaaattaagtgagagaggacttaaaggcccaaatataaagcccattaggcctatatttaatataaccaatctggaccgttgaatatttattaagcccacataaatcgtgtccgttgattagaagagcccaagagaactctagggttttgtcttataagcttgatctcgcattaggtctttgcgcctcttgccatcttttgtcactcatcttcacaggaaaca

SEQ ID NO: 1614 - DNA, 3000 bp, Unknown
  misc_feature (1)..( 3000): cDNA_ID_3063391_gDNA_ID_1620425_Annot_ID_156695 3000 nt of promoter + ATG
aagcagcagaatcaaacaagcaaagaaacaaatactgcaccaagcaaaggaatcaaagaaacaaataaggaagcaaacaatgaagtaagcaataaacgcacagaaggaaacaaagctaaataaacacattgagcatgtaagcaaaggaatcaaagaagcatatatacatgaatgcttatgcatgaaaattacttgggggaataagaaaaagtttcgaatcttaaacagttccaggattatgaaaattctaaatatataattatttttaagctaatatgttactatatactccctatggatccttattaatgtattttgtaggattttcacatatattaagaaaatatattaacaattgattgtaaatgtatctttttgtgattaacaagtttctataactccaaatcaatagtattcaaatatattttttctgaattttacaattcatcaatactaactaataaatattgtataaaaaattgtaaattgtctttttgtgaaactacttccttttttagataatacaatagtaaagaacaaagagagtataaattatgaatttgtgaaagataatgtcatcactaacaactcataatgataaactcaaccaaacaaaatctcatatccaccttctcttcaatgtttactatatgtatagtgatgatatatgtgacgtgctatgaaaagtttcaacaagatgaagaaccattttcaatcagaggtcctcttacgacaatcaaggtacaaaacaataatgactatttgcttggaatccactgtaaatctaaagatgatgatctcggtttccacattcatgtcaatctaggagattcaacaaattttctgtggatttagccaaggacgagataataaaggcgtgttcaaaaatttataattccaaaatatatttttatagatgtaaaaattgtacacgggaagcaacttgcctcagacagttatatggttttttaagtggttaaagtagtattaaattctattattgattcaaatataaataaaagaataatttaagaactgtataaaatttgcatatgatgttcttaatctggaaaaaaaaaattattgtgaagtatattagagcaaatttttgtaagagagcgaataagagatgtgagctcgtaactcaatatttagaaccttgaaccgtaagtcaacattttttagtgaagttgaagaaaataaaaagggcatgagagggatgcgtaagaaaaaatttattcggaggaatggattttcttcttgtggatgataaggtacaattggatttaaaacttgtgagtatcttcaaggttatttagtggaaacatctattcttttatatattaattaatgttatttccaaaatattaattttaagaaggataaaatttggaagtacatagttgttttggaggaaaaaatcttgattattgtgggttatttaaacaacttccatttattgtaaatatgcggatatatctagtgattttttgcctaatttagattaatcaagataaatatgtatttaatttaaatgctgatatatatcactctgaaaaatttacaaatcacaaaaagttattattaaccaacaatcatgataaactcatcgagagtaaatctcaactcttatttttgctcaattttcattgtgtccatagttgtgatatctttgatatgttcagaagctcttcaaattcaacaaactaaagaaccacttcgaggtcatcttacgagagtaccattgtcaatcagaggtcctcttacgacgatcacggtacaaaacgataatgactatttgcttggaatccactgtaaatctaaagatgatgatcttggtttccacattctcaaacaaggtgaattatatggttggaaatttcatgtcaatctaggagattcaacacttttttctgtggatttagccaaggacaagataagaaaggagtgttcgagatttacaattccaaaatagatttttatagatgtaaaaattgtacattggaagcaaaaaaagatggtttatatggttatagcaacttgcctcacacagttatatggttttttaagtggttaaagtagtattaaattgtattattgattcaaatataaataaaagaatgatttaagaactgtataaaatttgcatatgatgttttaacctggaaattaagaattattgtgaagtatattagagcaaattttagtaagagagcgaataagagacttgagcttataactcaacatttagaaccttgaaccgtaactcaacattttttagttaagttgaagaaaataaaaagggccggagagggatgcgtaagaaaacaaattattcggaggaatggattttcttcttgtggatgataaggtacaattggatttaaaatttgtgagtatcttcaaggttatttagtggaaacatctactcttttatatattaattaatgttatttctaaaatattaattttaagaaggataaaatttggaagtacatagttgttttggaggaaaaaatcttgattattgtgggttatttaaacaacttccattatagtaaatatgcggatatatctagtgattttttgcctaatttagattaatcaagataaacatgtatttaatttaaatgatgatatatatcactctaaaaattttacaaatcacaaaaaagttattattaaccaacaatcatgataaactcatccagaataaatctcaattcttatttttgctcaattttcattgtgtccatagttgtgatatctttgatatgttcagaagctcttcaaattcaagaagctaaagaaccaattcgaggtcatcttactagagtcacgattcaaaatgataacgactatctacttggaatccattgtaaatcaagagatgatgatttaggctttcacatacttgcaaaaggtgaattatttggttggaagtttcatgtcaatttctgttattcgacgctctatttttgtggttttagccaaggacaa

SEQ ID NO: 1615 - DNA, 3000 bp, Unknown
  misc_feature (1)..( 3000): cDNA_ID_3063370_gDNA_ID_1620425_Annot_ID_156708 3000 nt of promoter + ATG
gaaggatctcgtgtagcagtagaagccgcgatctcgtttctctggtttttggtggcaaatcatcagtcgtggttctcccacttctctgataatcacagcggcgagagaaaattttgggcttatttaatcaaagttgtgttctcttatatagcacttttctcaattttcaattagtttttatttcctgagagtaaacgatttctcatttattctatattggtggtttaagattttaatttgagagagagaaagataaaaaaaacttgatcagtggatgcttttgcttcttgtggagtgtttgaagattttccattgatggagcagctttgtatcaggttctttccacactgatttattcatattgagttttttttttattgggtgtgaatgttatggtgaattgagtttaaacttgtttgagtagatattcgcttgttatgatgcatccgattccccaaacacttgcttttgtgttgatcttatattctctttgattcaattttgcagatgattctttgcattacattaatttacatcacaaactgacgtattgtgcatccatgaattcaacttgattcaaatgattggtgaccatagatgatagtacaaacatatatggtcagctggacgcctgcttgttaatgtcatccaagggaatctgtccattcagacgcaaacatcgatattatgctccttttatacacaatataagtaaatctgtttcttgttatatctaggattagtagacaattttggttataatattgggagtttccatacacaagtgaataaatggttaaagaaaaatagacgatgtactttgaatgggtgtttgaattggtgattatcattcatgtataaacttgtgtattgaaatgaaacgacctcatgagtcactagattaccacatggactaaaccgcttggatagtcatcaatggacaactatgtctttgatttgcttcaaatgtgttttattgattggtaaaattatcattttttgtatggttcagagttttgttttatggttttagatttagtggagaaggatcatgggagggtttgggtttaattttagggtaagtaaattaggatttagtgtaaagcgttaaaggtagagggtttacacactcgtatgaaccatttttgaatataatcatatgaatattaccataggaatgatcctatattttacagtttttacattaaaatgttttatctgcacaaacaaatacacgaaagatgaataacacaaaatctaaacattgttcaccaaatctaaacattgttcaccaaaatcaaataaaagaatacttcattagttggataacatatcttcgaagagtaatggacggattcctatagctgacaatcggcaagtacgtgttcatctatgatttttagaagtagagttgtatccatgaaacatcgaccaaatggatatagtgcaacaaatgaaggtgtatccacctagcgccgaacaaatggatatatattttgtgttttctcgtaaacttttcttgacatccatgagtcgacataagtatggagttgccagacaagacactggagctcacggcggccaccgcagcctcatggaccaaagtttcaaaaaaagctcataaacatcaaccaatcttcttgcataaccaccacatacccagccttatgcgtccaatcactttccatctacgcaaatgacatccaaacatttttcaattcaaaaacaaggcaataaattcaacagatctaacaaaaataaatttaaattgaaggataaaatcataaaatctagaacccataacaaaaaaaaagtttaaagatttacaatctaaaacctaagctagaatcaacgaatcacatgtaccattggcctttatgattcaaaaccaaagaaaccttttaccaaaaaaaaacaacgaaaccagaaaccgtaagtaagacaagagagaagagcatggaaccagaaaaagaggaagattaagggaagagggagttcggtagcagagagtaaggatctccttcttcttcgtctcgaaaaggagaaatcgatgatgttactttttttgttggtcatagtcgttcattgatggaggttgcagataatgaaatggatttgatgatggagaatggagaaaagaatacaaaactaaaaaaataaaggaaatttagggtaaacatagattgtgattgtgaattttgagataacctcagaattttcataattttgtaagaattattgagaacgactatgatgtgaaagaggaattgaaaatgatgaaaaacaaaagaatatggaaaggagaaatgataaaaaaaaaagaaaaaattaggttctcacccacacgatctcattaagaataagtttaaaaattattgtgttttcatcacttcaggggcaaattggtccaatttcctctaaaaaagatggttaagtgccctctctcttacaagtgcctcaaacgtaaaaagattctcacaaagtgcctaataatgtcacatttcctaaattttaaccccggttagtgtttccgttagcaatgttaacagacgttaactcgtaaatgttattttatcaatttttattaaatgaaggttttaaaaggtaaccaaaattaacttaggtatttttgttccaaatttagtattagaggtattaaacggacaaatttaaaatagatggcggatttttcaggtttttccctccagaaaactagaaatacagaaaatatcaaaagggtggttctctggggaaggagacaacagctgtcattcataaatgccaaatatattcagattaattatatatatatggctgaaaatagttcaaactaattaaatgatttagccactaagatatttttaatgcttgatttgatccaaaacatttttatgacatgaaagaatatttctctaccaaagaataattcccaagcgttgttgtttaaatgggttttatggtgaattcgcaaaatgaaggtggtgttggtggtgaccattc

SEQ ID NO: 1616 - DNA, 3000 bp, Unknown
  misc_feature (1)..( 3000): cDNA_ID_2141688_gDNA_ID_1620425_Annot_ID_156709 3000 nt of promoter + ATG
ggatctgctactgtcttctttgcctacatcgggtttgatacagttgcaagtatggcagaggaggtcagtgtcatttattgttgcagtatcatattttcaagcactggtatatatacttatattgctgtttcatatgcaggtgaaaaatccccggcgggatttaccgctcggtattgggatttcgctcctgctttgttgtttgctgtacatgatggtgtctgttgttattgttggtttagtgccgtattatgctatggaccctgacactccaatatcatccgcattttctagtcatggaattcaatgggctgcgtaagtccgttaatcggttaagatgcaaactattcattggcaggacttgttttgagtttgatttgtttttcccctgccattctgtcttatagatatttgataaatttaggtgctgtcatggctctctgttctgcattaatgggctccattctccctcaggtaaactagaaacataattcaagtgtttagatctgtaaaattaaggatttaacaatgagaattttgaagaacatatacacgctatgtggatttcttttgtaccaacttattcaccaaagagcttattcgtttttcagccgcggattctgatggcaatggctagggatggtctcttgccttcatatttctcatatgtgaatcaacgcacgcaggttccaattaatggcaccataaccactggtgtttgtgcagcaatcttagctttctttatggatgtttcgcaactggcgggaatggtaattaagatgtattatgattcattaatgttacctggtccagtacttgaagcaccacttagcctgtaactagaatttgacaagctttagttggtgtaggtgagtgtcgggacacttgttgcatttacaatggttgcaatatcattgttgatagtcagatatgttgttcctccagatgaggtactgataagattggaactggtaaactctatctttattcgatttcaccttagactacaatatagaagattcttgattaaggagagaagtctctaactctcttccaatggccaaaccagaatccccaactcctttataatgctacgcactagtgactagactaacaaggcttttatcaggtacctcttccctcatcacttcaagaaaactcatccagtcacgtcggaacttccatccgtagtaaacaacctttacttggcaaagtggatgattcagttgtcgataaggaaaatgctccaggaagttgtaagttacaattcatttttgcaaacaaggttataggcttatagctatttattcgcattggtgcatgaactttatatgttagctgatctctggtcttggtataagcaaaatttcatatctgttgttgattctgtaggggttctcaacaaaaaaaacagacggaaatttgctggttggagcattatgttcacttgtattggaaacttccttttaagctatgcagcgtcaagcttcctcttgccagggttagttcatcaacagtttatttacttgaggctctatctttcactgggtttcaaaacttgggcctttttctataatactcagctccattttatgcaaactatgataacagactcctccgatattctctatgtggtgttggtggattgttccttcttgtcggtttgattgttctgatttgcatagatcaggatgatgctagacacagttttgggcattctggaggtacttatgtcctttctttttcccaatgttttgtagtaagcatttcatttggcaacaaaccaaaaagttcagagttgtaacttagaactctttttgttctacaggcttcatttgcccgtttgttccgcttttgcctatagtttgcattcttatcaacatgtatctcttggtaaaccttgggtgagttatggatcatgacaccagatttgtgaatactactaaccgatgacttcactgttgatatacatttgttttgctaatgttttagagctgcgacgtgggttcgtgtatcggtttggctgttcctcggagtggttgtttacattttctatgggagaagaaacagctctcttgtgaatgctgtttatgtctccactgctcatctccaggagattcgtcgcacttctggacattctttggcttaagtctacatgaaaccatcaatggaagctcaaggaagtgggagtttcctttgtaaaatatgttcaacaaaatctgtataataatatatttttgagattggattatcctgtgtaaatacaaagttcaatgccactgctcataggcattgtatattttttttaaaacctaaatggtctaaatgttatctggtggactattgtatattttttgaactgctgaatttggtggactatgttgaatctggcgactaaaatagcaaatggaaggctatctgtgaaaacttgctgattggtggaccggatcctaaatcgactcgaatccgacatggaatagttataaaattcaaacggataataaactatcctacccgaattccgaaccaaaatccgaatatctagcttagataacggtatgtctttctaggatggtcaacgcattcttatatttagctcatatatgaaatgaccacatgtaaagttgatatatatatatatatatatatataaagggccacaatttaaagttgttatcagtcggttaacgtcatataacgtcgtgtaaattttggcatggtcaatgattaaatttgtatgaaatagtccatcaacgatttttacatgtattaaatagtcacatgcgaagttcacatattaaatgatattttttgaaaattcgcgtattaaaagaaaagtttccccaattaattgcatttaaactttattgtgtacagaattgcatcaaaacttaacccaaaataaaccggccggtacaaatcggttaacaaactctgttaaaaaagaataacctagccccttaaaacctcatttggaactcaaaaaagcagtaccggaaaata

SEQ ID NO: 1617 - DNA, 3000 bp, Unknown
  misc_feature (1)..( 3000): cDNA_ID_3063381_gDNA_ID_1620425_Annot_ID_156702 3000 nt of promoter + ATG
atgtgagagggattatttttgtggcttttcataatgtgaacaagttcatcaagacaccaagccgatgatgcgtagtcctttgttaaaacaacaatgagaattttcgaggtttcaatggcattcagtagctccggggaaatatattctcctctttgcaattccacatcatccatgaatgtgcttataccacatcttctgagagaatcgtaaagatggctcagaaagttcttccgcacatctgctccacggaaacttacaaacacatcataggtccatcgctcaggaattcgctccctgccttgagccatacctaacatgtgattacaaagagaaactaaggagtgtcatttgaacaagaatctcagagaaagaactgaacagcttaaaaatgtatgcttgggggaaaccatgttttgacaatgaaagtatgaaggggacgtgtggaatatgaacacgacgataaaacacggcacgagcaagaaacatcataggtcactttcctaaatacatgttatcttagcaaggttacgtagtgaaacctttctccaaacaagcatgctaagttaatatattgtaacgaatcacagtaaacaaaactctgtactaaaagggaattttcaaccagataatgaagctttaattgggaagcatgatcagcctaaagttatcttgtaatactactttggtctttgaaaacaattacaaatgattatttgtactaaaaaatggattcagcaaaacaatctatcagcccacaaagttcacaaaacaagcaacaaaagaatggagtaagagctttacttaccatataagagacacaggagaatttgagctagtcctttttggcacactgaagtaaaaaaaaaaaacagagaagatgattttaaagagaagatgaaagaagaaataagaggaacatatataaaacaaatgaaagctcaccagaggactatagctatacagttacagagctgaaatcatgaaactgtagaatgttcaaatcaacttctttgtttaaagaaagcttctttagatctttcacataatgaaattgaaccaaaagaggataacatatcttatctcttgcatttgtgactctgattaaaaaagttgactttccaatctcaaaatcaactctggaggacccataagttagaggaccttgacttaaagctaataacagtgaagaaaaggaattgacaaacaaaacaatccactgatcttctttgagataaacaacaacttgtttaccgaatttctcaatcatctttactctactaaactcactgagacaattcatcgaacaccttcaaggcaatgcagcaactaccttaactctaatcaattaactataaaacaagtcaaccaaaattgttgacctaaagcaagccgtaactaatagtcaaatatataccacaatttaacccttgagatgaaccgtttatttggggaccgaaacgctggctaccttatatctttgattattgagattcgagagagatacgttatgccttttggacctaaccaataaagtttccgtagtaaattaaaatagtcaataaatggttgacacatatcaacatctaactcatgcgaatttttaaacccaacggatgcggttgcgactagtacgatagtttgcaaaaacggatggtcgcaattttaaccattaataaatattttaaaatataaatttaacggtttaaaacatattgtgtttgcgagagttttataactagtaaatttggggttgcaatagggattagtcggcgatgaccaaaataaaatataatctataattacaaatatattcttgtttacttatatatgtaattataaagggaattttataaaatctactactttttctggagttcttttacaatttctacaacacaaagctttcttttacacattgtaccacatttcattatcacatgcacatttgtggacgaaattgtcctagatggtgacagactgatgtgacagccttttgtttttgtctccagatcttgtctccgattagaaattctctattgcgtctacgccttgtcttcgattttatcatcttgctctattattatgaatcccacatcttgtccaccaattgttctcatttaaagattttgaattttatttagattttttgccatctattttggtccacagattagttgaacgttattgtcttcacctgaacatttacaattgcatataattctattttaataatatattatatcggggataagttaatatcgaatgagtgatagaattagataagggacaaattcagatcgaaatgatagacaagataatatgttataactggatctttttgttattttgcaatcgaaggaaaaaaagcaataatctggattggtgaagacaataatgttcaactaatctgcggaccaaaatagatggtgaaaaatctaaataaaattcgaaatccttaaatgaaaaacaattggtggataagatgtgagattcatgataattttgaaagatgatgaaatcggggacaagatctatatacaacagaaaatttccaatcggggacaagatctggagacaaaaacgaaagttatttgtttagtctcacgaaatataatgtttattggttgaagcgcacgtgtgtcgagggaatagagattaatagaaagaaaaaataaatagagaggtaagagaaatagaaaggagcgataaataagaaaataaatatagagggtaaattagtaatttcaataggaaatgtcgtaggagttaaaaggggattggaaatgtggtagattttataagaaattgaaaaaaatggtaattgatgtaattttcccaattataaagaaaaattcattcaaatgctcttttcatgatgccccttttcaactctaccttttcatgatgccccttctcattatgtagattttttttttttttttttatatcaattggctaaatacagcacatctggttcagctaaactaaaaaaaaaaaaag

SEQ ID NO: 1618 - DNA, 3000 bp, Unknown
  misc_feature (1)..( 3000): cDNA_ID_3063374_gDNA_ID_1620425_Annot_ID_156704 3000 nt of promoter + ATG
agcttcaaggctggcgggttggagatgtcgcttcctcagtcttgcgggtcggattacacttactaaatcagtcctctcatccattccggttcataccatgtcaacaatttcgctgccacagtctattttgaataaattagacagtatctcacgctcttttttatgggggagtacaatggaaaaacgaaaacaacatcttattgcttgggatcgtgtgtgcttgccaaaacaggatggagggttaggcatccggtgctctacacagatgaataaggctcttctctcgaaaattgggtggcgtttacttcatgatgatgtgagtctatggtcgaaaatcttgagaagcaagtaccgtgtcggtgatattcataacagagcgtggatggtgtctaaaggtacatggtcttctacatggaggagcgttgtcgtgggtctgaaggaggtggtcttctcgggtttgagctgggttctaggggatggtgttgatatcctcttctggaaagataggtggatgtcgcagaccccgttatgtgaggtggtaacatgcgaattaccggcaaactgggaggcggttaaaagttgtggatgtttggagagatggagtgggctgggatttacagaggcttacgccgtatttcacagaaggtatgaagctcaagttactatctttggtggtggataatgtgacaggggctagggatcgtttgtcttggggagggtgttccaatggtaattctacagtcaagtcagcttactcttttttaagcttggactggagttcgaagcagcagatggcgcgttttttctctagaatttggcgtgttgtagctcatgaaagagttcgagtgttcatatggttggctgcaaatcaggtgttgatgacgaatgttgagagatacagacggcatttatgtgattcgagcttatgttcagtatgcaagagtggggaggagacaattctacacattttacgggactgtccggcgatggcgggaatttggacccgcttgttaccagcacggagactctcttctttctttttgaaatcgctgttagaatggatctacgcaaatttaggagaggagatagagattaatggttgtccatgggcggtcactttttcgcaggccatatggtgggggtggaaatggcgttgcggtaacatctttggcgagaacaggaagtgtcgggatcgggttcgttttattaaggatcgtgcgttggatgtttggaaggcgcatgtgcacaacatgggagtgacgacgcggacagctagggaggagagattgattgcgtggtctccgccaagggtgggttggtttaagctcaatactgatggggcttcgcgtggtaacccgggactagctacaacagggggcgtagttcaagacggggatggaaattggtgttatgggttttcgttgaatattgggatttgttcggctccgcttgcggaactatggggagcatattatggtttaaatatcgcttgggagcgcggtgtcacacagttggagatggagattgattcggagatggtagtgggttttcttcggacagggattgatgattcgcatccgctgtccttcctggtgcggttgtgccatggcttactttcaaaggactggtcagtccggatttcgcatgtgtatagagaagctaatcgtcttgcggatgggttagctaactatgcttttcttttaccgttaggttttcatttgtttaattctactccggataatgttatgtcgattgttcacgacgatgtagcggggtctgcgtacccccggaacgttcaagtgtaatttttttagtttttcagttttaataaaaatgggggttcgccccctcttctaccaaaaaaaaaaactctaccttttctgtcattttcatttctaccatctttaattttttaatgacccatttacccctaatttggaaatcgttttaagttaacaaaataaaatattaatattttcgcctaaaatgttccaaaataaatttcccgccaaaagtttccgaaaaaaattcacgccaaaaaaaatttcaaaaatatatttcccgcaaaaaaaattttttggcggaaaatagatttacaagggattttaaaataattttaaaatatttacaagggattttaaaagggttttaaaagatttagaagggattttaaaagggttttaaaagatttagaagggattttaaaagggttttaaaagatttagaagggattttaaaatggttttaaaagggttttaaaatatttaaaagagattttaaaagggtttaaaagggttttaaaagttgtataagggtttttaaaagatttttaaagaatttacgagaagaccctttaaaaactcttgtaaatattttttaaatcttttaaaacccttttaaaatctttggtaaatattttaaaatcccttgtaaatcttttaaaattccttgtacattttccgccaaaaacatttgttacgaaattttttttttgcgggaaactgtttttttggcgggattttttattttttggcggaaaaaaagtttggcggaattttgtttttggcggaaaaaataatatttggtgccaaaaatttggcgggaaaatttcagtttataattacatgttcctattagatgaatgtaatttggtcattctgttcaagggaagaagtatttttaaaaatggacaacataaaaaagtattgttgcaaaaggatattaaaaaagggtagttttgcaaatctcccaattataaattggcaccttttatctttgattattgaaattcgagagagatacgttatgtgtggtaaaaaaagatacgttatgtgtttcggacctggcaagtaaagtttcggtagcaaattaaaactttctttcacacgtgtcaacatcttaatcatgtgtaaggaggagacgttgcttaaggagtttgatattattttggaacaggaggagacgttgtggtttcaaaaatcgagatagaagtggattcat

SEQ ID NO: 1619 - DNA, 3000 bp, Unknown
  misc_feature (1)..( 3000): cDNA_ID_2141759_gDNA_ID_1620426_Annot_ID_156728 3000 nt of promoter + ATG
acgtttctgatgctttgttcctctcacttgctaagtttgatgtgatcctctctagatccgctaactcaaatatcttgcacagttagattcaagtttttatattagtttagaacatacatgcattatttcttatgtagaaattatattcatatatttattgtatttgtctatacagatattattggtcaggttgtcgatcggtctgaaatccaaaatcttaacgctagcaacaagcccaccaaaaaaatcgattttgcattatttcttatgtagaaattatatttatatatttattgtatttgtctatacagatattattggtcaggttgtcaatcggtctgaaatccaaaatcttaacgctagcaacaagcccaccaaaaaaatcgattttcatttgagagatcagcagtacaaacaatctatattcatattcattcttatttaaagtttgttgttttttttttactttttattaataaatttcttctttccatttttagtgacactcgcttggcatgtacactttgggggaagtatgctgagattgttgaccaagcttgccaggagtctactgatggtattgttgtttgcttaatccgatttgcgaagatcaatctctacaatggtaattatgttgatatgtgttactacatatctatactattttaaaaacacgaccttttatttttaaaacagatactaggagtgtttccaattcttttgatgtttcacaagtcttcgtcgatcacacgttggctgagttgggtctttttaagcaaaggtaattgtatttatttgtcactaaatatatttgtttctacataatattaaccaaagtatattttcttgatatatagcataccaactgatgggttaactttgggaagttctggatcttttcacaagaggctctatgcaccaagaactggggatgacgatggtgattatccaaggcaaacaatcaaggaagtcctcacattttctgatgtactattcattaatttatttatcctactaacatttttattacatttttatatttttagcttagtttgtgaattcctctttaaattcatttgaaggtcggtaagtgcaaaacagtttgcactgtttcggcaattgatacggattggccgtggtactatttttgttgtcgtgctcacaacaagaaggttgtcaaagaagaagctatcaaatttgaagatgtcaaacttcctcaaaagccaagattttggtgtgaaatatgcaatggttttgcaaaatctgttgttcccaagttagtctttatgaaatctttatattgaatgtattatgatttataatttggtatttttaatcttataatcctatttaactttaaggttttggctacatctccatattatggaccaaaccggtgaagctaaatgcatgttattcgatagtcatgcaaaggaaattcttggcattactgcccatgatttgcttgctgggtcatttgatgaggtatattgtcttttttaaaaacaaactctttcattaaaatgacaacgttcatgttataataatctgtattttttgtagatcgaagacccaactgttttgcctgatgtgatcaattgtttgaaagggaagacttttcagtttctattgtgtgttcaaagggaaaacatatttggtggatatgattcattcactgttgcccgagtctacaccgataacattgctgatgaaatcgttcaagaggactatgatgcatacgttgatccatcatccttaatttcgatcgaacaggtttgtcaaataacattaaacaattccaatcattaatatttattgtttagagttgtcttattaaaatgtttttgtattttcatataggattcccttatgctcactaatggtgttgacctttctgatgtggatttgtcgtcaacctttactccatcatcaaaacgaaaagaagatgatgttgatggaaatgatcacgcttctacaagtaggaagaagttttctaagatgaccatgtatgaggaaggctccgacgaatgatgctcaatgactacttaatgtttttgcttaaagttatgcatgttgttttatttttttaagatctaaactatttttattttattttatatttttccttgggaattaataaagttatttcaattatatgtcgttttgttaacaattttattacttaagttatactctctttgttctactaaattttatttgttatatgttcacaaattaagaaaacaaatttaatgaaatatttttatttcgctatttaagtataatattattaatatttctctcttctttttgttatttaacaattaaaatagtaatgattttaatgtagaacatcaatttttggaaatattaaaaaactcaaaacatcaactttccagaaaacaatattgttttcttattacgaatctaaagattttatattatactgttagtcatactaaccacaaacaattttactaattttgtattaattattaaataaaatcataattagcaaagattttgtacactaaataatcagtctaactaaacatacctattcctattttttcatagattcttattataataatgataaattttttttaacatgctaagaaataagtggcataattattgttaaaacctataagatcttggattggttgtagacgatttctttcctttttacacatcaattatttcaacgaggagataattgatcaatcatcctttaatttgtgttccaatttgcacaaaaatatagtagaaaaaataaatttgaatatacattccgtatattgtgccaaaatatatttagattattgatattttggttaacaatatattttcatatatattgtttcctattttttagcatggctatgtttatcatcttattttgtttctcatacatttagctttatactgaaaacaaataaacaatttttgttattttttcatcgattacaatgaagaaaagaaaggataatgatgaaa

SEQ ID NO: 1620 - DNA, 3000 bp, Unknown
  misc_feature (1)..( 3000): cDNA_ID_2141781_gDNA_ID_1620426_Annot_ID_156735 3000 nt of promoter + ATG
tagatcaacaagtcttgtagagttggttacccttggtcgagtaaatgggtcgagtaggaggggcgagtagatcaatctgcagcttcatctgaggttgccttgatcgagtaagagggtcgagtgaactgctgcctcctctgtggctgcctggatcgagtgaatggatcgagtagaatgctcatctgcttccctcctggttggatagagtagagggtcaagtagagttcttttaagctccttatgcacctgaaaacacacaaaaacatgcaatatgtatgcaagatgatcctatatgcataagtatgcaaaataagctaaaatggtgcaaaatgatatgatacaatgagaaaatgcaaagctaaatgatgataaatacacacctaaaatgagtaaaatatagtgttatcagttggccaaatggcggttgacttggatagcaggtttcgatcttttcgcaatgacattattgttattgacaatattgttattgcactcacttggtggaagatcgttaggtatcatactggccccaaacacgtgaagatccaaaattattcgaccatatcagatgtgactgtcgaacccaatatcgaagaaatgcaagagataaaaatggtcctcgattaatgcaagatggaaggaatcgggtcatgatgcttcaagtaaaatattgtttacttttattttcctcctttgtatccttcaaacaaatatttatgggaatttcatattgtctttgccttcaaaatgttcattttcgagatatatcataactcaaccgtataatagaataactcagccgctaagtaacataattcagatataactcaaccgtaaacccacataactcagtcgtaaagtaacataatttagatataacttagtcgttgagccacccacatagctcagtcgtaagtaacattggttagatataactcaaaagtaaaagcacataactcagttagtcgtaaaaccacataactcagccgtaacatgtaaaatgaccgaacctttcaacttccctatttatataactcagccgtaacatgtaaaatgaccgaaccttttgactttcctatttatataactcagccgtaacatgtaaaatgaccgaacattttgacttccatatttaaataactcagccgcaacatgtaaaacgacaagacattattgcaaataactcagctgggacgttaaagaaattgcaaatattacggtgcttagagtctacaatgtcacgaatacatatagcggttaccaaaaaagggaaagaagacacaacacatacaattcgtgcaaacaatactatgcacgacaagttttaacattgtgcccaacttctattcatcgagaacatccgtgttccttcctagggcgtttattctcaacagcgacttctagtgctgatttcatccttagtttcttgggccagtctggctggttcacaacaattggaggcaagcacggttggtcaattacaattacagggacatggacttttgtatctgaaggcatgattgcaccagcgtacgcattgacaaaataattgctcgtatagtaagcactgcactgggatatacgagacacacccatatgctctgcagctgcgattgaatggatgcatggtaatttttctttctcgaaaagatggaatgtgcatttttttgcatccacatttacaacatgcaaagatgttccataagttacttgtacgcggaaagcatcaatcgtttgtacatccataagtcttgacgttgtgacacgttcctattagtgagatgaaaaaaaaaaaaatacgttatggctgagttattctcattatgaccagtttatcattatttgaggactgagttatgcactagttatagctgagttacatgtaacagtttatcaacactacgtgtgagctgagtatgctgcgtgctcgcatcaactctccgttcagcaaaccatcttgtcatcatctgtcttatcgcttctaacagtcaagctatgggaagatttctggcttttgacagtgctcttttcattgattctgctatattcatagtcattaaattgtatatatcactgggaaaatgaacacgcgcccacatttcaacaccagctctttcgaggtatgcatgtagttgaggatcacgctcttcaatctcgttgaacgcgtcatcaaaatcagtccgcctataacaccttgccgcttttttcaccagagagaacaaatgttttcctttgaattttagcaaaatgttcttatacaaatggtaagtacaaatcccacgagcagccaacggatacacttcaccaattgctttccctattgactgatgtctgtccgagattatcgccaggtccgttgcgccatgaataacaactttgagttgcgtaaaaaaccaacgccaagattcatcattttcagtgtcaactacaccgaaagctaacggaaaaatctgaaaattaccatcctgagctatggctatcaggagcgtccctttgtaactaccatggagaaacgtaccgtcgacatcaacaactctgcgcatgtaatgaatcccagcgatactggcaccaaaagcaatgaacatatagttgaatcttccactctcatcaatttgaagacgcgcgactgtacccagatttgtccgtcgtatcatgtataggtaagaaggtagttcttcaaaactactattaggggttcccagagtgagctcccttgcaaacctcagcgtcttgtatgacttccaataacccattagaactatatctgcagcggatatgtggaaaccaatcaaagacacatatgcaagtgcaagcaagggacatgttcaacaaattcgggttcaactgaaacaatcttccaaaggtgacaaatcgattgatgagtatatacagcatctcacaacaacgttcaatcagttagctctcctaggtaaaccgattgaccatgaagaagagatcgagttcctcctagcagacctacatgaagactacaaaaccatg

SEQ ID NO: 1621 - DNA, 3000 bp, Unknown
  misc_feature (1)..( 3000): cDNA_ID_2141767_gDNA_ID_1620426_Annot_ID_156730 3000 nt of promoter + ATG
atgacgatcaataagagccaaggccagtcattaggcaatgttggtatatatttaccgaaacctgttttctcacatggacagttgtatgtcgctatgtctagagtgaaatcaaagggagggcttaaggttcttattacagacagtaaaggaaaacagaagaatgaaacaacaaatgttgttttcaaagaaatattccgaaacctttaatagattattttttcaggtatgatttatttattttgattattataaaataaatatcattgtaaaaaattatataacatactaacttagtcgtttttatatttgcaggttggaataattaataaaagcatttctttggttaattttcttaatgcaagctttttaataccagtggagaattatgtaatctattctttttttattttaatttttttattatgagttttaaatataaataaagacattttctaattattttttgtcaaaatttataaaatagagtttttgtggaaccgaggaactacatatacaaaatatacaattacgtacccaaacatacataccaactatagacatatattttccatgctacaaaccgaggaaactatatatactaaacaaaatatagtttgaccagactaaatatattgttcatgtaccaataatacatgataaacaaatacatgtttaaagataatgaaaataaaatagagtttttgtggaatacacagaactgagatttgattattgaataaatcaaagataccgtgcgtagcacgggtactggcctaatgtataagttattttgtaatctttaactagaagttgttaattatcttcctaatcaatgtgggcttaataattgggcctatatttttattcttgtaatcactatcattgttcttttcccattgatctcagtcagcaaagtagataaaaataatgttattttcatttattatatcagttagatttatataaatttcaatttccagtagtagttaattctagttatgctcatttaaatgtaaatttagaaaataatagtaattttaactaaaataggatttttcctaccatttttaaccatccatttcttatcatacactaaataaaaaattattagggggcgtcaaaatatgacccatgtttggtagcattccaaaatttacatgaagttctgaaactttaatcctttaatcttttgtaaagaaaacatagtgtcaaaatctactattcataaaattttaaatttattctaaatcaaacctaaaataagaaaatattttctaaaatgaaaattgggcaatatcattgaagacattttcttaaaaaaagaggtcaatataaatgtgattgttcatacttactcatagggagaagccccatacaatggcactgccaagtagagaatatgaagcagtagatgatgggagttgttgtggaagttgccactgaatgcaaacacgagaagggccgttgaataaatcattcccatcatattttcaaatattgtttttagtctctactcttaccaaaaaaaataagggttaaaagattttcttaaaaacaagaaaacaaattccgatcatccattcttaatgaattactcgctcttatcttatttttttaagaatacttggatcgtaattgtagcatattgagtttgaatttcttccattttgtaagtattttttttgttgggcttctgttttaaaactatctacaaatataatgatgatatatttttaacaaaaatcttttggatctacataatgcaaaagagcttttggttattttctttagtttttcatacttcaatggtaggctatctctaatgggattctctgaaaaaattaatatattaaaattatttaattttatagaatttaataaatattgcaaatcataaaatattaaatatatataatttttatttttcaaacattttaaaatagatgtaaaaaaaagaaccggaatttaagtgttttggttctgtaaacttgtggttatgttatttggttcttaaacttgtttttttttttcctaaacttgtggttaagtgttttgcttcttaaatttgtagaagcaaatttctggaataaaatttgtggttatgtgttttaagtgttatggttaaaatttggttcccataagtaatcaaagctttcttgatttgttgaaccatgtgagctttgacaactgcaatgttatctttaataaagaatgataaagtcatgaagatatggaataataataaccaaaaagccgaagataaattggaaagggcttagtttgaaccaagttttaggaattacaaatcacattttgaacagagagtattatagaacaagaaggaaatcatgaagataattacttggaaactttattcttccctgcaatggcaaaaattgtgggatctgtgaacaatgcacacattcttcatcacataaataactcgaataggcttaagagtctggacttagaggatattactcttccgtgttcaatttataaggctgcagaataaaacagtgaaagaagtagatgagattcataaaccaaatatcaggaaatcaaattcttatgatcaaatagaaaatctagttgtctgcactcaccaaaagcatagagtgaaaaaaaaaaacaattagcatttaccttaaaatttccaaattgtttcaatcacatattcaataacatatgcaaactaatcacgactcgtttttatgattgaaaacagatacaacaacagattaaattcaagtttgagaaagccaaacgatttagattgatctatctatcaatattgccaaaacgtaatcatacatacctataaaccttaaatgtaatcatacaaagtaaaccatagcctcctaaatgattcagatttgcaacaaacgaagaaccctaatttacaaaacgtaatcctaaaatttgttcaatccaaaaactctaattttggagatttaaccacaaaatactttatctcgaccaaccaagcctaaaataacc

SEQ ID NO: 1622 - DNA, 3000 bp, Unknown
  misc_feature (1)..( 3000): cDNA_ID_2141842_gDNA_ID_1620427_Annot_ID_156750 3000 nt of promoter + ATG
tgagtacgaattagatgctagaaattgatagtttaaggagtaatacagaatgcttcatcatttagttttttttttttcatttgttggtgatgaaagcttcttattaaatacatcttatcataagtaatgcaatagaacaaggatattttaagaaaatagggggggaaatgatgtattgtggactattattgtgtatttgacgaaatcaaattttgtgagttaacacaaaacaacaaagtgctcagtattacttaattttgtttattggtactactagctagaaactaaaataaccgtcactaaaaatgttatttcttccattatttattttagaagtacaagaataaaatagtagttacattttctctgatgtgatttaatgtatgtaattgactagaataaaatatttgtcaaaatttcagttatggttaaactattttcgtctttaagcagtgtgccacgcaagctatgggtcatagggcttttgcatgaaagggaaacaaagtaacggttaaattctgcggcagccaaaaaaaaaagctcactcttcaagggtaatttcgtctttttccaacttcgaatctatctcttactcaagttaagatttatttggatgtattgaaatctatttggtatgacgaaatcttatcttattattttattaactaagagataattaattaagagatgtgataattacgtaatttattagataattaaaattacaaatatgccactatgagagagtcacgcgatacatagtactacagtagggtccagaattgagaaaatgattacgttaaccaatcaggggaccggtttcacttgacggtagcttatagatttatgccacgtggattttctgtggttcccatttgtaccggttacctggagatgagttgtcacttatgttcgtagcggtcgtttgttctgtgtgttactgtttaagacgcagcaggtaaccggttagcttggcccacgtgtggctcatgcagttttacacgcgtgagacttgtgataccatttgttttctaatttcttaaatttggattttttctgtgtgtttttaattattctgctgggtccttgtaattattggaacttttataactcatctgtgtaatatacaaagataaattcagttatataggcatgggtcctatgtatgtattggagaaaattcaaaaacttttccttttattctcaacagattaagtaactgataaatgttcctcacgtttttttcgtaaatgaaatactgagacgtttttttcttccaccaaaatcggaaatgttgttctaccaccaaaatctttcttaatcaataatttagttcaagtattgatgtatataatcttttacgttttgattgactatatatagtagtaaatcttctcttattatgaatggtttcatagaattataagaaaaattaagaaaaaaaattgtctacaaaatttatcattacctaactacttattttaaagggtgtattcaatcaaacatttcaaatgatttttgttaaaaaaacaaatccaatattatttaataataaatttcaaaagttataatgaaaaggttaaattgcatattatttttgattttatatgattattgtatttttttgatgtgatgggtaaaatgagaaaaatggatgatttaaacgatttttttggcataaaaccctaaatataattatgttttgtcgatagtgaattattaattttatttataatatatatatttttttaattaataattgattttaactcaataatgctttaaaaaaaatattcaaatcaaattatatatatcactaacggtttctaatttgaacgtgttccatgcattgaactaattaaattagatcaatttcgttttgggaacaaacacatttgtaccaaattactaatgatgggtaatatctaaatgttggagtagattaatataatgtaaaaaaatcgttagtgaaaatgatcctcaaacgacaactccaatagataagatcatgtgtttttgtatcaataattatgttttgtcgatagtgagttatttacttgattaaatatataatatataatataataattaatcttatctttataacatttttaataatatttattatattctaaattatatatagatcgttaacggtttctaatttcgaacatattccctttattgaagtaaccgttagtgaaaatgatcctcaaacgataattctaatagataagttcatgtgtttttgtatcaataattatgttttgtcgatagtgagttatttaatttattaaatataacaattgatattatctctgttacgctctttgaaaatataattattatttttaaaattatatataaatcgctaatagtttctaattttgaacatattctctgtattgaagtaactaaattaggttagtttttttatggcaacaaaaacattgctaccaaattatcgatcattgataatatctaaatggtgaagtattaatataatgaaataaaaacccgatagttagaatgatcctcaaacaataattctaattgataaatccatatatgtttatgtattagttatcatgtttggtattactgatgtgagttattaactttatttgtaaaatatatgatatttaaaattaattatattaatcactaacagtttataactttgagcattttcccttcattgatctcattaaattagatcaacctttctgtaaacaaacacattactattgatcattgattcatgagtaatatctagatgccggagttgattaatagtataatgaattagagattgttagtgagaatgatcccgaaacaacaattccaattgataaatgcatacacgtgggcctggagcattcttctggcccaattaaagcccactaaagatttagccttctctatctcatcgaaggccaattcattttttttccgatcaccggtcactgcttcgggtgtctcgacttcaactttccgatg

SEQ ID NO: 1623 - DNA, 3000 bp, Unknown
  misc_feature (1)..( 3000): cDNA_ID_2141877_gDNA_ID_1620427_Annot_ID_156760 3000 nt of promoter + ATG
agaaaagacttgtaccttaattttctcaaattctaataccctaatatattactacttactagtgtactaaagaagtcgctaacgcgtttttttgtatctttaatcacattctcacatgttggcttatcttttttttccttcgtaatcaataaatctccaaatatataaatgcaacacatacgaacgactatgtattctatacatggagtggagacatgagaacgtggggttgtaccgtgcacgtggagaggacatgtcttgcttaatgattatgcgaccatggaacaagtaaactttgaacttggggaatatttgctctcaagttatcaaattcatcttttttccctccaaaatcccaaatataatttaagatatcttttcttcttttaatttccctttctattctcatgaaaataacatataattaatctacgcaaagaaacattaaaatctcgataaaataacaatatccgattaatgtatacatataaattatctctctcacacatgttgttacatataaggcggtcaaatacaataacatggaggatcttcacgtgttctcttggttgtcttggcttggcttaagccactctgtataatctaagaagtgaattgtaatgtttttttctttcaattctttaacctctactgcatttgatatttcgtaaattttaatcctaaagagaaatatagttgaaaaaacaactttacacgacgttgttttccgatgaactttactcattaacaaatttaaaaacatgttatttgttttgccttcatcaagtggattgtaaaatgaacaattcaactagttattgcttatagttgttttgttagcataaaaacatagcagctagttcaactcttaaaatataaaaaatagtattattgaagtgtaagcagaattaagtgtcgttttacgtcaatcatttgtgtgccaaattgtttcgttccgtgcgctggtggtgaatatttttgtccaagtatttagaattacttgcggcagtaatcccgggattttatcttcgttttatcttcattttagtgcacacaacgtaagcaatattttactaaattttcgaattagtgttaatcatcgcttaaatcaataaatgtctagaaccatgtcagtagatttaaaacaagttaaacatactcaaagttgatttcacgaaactgttagaatggtgtggataattcggcaataaattcatgtcatctcgaattaatttcattgtcttattttgtctatagcagttactttttgtttgaaaattttatcttatacttattaggttcatttatttggatgaaaattagctccaactaataatcttgatgaatgtgacattaggtaagttaggtgtatatatgtaactgcttactactagttatagacttatagttccacatcttatcttatcaatctcaactaataactaatctccaaactctcaaatgataagatgaatttgatatgtggataacataatctgtatcatcatcaatctgtaaaataattactccattgaattgttttataatactcgagggtataccaaaagtacaaagaccgcgatacaggtaatcaaaccctggaaaattcgtcgcggaaaaccaaaaggtcagactaataagaatgtacgatctaaaaagaataaattcatccaatcatattaagcatagtcatattcgtggggtccattattcacacgacaccaacacaaatttatatttctcctttatataatttttatttatttatatggaaatacacctttctattttacttatctgatatctgaactaccacttttcttttttttttacatttctttcacattaatataatcatatttagtcaatagtcaaaaactcaaaattagtagaaaaatgatttattttattaccatgagcttgttactcttttctatataaagacacaatttattgtaatatagagtatagtacataaaaattaaaattatgtaatcaattgttaacataaaatcatcacacaatctaattatagtaggagtagtaacgtaaatttaattaaacaaccaattaaagaaaagaagaaaaatgaaaaaagaagctttccgtttcattgttttagcttttaattttgaataagaagttgttacatttgtaaaaacaaattttatatttaacttttaacttttttttattctaacacattacaacataaataaaataaaaaagataatttttgcttgaagtagaacctctctctcagtctctttctcactattctttggattcttttctctgtaatcaaagcaaagctctgcaaaaatatttctctccttttctcttcaaaactttccttttttatgattcatctgctaaaatgcaccaattttctataatccttcacatttctccaggtaacacattcgattcacctgttttttttttttttttggtcttcagcgattttttgttgtcgttattgtgtgtagtaggtgtgattttttttcttttcttcctggggatttttgttgttttcgttgagaaagtcttctttgggggtttggttgcgctgaaggaagaagaagaagacgaaataatggaaaattaaacaacgaaaattagggaaaattagagaattaagaaaggttttattcaatcggcgcgtttcaaaagtctacgcgattctcgagattcattttcaaatccttcttcctcgggatctatagtatagagcttcagtaattttgtcctcttgaggtatttgtttgaagaagatacgaattgatttttagctgaatgaatccattttggcagccaagcttttgttgaagagttcgatggtcaacgttacgctaatttcttatttgacaaattagttgttgtcttcctcttcttctgacattgtgccatttaacaaatacttcttctctgatccattattgtttttttgtttgcagagacgtctaaagaagcttgaaaccattattagagtatttgaca

SEQ ID NO: 1624 - DNA, 3000 bp, Unknown
  misc_feature (1)..( 3000): cDNA_ID_2105835_gDNA_ID_1620427_Annot_ID_156762 3000 nt of promoter + ATG
tagtcaagattaatcctgatctcgttcttgttgctgggagaaaaggtattatttgcttcgttcttggtttcttaattagtaggtcaatcagaactttgattgttattatgtttgtcttcgtgtttatatgtttaaatgttttaatgttgtgcttgtgttaatatttgatatatatgtctttttcttatcaaacaatagttaaaaaattactgtttgcttttagacttttcaagtgatttaatctttgataaggaaaactaaaataccatgttttcaaaatgaaatattctagttcatatatatatatatccctttcttaatatacaaatatcttacctcgatatttttccaaactgaaaatatttgtttttatgttgatgcgctatagcaggagaaaagtcgatgcatctatgttgtaggggattctataaaagaacttaaattccatatctttataacatataatataaagtttgatgatgtcaaatttcttttttttaatcacataactatacaggcatgacaccactacatcttgtagtaaaaaagggcgatgccaaccttcttactgagttcttactggcttgtcctgagagcatcaaagacacgaacgtgaatggcgagactgctctacatattgcggtgatgaatgatagatacgaagagctcaaagtgctcacaggatggatacatagattgcacaaaagcgatgctgcatctactgagattcatgtcttgaacaaacgtgatcgtgatggcaacacgatcttgcatcttgcggcttataagaataatcataaggcatgttcttacccgtctttacaattcgatattcatcgtttaatggttcttcaaatttttgaatcttatattaagaagaagataaaaaaaccaaaagtatgcaaagatataggttaataaaaaaagtcataaaaaatataatactctaattaatcttctcaaggccatttatgtgttataggattttctaatgaatggttgtcgtgaagcttctacaggtagtcaaagaactattaaaatgcatatcgctgaaccgggacatccaaaacaaaggtggtatgacagcccttgatattttacgtactaatggatctcacatgaacataaaaacagagaaaataattcgacactcagggggtaagagcggggtttctctatcaaaagttaagaccgcatctgtcttcttgagatcgcccataacttttgtagaatattgctccacgacaatgactcgctataagaaccgcatgtccgacggaacacgaaatgcccttctagtaataacagctctgattatcacagctacatatcaaactgccgtccaaccgcaagataaagatgaaatatattacacgggaaatatcatgataaatgtgttgtttgtgtggggattcaatactatagcattttgcttggctattgccttgacatttatactcttacctgttggtaaagcatataattggtggtacatctttatttcggtgcctctcgtttgttcttacgcactttccatgtttctcaagtatatacaattcccgatattatgtatgcctttatacttgatgatggcatttatactcggatttctaatctatgtatttgtactatacgtgggatggaagagggctaagcaggagaaggtaccagaaccaaaaagtgagctgacttttgaaggcttcacgtctatgacctaagccaatgatcgaccttcacaggatgttgggagcattattcatgtttgattgtaagtttgttaatacgctttgtacaaacatattccaatgtttttgagtactctttcatattgtaaactaatctgtaagttggttttttttagtcttttggggtcaaattcaatctaaattatatgattttttttttattttttttttgaattctagaaacaccataagtgacaaatatgtcactctagaacataacatgtatccgccgctgggcctcactaacagtccaagacaacatttatgtatcctagcgttgatttacttattctgcaatagatgagaaacagcctttaattcgttaccaatttaattggtgctaattaagtcaatagactcattagtcactactcagaattgaatctcacattggctattagtggagaataagactcattggctctggttgaattattgatttatatctgattcgtgaactgattgtttcaaaaagaaaaaaaggaaatcgataaggttgttatagaaactgtattcaaatcttatcattatctacaatttagtattcatccaacaatcgcatgggagaaaaaaacgagacaaattttggcctgcaacataatggattttctggcgcctttagaaaagtcctaacgtgctaacatttcaacagaaaaatgtctcatggaggaaagttataagtcagaaatgatgcaagagaaaggcaggatatcaagaggattacagatgatctaaggacccctaaatttccttatattatatttcttcttccattagagttaggccatgttccgctgttcgtttgctcattcagataattcatttggatgaagctgcaaactgatttacgtgtatatgcaaaattgagcatcattcatgagttttaaagattaggtcaatttttcgaattcatttagatagatgattcagtcaaaataacaaatcatcgatttggatgcaaattctagatgaggaaaagaacataacctaaatgatactattaccacttttttgtatcctagccaagcgttgatttacttattctgcattaggtgagaagctttttagttcttctttccagtttttttggcaaccactcgagtgaccaatttaagtggtgccaattaagtcaatagtcaatagactcactactcagaaatgaaaaatactacaaaataactatgctcccatatgttaaatataacgacactagtttcttggtccttacaattatttttctttctttgtaagtatg

SEQ ID NO: 1625 - DNA, 3000 bp, Unknown
  misc_feature (1)..( 3000): cDNA_ID_1010953_gDNA_ID_1620427_Annot_ID_156765 3000 nt of promoter + ATG
tgaactgttcaccacatttatgacaagaaacagaggaattgttgcctccattaatggtggattctctgttcatctccaatgaaacccttctgtttgtatgaaaccctaacccttctcctcctcctcctcctcctcgatctctctccgacaaagcaaacgaaccctttcttgtttggctcctgtaagaagctgaatggttaagataatgcatcggtgttcctggtctaagcatccctacataagtcgtagaccgaccatttcctccaccgccacctccgccggaatccgctgctccgacaggtgaagccatgtctccgacaccagtgatcttaagctcacaagttgagttactaagaataacttcatgagttataggatttagaaactcattgcttccaatagaacgaggactacttattggtggtttctcgaaatgtcttttgcttccatggattacgtctttgagatttgctattgatcttgaacatcctgataaaccaccaccgcatacggcggctccgccggatgatatgccggagattttcttggtggagattgtggagaggtgttgttgctgtttagtggtggatattgggtcgtggacatcagatggttcggatttacagtggagggatttcttgagtgagaaccaaacagttgggatgttgttcttgcttttgttcttcttcttcttttggctttttttgcttgaatcttccattgttgttgtcgatatctctctctttctttctctctatcttcttcttctgaatatttttggaagtgatgctataataaatataaattaaatattgtcgccggatgataggtaataataagtggattttgtcttatgagatatattaaaaaaccaagtttcttttctttctagaaggcatgtacgagcaaatgaatctgaaggaggtctacgatgtctcaactcaccgatgtaataagtaataacacgagagaatgtttctttcacttactgttttgccattcttaaaagtgtaaaaactgaaaagacttcacaacatgttcataaatcatgaaatagtaatttatagactagtccatatttacgaattatcacattaactgaatattggaatctttttagtggtaaacttgatttaatgcacggtaataagaaaagaaaaaacaagctaaatttcatgaacttgcattcattaacaaaattaacattagccataaatcgtgattaattcaatgattttggtttttaaaagatctttttttcctatagttaccgtgtagagaatcttgaattcatgtcatacttctaaacttttggaatttcctttaactttctcttacagaatttaattacagttaatacgatcataaatcaatgagactgtgcgtgagcaggttcaccggtctaataagtacttttactcgcaagaagaaacaaatattttatttctaaatttacctttgagattatatggtgaaagagttgattattcttctatgatgtctgaaacctagtcaggctaaaactacatatgtattcactcactattcataaatacgttaatccaagcaataatgatgacaaattgttggtcagtgacaactaaatgagaattactaatgaattaatagcatggctataggaaataaaattgaataaaagaacattgatttcatttctttctgcttgcatctgtcaattcactcttaaatgccccataagagcatatgaaacattctgacatttcttggaaagacagtaatcaatatacattttaacaagccattaaaatttatactaaacttcttattattacaccatgcatgtaactttatcactctagtttgataaataacaatagttgacataatatgtttatacgagcggacggtgaaatataagatttatttgtataaacgaaagtaaaaccgcaacgatagtacatcaatatttttgcattatctctgttcctaataaagtaacactgtagtatttacatcatatcgacttcaaaacatgaaggaatggatgacaataacagttcgttaatgatcaaaacacaataactctaatctgaattgtgagtttgtcaaactttgaaagtgcatttattacgaattgtagatatcgcaaagggtagataatggaagtaggtgtgggtgtcgttatagccatattgaattcaaaaggaaagacattaaattagaaattgaattttgaaacatgttgatagatcatgtccttcttctgggttacccagttttgccctaaaacctaaaaccaacaggaccatcatttcgaccacaccacattgactggtctgccccaatctagctatgatatatcttaatttccgtatgacttggatccataaatattgaaatagatttggtgaacacaatttactcttaaaacttcttctctttcatgcatgttctttttctcactttaacatttttatatagtgacatttttagtaatccaacgttatttatatgattagtaattcatcaaatttatatagtgataaaattccacaatggttgttcaataaaaatatgaacaacacaatagaattagtaaaagtgactatgttaaatcattttcttcgctggggtttggtgggcgagttctaaacccataagcggcccatttacttcgtaaactcaattcgatttgttcagcgttccaagcccataatattattttcaagggcataaaataaattgaggtttatatggaaaatttggaaattccctcgtccagaagaaaccaacaaaaactgcaaaagttcaagcggtgggagaaaaaacttcagatcgtagccattcattaaattataatcaacggtttaaacctcttcgatccgcgtactctattcttattggtcaaataacttaatcctccaacatatataaacaacaatcagatttctctctgttaatttcgtcaagaaaaaaattcgatttttttgcgctctttgtgggttgttgttgttgaaa

SEQ ID NO: 1626 - DNA, 3000 bp, Unknown
  misc_feature (1)..( 3000): cDNA_ID_2141895_gDNA_ID_1620427_Annot_ID_156766 3000 nt of promoter + ATG
tgaaaattttgcgaaccatttcatctttctcgttaccatcattataactagtgtccaattcaagttgtggttcgatcattttgatatttaaagtaaaattgacaaaagaaatcctaaatttgaatgagttacgttttgagattggttcacgttcacttttaaagaaacttaggttctgttcatatttgtactatatcaaccattcatcagttcacatattcagttttgatcgttatgatgtataacaaatcatttgaacgaagatttagttttcttttttaaagttcgatctattgtatttttattttttactaaagcagaaataaacgtttccgaatgaaaataaataagagaattgtggtgtaagaaagacgtacgcaccggggatatcggatttaaggacataagcttgatccgtctgagaccaatcgactctacactgtcctaagctcctaaggctcgccagcaaaacctcagcttcaaattcccacaacggaaaggcgtctgacggatcaaagtacttcccgaacaaaaacgggctaaaaagagacccctcaccgaacacagccttctccgagcctcctcccccgctcaagaaccttcggaaaacatcatcgccgagcggtacgctccactttcccggcgtcttgtcatcagtgtggatctctagtttgaggcttccactactactcgtcatgagagaaattgagacgaatgaaaaaaggaaagtggttgattgtgtgtgtgagttttggaatcaaggtttgttcttatagtataattttgagatagctaataaaaaaaatgatacaaatattttgattttaatggggatataaaaagaatgtttattcttttgtttttttgtggaggtatatttgcagcatatgtaaaatatatatacttatagattgacatgataggtgcaaagtagattaaagaagaaaaattaaacgaagattatggaaaaatagtgggtgctgaaaattatttgatgataagagaaaaagttgggagagattcttatttctttgtgactatactttagcatgctttaagtaaagagaggaatatgttcttttgacgtagaaattgctcgaagggtcacaaagaaatgtgtcttatttgctttgagccataccatttcgattcttcatcttgtactattttgataactgataccccctccatatcatcaataaataagtttacagaatagggataaaattggaaaatctgttaaacatctacattaaaaactgacaataacaactaatttaaaacaaaattcaacttgtaaaacgacaactaatacaaaagaatttatataaaaaatatctttatttcgatgtataataaagaagtatttgtttatttttaattggttttgtataaagtatttattactatcaaaagatgtttaaatcactgtgatctatttctcgttgaggcaattatatatgcaacgtgaacactataaataacgagattagtcggattttgtatagaggccaaagattagtttgtgtgtttgtcttggaaaaatttccttaattaccaaaaaagtattatagtttgtagcattttttaggtttaagttactctattgataatttttattaaaacctacactacttttgtgaggtgcagttttattggattccaagacactgtaatacatcattcgattcactggctaaaggtccgatgcctaatggatgtagttataaagaatctccataaagaacactatggtgattaatcaatgatattcattattgagatgttctttaatttaagaagttcataatcaaaagttacttctataataggggtggctcctcataaacaaatttaacccaattaattaataccaaacttaagtttatacgcatttgagttttccggttccaatgataaatggaattaggatagtttgatcttttggtgtgaactttcttaagagaagtaagaaaataggtgtgaaaggatcaatagcgtaacgtgatagatcaagattctgagtcttttattaattttaacacttggctttcccaagcaatttgactattgagagatgggccatgcatcatgcatgcatctttaaacatggaatcaaatgattttatcttcagaggttataatttatttgtttctattgctattttacctatttataatctggttttaaagtggtacaagaaaataaaaaaagataaacatgattagctgttccttaactgtaacaacaaaaatgaagaaatcattataaacaatgttttcatttctatataaaaaaacattacttaaaagttaatacacaaaattagaaaaaatatcaaatgtatatgaaaactgaagttttagtatttaattttaataacatgataaactaaaataaatagacaaataatatatataaaaaagaattaaaacagcgattttagtttaccttctctttttttctttgagaaataaaaccaagaaaaaacaaataatccaatatattaataactctgcgtaaatttcgcgtgattgagtttggtggaaacaaaaaaagaacgagaaagcttcgagaaaatatttgtatgaagcttgagagctaatatctccgtgaatttatctcgtcgacttttctcggaaaaagtaaaaggttgaaacttttttggtctctctctggtcaaaattctgggtttggttgaacgcaccgacgacaaatcgcattgtcaacatttggatctggccaacaatcattagcaccaactcttccccttttgtgctgtctcgaaaacgtgtaattgatctcgtggcattgtagtaagaagctttaatttaattggtcctccaaggaaattgcatcgaagtcagctccaaattttcgatcagggttgttgagcttttgtgttaaagtttcgatctttatcgaatttcagcaaaaagctgtagaatcggcaatttggttctattgagtatctgatgaaatgagaagcaaaagatatg

SEQ ID NO: 1627 - DNA, 3000 bp, Unknown
  misc_feature (1)..( 3000): cDNA_ID_2141889_gDNA_ID_1620427_Annot_ID_156764 3000 nt of promoter + ATG
gcaccagccttcttagggagaaggagattgtggatgttaggcatcactcctccattagcaatcgtcacatctccaagaagcttgcttagctcctcatcgtttctgaccgcaagctgaatgtgacgaggaacaatacgtgtcttcttgttgtctcttgctgcgtttccagctaattcaagaacctgaacaaattcaaaacacacaattcatgatcaaactttccaaatttgagaactttaacaactcaaatcaaattggttaccataattgaaaaaaatttagaatcttgcgagaaaactacaacgattcatatgatctcgattaccatcaaccaatcagaacaaacccaaaattaggtcaattacagaactacaacaattcaattcaaacacgaatctaattcaatttttgcatgtcaaattcggaaaatgtaagaaccctagattcgtaatcgatcacgcaaaaacagagtcagacgaataagatcggaaacggaatgggaaagagagaaaagacgatgtaattttacctcggcggccaaatattcgagaacggcggcgagataaaccggagcaccggcaccaacacgttcggcgtatttaccggcttttaagaaacgagcgatacgacccaccgggaattgaagaccggctttgctactccgagatgtagctttcttcgccccaccggatccaagagtttttccacgaccagccattttcaacaacaacaacccacaaagagcgcaaaaaaatcgaatttttttcttgacgaaattaacagagagaaatctgattgttgtttatatatgttggaggattaagttatttgaccaataagaatagagtacgcggatcgaagaggtttaaaccgttgattataatttaatgaatggctacgatctgaagttttttctcccaccgcttgaacttttgcagtttttgttggtttcttctggacgagggaatttccaaattttccatataaacctcaatttattttatgcccttgaaaataatattatgggcttggaacgctgaacaaatcgaattgagtttacgaagtaaatgggccgcttatgggtttagaactcgcccaccaaaccccagcgaagaaaatgatttaacatagtcacttttactaattctattgtgttgttcatatttttattgaacaaccattgtggaattttatcactatataaatttgatgaattactaatcatataaataacgttggattactaaaaatgtcactatataaaaatgttaaagtgagaaaaagaacatgcatgaaagagaagaagttttaagagtaaattgtgttcaccaaatctatttcaatatttatggatccaagtcatacggaaattaagatatatcatagctagattggggcagaccagtcaatgtggtgtggtcgaaatgatggtcctgttggttttaggttttagggcaaaactgggtaacccagaagaaggacatgatctatcaacatgtttcaaaattcaatttctaatttaatgtctttccttttgaattcaatatggctataacgacacccacacctacttccattatctaccctttgcgatatctacaattcgtaataaatgcactttcaaagtttgacaaactcacaattcagattagagttattgtgttttgatcattaacgaactgttattgtcatccattccttcatgttttgaagtcgatatgatgtaaatactacagtgttactttattaggaacagagataatgcaaaaatattgatgtactatcgttgcggttttactttcgtttatacaaataaatcttatatttcaccgtccgctcgtataaacatattatgtcaactattgttatttatcaaactagagtgataaagttacatgcatggtgtaataataagaagtttagtataaattttaatggcttgttaaaatgtatattgattactgtctttccaagaaatgtcagaatgtttcatatgctcttatggggcatttaagagtgaattgacagatgcaagcagaaagaaatgaaatcaatgttcttttattcaattttatttcctatagccatgctattaattcattagtaattctcatttagttgtcactgaccaacaatttgtcatcattattgcttggattaacgtatttatgaatagtgagtgaatacatatgtagttttagcctgactaggtttcagacatcatagaagaataatcaactctttcaccatataatctcaaaggtaaatttagaaataaaatatttgtttcttcttgcgagtaaaagtacttattagaccggtgaacctgctcacgcacagtctcattgatttatgatcgtattaactgtaattaaattctgtaagagaaagttaaaggaaattccaaaagtttagaagtatgacatgaattcaagattctctacacggtaactataggaaaaaaagatcttttaaaaaccaaaatcattgaattaatcacgatttatggctaatgttaattttgttaatgaatgcaagttcatgaaatttagcttgttttttcttttcttattaccgtgcattaaatcaagtttaccactaaaaagattccaatattcagttaatgtgataattcgtaaatatggactagtctataaattactatttcatgatttatgaacatgttgtgaagtcttttcagtttttacacttttaagaatggcaaaacagtaagtgaaagaaacattctctcgtgttattacttattacatcggtgagttgagacatcgtagacctccttcagattcatttgctcgtacatgccttctagaaagaaaagaaacttggttttttaatatatctcataagacaaaatccacttattattacctatcatccggcgacaatatttaatttatatttattatagcatcacttccaaaaatattcagaagaagaagatagagagaaagaaagagagagatatcgacaacaacaatg

SEQ ID NO: 1628 - DNA, 3000 bp, Unknown
  misc_feature (1)..( 3000): cDNA_ID_3063427_gDNA_ID_1620427_Annot_ID_156761 3000 nt of promoter + ATG
gcgctgaaggaagaagaagaagacgaaataatggaaaattaaacaacgaaaattagggaaaattagagaattaagaaaggttttattcaatcggcgcgtttcaaaagtctacgcgattctcgagattcattttcaaatccttcttcctcgggatctatagtatagagcttcagtaattttgtcctcttgaggtatttgtttgaagaagatacgaattgatttttagctgaatgaatccattttggcagccaagcttttgttgaagagttcgatggtcaacgttacgctaatttcttatttgacaaattagttgttgtcttcctcttcttctgacattgtgccatttaacaaatacttcttctctgatccattattgtttttttgtttgcagagacgtctaaagaagcttgaaaccattattagagtatttgacaatggaaggagaatccaaaggattaatcgttgggatctcactaggtttggtgattggtgttgtcttagctatctcagctttgttctgctttaggtatcatagaaaaaagtctcagattgtgaatagtggatcacgaagaagtgcaaccattcccatcagagagaatggagctgattcgtgtaatataatgtcggattcgaccattggtccggattcacctgtgaaatcttctaagaatgggaggtctgtttggcttgaagggtttagtaagaggagtaatgtcatctctgcttctggcattttggaatattcttacaggtttgtctcttcctctgacaaatcttagtttcctgattaggttattattttattgtcttaactatactcaggactagacttctcttgttatagtagttactttggttattatttcaaagtttgaaagttcattaaaaaggggaatgctgttgtggatatgagaaggtcttgcattcttggggttatattccgtttttgacatatggtctttggtgattgcttcagggatttgcagaaagcgacgtgtaatttcacgactttgataggccaaggagcatttggacctgtctacaaagctcaaatgtctactggtgagatcgtggctgtgaaagttctagccactgattctaaacagggcgaaaaagagtttcagacagaggtaagatatatctatggattcatttccgaagaacaagttagtgtgtaaaacatgtagcattaggcagacttttaagcattacaataggctttctgaaatctctaatactcaatttattagttgtgtcatctataagacaggctacatgaatgaacaatctatatatcttactctcttagtatctgcttagtttcttgaaaaactcatccactcgccttaatcttttcaggttatgttattgggaaggttgcatcaccgtaacctagtgaacttgattggatactgtgcagagaaaggccaacacatgcttatatatgtttacatgagtaaaggaagcttagcttctcatttatacagtaagtaactacctggttatacataccatattaatctgcttgtcactaaatgaactgttaatgcaatgttgagctattcggtatctttgtagaacatttattgagttgatggtttagacttcactaaatgatgagccttggtaaagatttgagatgcactaaaatggtacttttgatacaggcgaaaaacatgaaccgctgagctgggatttgagagtatatattgctttagacgtggcacgtggtctagagtatcttcatgatggggtaagctgcttgctaaaaccattcaccattttaatgcatctcttaaacaacaacttcaaaactcatgttctaatcaattgttccaggctgttcctcctgtaatccacagagatatcaaatcttccaacatcttgctggatcaatctatgagagctcgggtaaacatatcttctttctctttgaaatctcagtctattgaaccacctcaagtttctaatggtgatcttctttaacttcaggttgctgactttggcctctccagagaagaaatggtagacaaacatgcagctaacatcagaggaacatttggctacctcgatcccgaatacatttcaacaagaacattcaccaagaaaagcgatgtctatggcttcggagttttgcttttcgagcttatagcaggaagaaatcctcaacaaggtctaatggaattggttgagctggtaacataaaactaaaaagtcctcgaaatctccaattgttttgtttggagaattgcatgtaaagactaaacgttttgttgttgttgatgaacaggcggctatgaatgcagaggaaaaagtcggatgggaagagatagtagattcaagattagatgggagatatgatttacaagaagtgaatgaagtagcagcttttgcttacaaatgcatctctcgtgcacctagaaaacgtcctaacatgagggacattgttcaggttttgactcgtgttattaaagtgagacattgcagaaagcggcagaagaattctccgtcgccgtctccacggcttcctcctcctcctccgatagtggaggagtcagaaggtgagttaactgcaaacggatcattacgatcagaaattcatcggagggataattccttggacagtagtatagctgaagacgtgattttgtaaacaaaatgaaaaaaaagtctcaatttttttaattattattaacttttaaaatgtgattttgtttttcaattcttttgggtttttagacgctagattgtctatatttgtgaatgaaaatttgttctttgttttttcgtgttaaaacgagttcaaaactggagaaccatattatatatttgggctatgaaaagaattgaattcaaggcccaattaaaacctagcctagcccattaaggtttagtgataatacagtgtcgtttaatcgtttatccaatttttatcgtcatctgtggaacggataggacgaaggaaaaagaagaagagtgaaagttgcagagcgagaaaaa

SEQ ID NO: 1629 - DNA, 3000 bp, Unknown
  misc_feature (1)..( 3000): cDNA_ID_3063432_gDNA_ID_1620427_Annot_ID_156752 3000 nt of promoter + ATG
tttcgctctattattcgtttagattcatttgttttttttttcagatcgaaccgtagaatttaattacaaaattagttcgtttttcaaaaaagaatattgttattgtggcttgtggggaatagaagtggtacagtgaagtcatgggctttgggtttgtgttttttctttctcgtttatgtttcgacgactttgaaaactcttttggattttattgtctgatatctttgccggtttcaatacgagtcttgtctctgtaactgctgacataacatttcctttccttcttttactttcttgttttttacttgaataagtagtacattcgatcagtaacttttaccaaattttatcatttgttttaactttacctaatagtatgaatattatgtacgagtacaattctcttttcctagttcgaataacccacttcaagaaatggtaacaatacaatcattcacagaagttacatttttctaagaacagtttttcattctaacttttttggatggtacatttaaagatttattattggatttatgtatcaggtgttttgaagaaaaagatgagaagagatagaggatttgaagctcagaagtagagagaaagacctaaggccatattgtccatttgaaaattcctaaattgtaaactaatcagaaagattagtatgctaattatatgagtagaatagaattttgtttgagagttcttgtaaagatgagactccccatgttctattctatgttttgtgttttagaattttaaatttgatatccattgtctttgactaaattgatgatgtttatctttttgtgatggttacaaagttgctccaaaacttaaaactaatttatttttgatcgacgaaactcggtcaaaaatactatgatttgtgaaaaattcatgtataagattgtacatatactagggctagggccaccagtttttgaaaagttaggtctcaatgaaactgaagtaaatctttctaaaatactcattttatttttttctgtttgtgagttgcgaacctagtataatgaagattcggggtaatacactacactaacgtagaaccaacatttgcagcaaacaaagataataattgcttaacaaaactaaactaaatatgtctgaaaagattggtcggcttcaattcttctcactcaagtcgtcggtagctttgaatactcttaaccaatccttctctcacgcagaaaagagaacaaacatgtttctcggctacagattatcatctattgtgactgaaccatcaaacagttcgtgttcttgattatgcgacaccacagtcttaattattttcagaacttgaaccaatttctcatgaaacctcaaacttagattgcgacataaaccagaatgaaaaatagtatagcaataagaatacgacatttttcgatatttcaacatttcaaacaaaatgaagtgtgcaggatttcaatcaaattttttgcatcctacaggctacacactctattttttttttttttcgagttagaacaaaaaaatctcatttttcttcgctgtttgtttttctccacaatatacaaccattctcattctctttttcaaaaatgcaacatttgtttttcaaactttttgaaactcccatcaaagccccctcaaatcttgagtagaaaatgtgcctataaatgaagaaaacggatcctgacaaaaggtagaaccataaacattgtgcactagatgtagaaattggtgaaataaaaacaaaacaacaaaaactgaaaccatatcgactcaaaacttgatggacaaaatagtcctcccaactttgaagatgagaaagatttgtccatctttgtccttgtgtagcgatttttacggggcctaaaaatgtaatagaacttacttcagcgagacttgtaggtgtggattgctttaccaacgtcacatgtcaaggtgatcaccaaattacagctttctgcattattgactcatcgaaatctcttcttaggtaagatgtttcatatatagcttgtcattccttcatttaaatatatactttcattattattttttggtatgttttgattttgaatacattctatcatgtttattttgggcacatcccctgaacttgtcccctttgaatattttccaagttcaattatgctctttatggttaattttatgatcaagacttcatcaatgaatcgaaacgtttgcacacaaaaattgatagattaaaacgtatatttttggataaaatgggatgatcctattttaccattcaactaattccctaaaatgaatgtaggtagcatactcaccatgtttttaattttaatggatctaaaatattagaccgctcgctaaatacatataattagaaactttcaggattacattaatccctaatcgacatctacactttttgtttctagagagaaatcgacataaggagcaaaatcaaaatgaagacaatatgtaaacatcatcgaagaatataccacccaaaaaatctctaattatctttataaaaatcagtttctgaattcaaggaaaataacactaaaccgtaaccgaaattttacgtgattgtaaagaaaaccaataagtgacccttgaaatttcatttattatatattgacttatttcaaaatatttctattaaatccttgccaaaaattgataaaccgaatctagtcgaacaaacagattcgttgataagatatagtacttttttttttgtaggggttgataagataagatatactttgacatagtaaaccttgattatatgaagatgatttgcctaattacgataattaattaatattaaacgtcggtcatttactgctgacgtcatcattttaccttagtggataaggtattattctctttcttcaaaactcaaatcaaagaatcgcaactatacatttctccaaaatctccgagttctacaattgtgtgatcaatcaatcttctccgatttcaagcttctcgatcaaaagaatcatc

SEQ ID NO: 1630 - DNA, 3000 bp, Unknown
  misc_feature (1)..( 3000): cDNA_ID_2141872_gDNA_ID_1620427_Annot_ID_156758 3000 nt of promoter + ATG
tttatattcatatttatgcttcattctatcctcttctatgatcgaactgtgttgtgcttcgtctcgtgttattacctttagaagattaaaaacttcaaattatattttgaaggaataatcagaaactgtcatttacaaaaccaaagtattaagtgtaatagttttttaagaggaagaggattttgcttacatggttaactcggaaatacttaaaacgtcatcgttttgttgtttgtgatttaattgattggaccggtatgtaatgagattgatcgggttctgagaaattcagatccggttttagtgttgttgatttttggtcgactttaaaatctttcagtatatatgcttcgagttttgttttgctacgatttcattttgtgaaccaaaattttttaggcaccaccaatctagatgatcattttcaaaaacccaatgggtccgtagccattagccaatcaataactcacaattttcgtttagatgcaactacttaacattaaaagtgatgattataacaaatgggaataagtcattgggccacagcattgagttctcacaatttcacgtggagctgtctagaatctctacgaacatttttgtatactacaacatgtggaccgaacaaaaacaaaaagaaatatcatcccaaatactaatggcttacataaatttatgcactaaatgttataaagacaaaaaaggaaacaaaacatacaaagagataccgttcatacaataacattccttcgctgtccaattacgtttggtgagacaattccctctttctcatgcaaccagatttgtatttcacaactcatcatattactccaaaatcataacggtacccatttttggagtgttcttagcttataatggtaatagtgataggttttgttgttttgattgtgatctataatccttagacgcaatgaaaagttagttgtaattacaaatgtcgaccgcaacgtgtacaaatgtttcttgtttccaagtttgtggagtgggcacaagtcaaacttaactgcataaactaatcaaatggtaatgtttctaatcggataacgtttctgattaagttcttttcgatggacgattcttgttatttctcattcgattcgatcgtgtgggttaggtttatagattcaaatcaatcaatcttccatcaatatattttatgatgacccatgacacctagcaagtagcaacataacaaactgattaatatcattactaatatataaactataaactataaagtcgtggtattaatgagaaaatgagggcatgaatatttttattgttttaaattagtaaaaacaaaatttaacaagatgactcagtggcggacctacgttacaactaggtggagcacgtgccccatattaaatctactaaatattatataagttgttatttttcattatattacagttagctcaaatggtttttcggcaagcaatgccttatactaacccaagttcgaatctccaaaccgtcacttttgtaagaatattttataatctacatacaatttaggtaattaaattataattaatactatttatataaatgatgccccacataaaattaccttctagatccgctcctgagatgactcatcgtcgtttttgttgcgccgcatgagtgattactttcaaatgtgaaagcattttagatgagtcgttctctacggttgaattatggttttaaaatgaagctgtttaattacacgtttcatgaattaagtttggaccgtttcattttttatatcgttaggagatatgagcctgatctgatctatatttaatatagttcttatctacatgagtttctattatagttcttcctacattcatttattataaggttttctcattgccacgtataatataagcacatgcagatataagtaacatcatatcattttacgtacttagaaaataaaaacaatatggaagttagtcccaaaaggaaaaaatgatagtgatattgattttagatagtaatattataactatgtctatatagttcactcaatatccgattcattaagattgataagccaccatgtaacaaaaggataaattgggttatttgtctatacgctaaaccgatccaaaccaaattagagagaatagacagataacccaatttttcttttccaaatccaaatctgaagaaaaataaagatttaatttttttattatacatgtatttgaccatctaatgatgtaaagcagatgaatcaaagtgaaaaacatgaacgaccatcataatttcataggtgacaaaacttattcatttatgagccacacaaaaaaaaagaagaagtagaaatatatgtcgtcgacaaatattaataagtggtccaagaaaatagggttatcaataaaaacattttgtatacgaagaatacaagttccagttacggaaacaaaagtgattcacgtcgacataatgtcatatgattctgcgtcaaaaacgatcgtttaattgtctctttatctgtttatcgcaactttttaatcatttcattatgaatccttttgcatttcgttgcttgctcccgtataaccaatcggattctttatatgatttattaaaaataattgcatttggaaactaatataatcaccaaaacaatcaataaccaatccttgtctggtcctattttaaaccggagttggttattgactgtttctaggtaaactaactccggtttaaaataagaccaaccaaaggaggtttcgtaataatgtaacaaatcatgtccacgtaaacaagtgagtcacaacgtcaagattctcgatgtccttctataaattgcctctgttccataaagagaatcaccactcaaatctcttcaccttggcaccatctataaatatcctcaaacattagcctctttaagaaatcaattccaaccttttaaagattaatcttgaaaagtttctaataaaaggaagagaagtgatcaggtgtggtgacgagtaggat

SEQ ID NO: 1631 - DNA, 3000 bp, Unknown
  misc_feature (1)..( 3000): cDNA_ID_2141951_gDNA_ID_1620428_Annot_ID_156779 3000 nt of promoter + ATG
cgtgtctcactcgcttgagctgatgaagtgcgataatgacgtggcatgttgggatggagaccaaagaccagcattttattttattttatagtaactaattttaaaaaccaaacaacctgagattaaaattttaatttttactgtactgtagtaaatttgggtcctgattaagattaggcatatttatctcatagtttataacaagtagcagctgaaatttgtattactagcttatagtaattaaactaaaaactacgttccaggttttaaattattgtttaaagaagatataataatatattaagaaaatagttaattaaggtaaggaggaaagtagggtttggtctgtaggttagggttcaaagagggaagagattaggagaaaggaagcatgaaggcatgacccatttcttcaattagtgctccttaatctggtgacacgtgtaggtcccacgtgtaatcacttcacattgttatttttcaaaaaatcaattagtaaaaacaaaactttgtccatcatcaaatagtagtagttttttatgtgtggttacaatattgtaagaagctctcccccttttactatgtaattcaaccccactctaatttttaaaatatttatgtaaagctttacccgaaaacaatctatcatgggttggtaatgacacatttcattaacagtgttagagaatgattcctttaatttttctacagtaaaatgttaggtgatctcattgtactacatcggaaaatactcaaaattatgtcgtgtaatttagataatggacgaatatggttttgaaatatttatggatacccaacaagatttcttaactagaaagacaaaaaaatagagcacattttgctcgttttccatcaaccctatttctccaatttgttcacatcatgatcaaaaatacagtagcaattaaaaaataaaataacaaatataaatggctatatagatcaaccctatctagctattagtattactagaaattgacaataaaggaaacattcacgtgtgtgagcatgtactactctacacacatgtccacagttattatatactgagtactagtatacgttgatgttatcaataataaaaactcgaaattaagtattattttcttataataatctatttaaccatatttgctactgtactatttagtctattttcttttgccaacctttgtattaaatatttgtactattagtttcaattataggtctatcactatgtatatgtccgaataatggtctaaaattgttaatataaaatacagattttatttcagctaaagatagttgaaattacacaagaaaatagaagagataaaaatgatcaatcagctatgtaagacgtcgtatggatagttcaataattgtggtaatacttaaagacatatatcaaaattatcaacaagcctcgaacacaaactttacaaaaagcctgtgtctactttatgagtgtttgattattaaattgcaaggtcgtagtataaaaatttcgtaggctttcaggacacaagattaaattcatttatctaaatggtgatggagtacttttatttttatatatcaaaatggtgatgatatacgaagaccatatatttagattattaaagaaaaaacgagaaaagaagaaagaaaatataaaaaaatggtttttctttttaacggacaaagattcctacaatggttgcttttagaccacacacaaatgctacacagtactcttgggtcccacacctcttagcaagtgcgttaccaacacgtgaatttcctctccccattttctcgtccttttcctctcaatattgtatcgtctcgttttccttgtcatatcgcgtgtgacgtgttattggcttattgctgaacagtcttcttttttattttccatcgttatcctgatttttttttttttccaaatttgattttcatggtttgtaattttgcaatagattttgtgtttcacagagagatagtttacgtgttgttaaaaataatttgtgcaaaatagtgtgcgtgtgttaaatattaaacgatatataataattagaagaaaataaaaagttttgtcgcgattagttatttgatatttaccttgttcttttgtttatcgctgcgacaagcaccgacggtataaaatataaagaaaaaaagaaagagagatgaaggtgagatgaatgaaagagtcgcagcgacagatctgaagagataggagaaagggaatttgagacgctgaaaattccagcgtctacggaatggccgaattacagtcgatgcggcagagatgaaaaaaatgagaaatgaaagtgaaaaagagatgagaactttttttgggtcgcaggtagctgacgcagcaatcaacaaaagaacatggccaacgttttagtagatactactataaaagaaaaaggttgatttaattcattcgtaatttggacttaatttttttttaggaacactaattaatcttatttgccagctgtatgagtggactacaataaactcttgtctataaaccagattttcttcctttttaacgcttccacttacaacaatatatgtaaatatgtaattatgacggggcatacggaaatttaatttttgaagcagattcatcccattagccagctgtattaagtggtaatccaagagttaatttagttgttcagcaaatgattttagataaaatcaactactagtttaaaataactatcgaatgactgttaaggcttcgtattttttgttctgccatcaggatatcataaatatggttgaggttcgtataatattcgacgatcttttatatatctgagttgtaattgaattagagaaaataaaaaacagataatgaaacgtctttgtttttccataaaaagaaaaacagggtaaattaaagtacgagagattcacgagacgaaaattcctagaggcgcacgatagccaaaagaccatagaaaatgacatccgaaatatctttaaaatgctaaa

SEQ ID NO: 1632 - DNA, 3000 bp, Unknown
  misc_feature (1)..( 3000): cDNA_ID_2991306_gDNA_ID_1620428_Annot_ID_156789 3000 nt of promoter + ATG
aaaatactccgtcacaaatttcctccagtaaacaatactgctctcctacaaaatcagcaatgacacgactggtatctgtcaagagcttttttctagaatacacataaaacaaaaaatttgacgactacatgcacactcacagaaggcctttgtcgctgatgatataggtactgcatcaatcttcgagcgcaaacgctattttcataaggtcttggcccaccggttagttgcatttgcattccttgttgttgcaactgttgctgttgctgttggtgctgctgctgcaactgttgctgttgctgcacttgttgctgctgctgcagttgaacccgttgcaatggtgggagggactggagatattgttgctgttgcctcagcttttgttgctgaagcaagatttggaactgtggattttggccttgttgttgttgttgctgctgctgctgcaatatatcctgtctctgaagccactgacgtaaaatctgctgctgcaaagcatcatcctgctttgaatctaatctaggttttttccgtgcttgagttaagttgtttggatcctgaaagaacgattcagaagcacgccgagccatagaaagcgggatttgattagtttgtgatgtaggcagtgatgtagcactagagccacctagctgaacactaggatcatgccgttgtaccacagtcgacccatctacaactgatgaaccagatatgctgatattattagaagagaacgacataggagacgccggtaaacgcatatatgactcattattgatactagcactacgctgcaaatgaggaccacctccagagagccctgaattagcatctgtgacaagcgaactagctcctgcgcttggaccgggtgttgaaacactcatcataaccggattatgcatatcaccagaaaccatactgagattgtgatagccaccagtaggtccaccacatccaggagcagagttagatgaattcccataagaggaagtcaagtgagagttaatgaagctttgagattcatcatctccttgaaagaaaatcccagaagttgaagaagccattaaagggtaggtcccaagtgagtctgaaatccaaagtttcttcctcaatgcgacacaaatgtcccacctttactactgatacctacaacattatacatgtatcgattaaaatcagatcaataacattccctaacacatgaatctggtgcgttattaaagatacacagacattgaacttaaccactgaaataaaaaaaaaaccaaatcaaaaccctaattttaaagttcgttacttaacataactaaccgagaaactaaccaatccccaaaaaaaaaaaaaatagatagcaatcccttaaaaatctcggagttagatatttaaaaagcaaccgaaattaaattacaaaataaaaaagcgaagaacacggaaacaacgtacgaagaactgttaagtggagcttcgatcaatatagaacaaaagctgagagatcacaactagaaattaaaactaaacccagctgaattgaaacagaagaagaggaagataattaatgagacaagaagaagaagaagaagaaggaaaaaaatttgcctggaaatttcaagctgtaatataaagttaaaataaacaatcttcttatttattttgtgtttgttgtttttgcataaaaaaaaggaaaatcctggagagagctggaactaggcaatgaacttgacgcgcctttgttaatatacctagaggaaatcgtaagaaccaaatctgaccggacaagccggtgacccatctgcttatggttttgcaagtactttttattacccgctagtcaatactgacacgtgtcttgtttatcgtaacaagtatcgtatgaccgattggtaacctttagctgttttgattgcgtggcatattcttgaccttgcgatcaataaagttaaatcaattgtggatcgttcgattgagagcatggatcgtgtgcgacgcgtgtagtttaaagttgattgaccaaattatgttttttattttatttttttgtaataactgtaccaatgattgcagctgtaaatgagtgggcttacgacaaatatcctcttttttgcatgattacttattgaccccaatattactccctttgacaattcaacccctaaaatatttcgacaagatcatccaactatatggagctacgacccaacaggcctatttcagtatttttaggcccattattagcccataaataattatactctgttctccaaccgttcaaagctctgttctcgaacagtcttgaggtcaaacctaaccggtgtctctgtctctaaagcactagcttgttcaagaaatgatcaaagaaagctcgtgtgtggtccgtacggtccatggatcattcaaaacttggcaagaagacacacaacaccgacgataattctagacaatgtggatctgcaagaaagagagatttttaagttgcagagtttgtcggagttaaaggcgtgacgtgtaacacaagtttctgtttcagttatttcattagcttacctgtacttagaaacgtagaacacgacttataaaatacagaagaacgatgacaaataaatataaatgtaacaacgacattaatatatcgtcattatttatcagaaatagaaataaatatgtgggggatacaacatttatattaaatatatgtatctgtgatggactgataatgagacataacaacaatcacattagctgtcactcttttctttaacttttttttctcattgtataaaattttataaaacaataatctgctttatatgattcttatctttcttcttcttccacgagttctgtccagaaacagaaacattaatttattacaaaacaaagtgtatttacttctctttgctcagacgtttcttttttcttcttcttcttcttgatctttttcagaaatcaacttcatctcatcattcctctgtttttttctctctatctctcttaataaagaaa

SEQ ID NO: 1633 - DNA, 3000 bp, Unknown
  misc_feature (1)..( 3000): cDNA_ID_2142003_gDNA_ID_1620428_Annot_ID_156792 3000 nt of promoter + ATG
cagaacaccaagcactcatgtctgaagaacctgttcttgaacctctcatgcctttaatttataaaaaaaaaacgctttgaattctctctctctctctctctctccctgtctccttttgactttgagaatgaatgtataaattaggtttatttaacatgcgttgctcgagagggatttatatggcaagatagggtaggttagtcttttcagtttatgggttttgtgttgtgttgggttagagacttggtctcttgtgccttgcggtgaaggtcaacggttgtgactcactaaaggagattttagcactttctttaactattcctccaaatcatatccatcctccaaaaatggcaatagacaataattaattttatttttttacgcttaaaatttagtaatttttatgccaacttttttttagcaaaaaggaaaagagatatgtaaatattaaaagaaatatgtaaataaaacaataacaaaaaaatattgaatggtagagtcgtagatgattttattagattaaagttttataagaaattttctgatcttctcttttagtactggttaagatattggaatatttctttattaaatttaagatatgtttttgaaagcactcttgagctaattaatataatagttgaccaattgttttaatacttttacaaatttaaactaaaattccaaaactataacataatgtaatttctgagtgcaaaattcgccggaggctaatattaggcagggggtcttaccttagccgggttccttcatccaaagtggcaaggcaatagcctcgacaaaaaacaacaaaaatcaagatcaaaatcaaaataaaattcagatatcattgattcgtttatattcaaagttatactaaatatgttatatgtgtggttattgggtcacttttttgaaaaagatatcgtataaacgaaggaaaatggagaaaatgaggttcaaattaagaaacgtagccttccaaagtagccgccgtttaaagacacgtaagttattagttccacaaaagccaacgttacaactacctttctataattacttgattaacctcttgactttcaaaattttcagattacaaaattctctgttcattataaagtggttcatcagtgtgattatttgttcgttttttgtcaacgtgttattgatcgattcgattattcatatatttaggattaaactttttttttggaaccaactgtcattgtatcggttgtcctgtcgtgcatataccaaaccagtcataacatttgatgcaagtcgatgagttgagaatttatataattgattgaaattgttcaactagctatttttgttttgtatattaaatttaaaaatttattatgaatcattgataaatgataatgggtgagaaaaccaagtaggctactatacgtttcgacaagtttgaagaaagaagtggatttctcctataaccgtctaattaaatttccacatagtgataaatgcgtagcaaagtcttttattcctaatctcgatcctatttcagtaataacgtaagaagtacgttacaaaaaccttagaaaataaaagtgaaaaagaaacatctagccaaatatatacgtagcaggtggtggatctggttcatctaaccgacgaaatgtacttcacttttagaaaaaacgacttttgaaacgttttgagtttagcatataaaaactttttttttggtcgtcataaggtgataaggtgttaaaaccccaaaatggtgttgcaaacttacaaaaacgtggcgtgaaagaacatcaccacattaaattcaaatttaatccttttcttttagaagatactagactagtacatcgtgctgatttccaattggattggggaatatgatgtaagtgtaagaaagaaaaaaatgatgttagtgaaagaatatggttgagattagacaaatttgacgacgaaaaataatgggaatctttatcgttaatggcgtgcggaaaatgagtaagcgaaaggaggaccaacggttaaaacgaaatttgacaaagtccgatcggtccacattctacaaaagcagtcccaattctatgggtttatattttccacagcggcggaaagtcttacttcttattataagcatccattaagtgtttcatatgcacatatttgagcacgaaacgttacacaagtatcaatagttgtctttaatgtttttttagatggctgttgttcctttttttagagttttagagaagtttatatattaccaaccattctttacattgcctttcattactatacaatttgataatttgtttaagcgatggaaatttgaattatacaatcaatcatacaagtcagtttgacaaaatatatatcatacaagtcaatatttttgtttctgttactgttatccacgatattcgaactatgtctcgtagtccaagaaccggactggataaaataccccctcctaaacaagattcgaatttggttaatgggtaaaaaacttaaccttataattcactaccaaattctaacatatcactctcaaaagtataattttacccggataaatttatgagtttgactttgtggatgaaggttacatgggtaataaatggaggaaataaaaatttattgaggtgggggttcaaaaactttgtaaatgtagtactgtagctagttttagagaagttttattttatgacttttgtccaaccaacccacgagtccacggcccaccagcatgtgagatatttagcccaaaaatgagtaaaatgtagttgacccataatctcttcttcttcttctttttgacgttaattgaccctattgagcccatgtacacaaatacattgatattccaagaaatgtagaatctcaaggtgaatgaacattagaaactagccacataaaaattgtgacgataagatttatgctttcttcaatcaaaatgattcaaaacaaaccaaaaacatcataacaattgttaatagtgagagaaacatg

SEQ ID NO: 1634 - DNA, 3000 bp, Unknown
  misc_feature (1)..( 3000): cDNA_ID_3063456_gDNA_ID_1620428_Annot_ID_156796 3000 nt of promoter + ATG
atttcctttttcttgaaaaaacaaagcattcaagtactcaggcgcatatgaaacatatgaaaagtaaaatgcttcaatagtagagacagacatgccttggaaccttggtgggtaaaaaaaacatacttgaatggcttcataatgaagcaaaataatgagagaacatgagaagcatcatcatcaaaagccaacacttcaaaaagaaaaaaatggatatggatatccatgggaataaccccatcaaagcatcttctcctttttcttcaagcactcaaatgtcaaaaaggtcaccacttttattaaaactcatatatatacactgagccattagtccatgaataaccaaccagccttctctcaaagcaaaccaaaaagaaaaaccaacattgaaagaggaagttacgataagcggagcagtaatagggcatctttctattggcaggcgacttggctatttgtatcttttgtgttcttgactattggctatgtcacttgccaaaggagagttgccctgtcactgcttccgcttaaacacagtctataaccggttctgctaatatcaatccttcttttggacatgtccaaagccgagattgattgatagagaattggtctctctggctacaaaactagtgcggttctctcgatttaagttttaatagcattcactttgcacattgcatctttcacatcaaatttccatttcatcaaccatctaaacctctttgttagctttgatataagcaacgatctaaagtctaaaaaccattaatcctctgaaaaaaaagacaatttcgatggttctattatgtttctccaatgcagaaattgtatcgtctgaattatagtagattttttctagactaaagtgtaaaccaagacgaatctgcactaacaagacacaccaatagactttacagagaaaggttacgagttttgaaaatattaacggaccatagtcatcgcgaagacagttgaaacggctgaatctctccgatttgcagtatttcgcttcgggagtcagaaagcagaggttgaaggcaaacgccgctaacgtaaaccttctctttcaggtggaatctctattaaaaggcttttgggccttatttatagtcttgtatctcaataggcctttggagtttgggcttaattatctaaatcggcctttggacttatccaaaatattttattcaactgcttgaacgtctcccttacatatcgaccatttcattttttaaaaagatccaacatttggtgaggaaatccaaaaatcgaatatccaatcagtattaaactaagacttattgcccaaattgtatactaattcagttggaacggtaatcgaacaagtgaaacgaatcagtgcgagacacgtgacaaagcactgacatagtacgatgatgtcgatgccaattttcaacactgttttctttttggcgtgggccttttcgatactgtttcatctcctctcgttttctcctaagattaaaaataatagaaagaggacaatgtattattattctcttaactcatagacataatgacacgtagtaggttctctagttcctatcttttgatttctgttaacgactatgttcattaggagctactagtcacaatgccttcaattaattttaacaacatattttagctacgagcttgtcgagaaatcagtttgttaatactattaaaaaaatagtattcacgaaaattttgaaattctctactaaatttttattaaatcacaaaacttttaaaattgaccccatttaaattgactcccactaatcctataattaagtgttatgttctctagtaatgacgacatcgttagaaattcaaacactaataaatgattttattaatattgctcaaagcctcaaagtcgtccatcgatcttctctcccccaaaatttcctattttagcggagactttccaaaatcccttgttctttctttcctcgttaagtttgccaaaatagggtaaagaatatgtttatctcgtagaccaaatggatcttcctaatgcttaatagcttttttatatatatattttaagttatatttcgtacggctattattttaatgcaacatttgaacctgccacgattgtcttttttctcaattatataaataaaggttgaaatactataattggtgcacagctacaataattatgatatttacttccgtaacgtgaaggagaaatatctaataaattacatttttatataaaaactgtactaacttacttaaaatgagagtgaaaatactaaatcgtatgaatattacagtagtatttaattaccattttattgaaatttgatatatatatatatatatatataaccatatattggtatatacacacatttttgttgacaaataaatcaattcttataaccaagtttggttgttttccagataaataaaataaaaacaagaattatcctgtttcttgttttggcatctaattatccttttgtatgtggggaggagaagatatggacacaaatttaaaatactctatacataatttttattattatcaagaacagaaatgaaaataagaatggcatcattttattgtgacccataaaacaaaaaagaaaagtgataaaacataaaaaaaaactttctataaaaaaaaaaaacattaagaaacttgccccttccttctctcacagatcattctagggctcctgacagaaaaaccaaataccttttcctctttccatttttgtagaatttcaaatctttctttcctcaatctttcacaatgatcttttcctgtgaagttcttgattttaaatcaccctttcttcactactagcttatctcttcttcaattttctctaccgacattcaattactctccctattcggtgagatctctctctctcttttatgactttggttatgatgactggtcactggcttgtttagggtttcaatctttacagatcttgtggcagaaaaaatcaagtcaaagcaagaaaa

SEQ ID NO: 1635 - DNA, 3000 bp, Unknown
  misc_feature (1)..( 3000): cDNA_ID_2142022_gDNA_ID_1620428_Annot_ID_156798 3000 nt of promoter + ATG
aattgttgtaccaatgttgatctaatcaagtttttctttaatattttttttgccgccaaaaggagagacctaaccatgttcttaaaacaaattgggagctgactcagtagtttggaaaagaaagaacttggaatttttggttcttttcttagaaacttctaacgatccaacctatagcaagcaatttcagtaaaacaaaacattttggaaactcgtcacccgatcatgttgtcaataccttggaaatttattactgcttttgtcgtctcaaatcaactattttgttgagtttgcaacatagtattcaacaaattctcaatatcaaaaatacgtcttcaaaataaagtttgaactaaaacaacgtgaaatggtctctaatgttttaatgaaatacaaagcttcttttagttgttgtacctatgtcgttctaactaagtcttgaaaattaaatttcggtactgatatggaagaaacggcttgtgggcacaatagtttagtcatagactcacaggggacatttaaatgaaatttatttaaactttcagagttatatttcattattagaatatggacctactccttatagaagctactacttgatttagcacattaatgttgccactctgccatacgggaaaataaaatgatacaacaacattatgtttgttacgaaagtttcgattcactcacttggcatttaattatacatacgtatcacaaacaattattgcatgttttcagaatcaaaagtccaaactaattttaaaatataagtcataaccatttaaattttcaacgataaagatttatgatctcgacttatcaagcaatgacgtcttaaatcactaaataacgaatgagattattgcatcgtctaaacaggttaacaatcttaccatgttattatgactattgtttttactaagtaatggaccaaaactgagagtagtagttttaaataaacacaatcctctatacatgttaacaaatattaactcaatgactaagattgagaataccgaaaagattaaataaatatactaatccgttcatgttggacttagaagataagtaaataaccaataaatggtgtagtttgaattgtgattaccacttggaatcttgacataaacatatctaaaatggtccatatgtattagaagttgtggtccctttttaggtgatagcaaacttgcaggatgttgcattaatgttttatagaagaaaaatccagaaatgtaaactgagatctttcttaattagtttgagactggagagacaatatacctctttggctctttcgtctcttcttcgttttgtttgttttaagcacaatttcttaaaaagatcagtccttttctctgttctttgtttttagttttgttttaattacaaggacaactttaatttggattgtactatgaccatacctaaaaaaaattcatgtgatttgtattggctacattcacttaaataataccatgttatggtccagcctcttctcttcatttatgaatttaaattgtacaaactatatcattctttctttcttgtatgcacactatatatatgggctatttttgttttgctttcactgctatctgaaattcttatactgtatatacatagaatctaaggaataataaatatatgtatccgtatgaatagaaccgatatgcaaataaaagacgtaaaactaattaatactcataagagtgatgaccaaacaacggtcatttgggtttcactgtgatcccatctacaaattattactactcattagtcattactatgtagtatatagtactacctaagcggtgaatttcacatcacatttattgatagataagatcatattgtacttgtttaatggtcactgggcattaaattatgagaaagcaagtcaaaatcaatcttaaggataaaatttgaaaggaggaagacgtcatggtttgaaacataagggtcacgattgaagatcccctcgttgtttggtaataccgccatggagtttgtgtacgaatcttattgttgtttgagcttttgaataataataattttaaaataattagtgttgtggattcttttataaacagtgttgtagttgcaagtctgacatagtttgtaactaagcataggcatattattattttaagaaattcgcatgaacagtttgtattattctaataattctcccatggcatatcgttatatcgtgatcagtcttaaactcttaatgatcataaatttaagacgttagaaaactgtcgcagaataaatatatggtgatagcaatcgagagaatctccctattcacgattggttattgctagagtcgccaaatatttatgaaccaatgacacgataatacaaacaaaaatttgtcaatgtcgttgtcaaaaacaaaacgatgagacattttttttgaaaattttacagttcaaactgtgtgttgtttttcatgtattgattatttagatttattatgctaacgagttctgtctgttgagataaaaaaaaaaaaaggaaaaaagagagctagagatgtattttttgattctttcaagtttcaacaaatatatatacatcatgtgataccgacgggattacaaaacattacgtgtatttcaaagaagccaaaacaagcaggcccctacttacctttttctaaccaaaaatgtaattcttattttcattacaaataaccatttttcatttttattcaaaatattaattgattttagatttgacaaacttctcctaattaaaaccctacggaaaaatagttgacgaaaaagaaagcctatgaaaaaatatacgtatttatttattcatacggtctcatggatccactttctctcagctatatattttttaatcttataaaaaccatttcctctcttcatatttcttcttcttcctcctcaagtcacaaaaccaattcaacaactcagacaacaacagagctctcatccttaaaacttgacaaaacaaaaaatg

SEQ ID NO: 1636 - DNA, 3000 bp, Unknown
  misc_feature (1)..( 3000): cDNA_ID_2142011_gDNA_ID_1620428_Annot_ID_156795 3000 nt of promoter + ATG
tatgactggtttggtatatgcacgacaggacaaccgatacaatgacagttggttccaaaaaaaaagtttaatcctaaatatatgaataatcgaatcgatcaataacacgttgacaaaaaacgaacaaataatcacactgatgaaccactttataatgaacagagaattttgtaatctgaaaattttgaaagtcaagaggttaatcaagtaattatagaaaggtagttgtaacgttggcttttgtggaactaataacttacgtgtctttaaacggcggctactttggaaggctacgtttcttaatttgaacctcattttctccattttccttcgtttatacgatatctttttcaaaaaagtgacccaataaccacacatataacatatttagtataactttgaatataaacgaatcaatgatatctgaattttattttgattttgatcttgatttttgttgttttttgtcgaggctattgccttgccactttggatgaaggaacccggctaaggtaagaccccctgcctaatattagcctccggcgaattttgcactcagaaattacattatgttatagttttggaattttagtttaaatttgtaaaagtattaaaacaattggtcaactattatattaattagctcaagagtgctttcaaaaacatatcttaaatttaataaagaaatattccaatatcttaaccagtactaaaagagaagatcagaaaatttcttataaaactttaatctaataaaatcatctacgactctaccattcaatatttttttgttattgttttatttacatatttcttttaatatttacatatctcttttcctttttgctaaaaaaaagttggcataaaaattactaaattttaagcgtaaaaaaataaaattaattattgtctattgccatttttggaggatggatatgatttggaggaatagttaaagaaagtgctaaaatctcctttagtgagtcacaaccgttgaccttcaccgcaaggcacaagagaccaagtctctaacccaacacaacacaaaacccataaactgaaaagactaacctaccctatcttgccatataaatccctctcgagcaacgcatgttaaataaacctaatttatacattcattctcaaagtcaaaaggagacagggagagagagagagagagagagaattcaaagcgttttttttttataaattaaaggcatgagaggttcaagaacaggttcttcagacatgagtgcttggtgttctgctgttgtgttattgtctttaatacttttgttatctgttcgtgaaaacaacgcttctaattcgattagaggttctcaattctcaacgaaaccttgtgaggagatttacatcgtcggagaaggagagacacttcacaccatcggcgataaatgcggcgacccgtttatcgtggagcgaaacccgcatatccatgatcccgatgatgtctttccaggtcttgttctcaagatcgcacctttttacttcaacaggaaattgtaagacatataacaaatacgtttcttttttctttctcttttctcttcttttaaaattttgtttgaagcatactttaccttaagtatgtatgtatatattactaaaggattcaaaaataaatacagagatttgaaagaaacagagcaaaaacagagttgtgtaccgtgagttgattattcatgttttgtgggtttacaagttcatttagatttaggtgtatatggtaattatcgatgatttttggtctttggggtggaaaatttgattaaacaaaattagtagctgatgaatgcaataacgaaacgccaagttagaaaaaggtcaacgactttacagtctttactagtggcaaaatatcaataaaggagttatgttattctacaaataaaaagcttcatcgtttaataattcttccacttatagaattctcgtatccaaagaggacagattatttgatgaataggtgtgctatattcaatgatgtgtgaatttatgcttagaaactcgtggatgaaaatatgaattttattgatatatacgaatttcaaagaacaatagccgcatggtttgtgtctcttgctataatccaaataaggattttgttttggcaaaaaccttaagaaatttttacaaatacatggtcaagttgcccattcccaatccatatcagttcttcaactttcgagccctaagccatcgtttcattgacttgtaatgtgggtcggacctgattatgttggaaacccaaacttgaaatttttgcaagtgggcttaaagttttgaagttttttagcgatatgggtaagtagggattttatggatcgcatagtggatatctttaaagttagaattggtcgcatgatgcccaatgagtgaattatgtcattatgttaccttgatttctccctggtcgaagagaacttattcgtaggtttatcgaatttgacataatatcatatgttccgagaatgctttaaaacttcatattctgttgcttgttaatgtaatatgatgtattattatcacaacaataaagtattatctgaacgttgcctcattcgtcccgttacaaataattatgtttgaaatatatatatgcaagtcaaaaatatctcattctcaattaattacataactattcaaaattatcaccaactctagttctagacttccttttttgtatgcaatattccaaaaactaataaactacacacctagactaattatgtcgtcatctcctaacactatagcttctaatttcaaaaacaaaattcccaaagtaaaagtaaaatgaacattattaccgtgcatgtcgacattactcccaaagaattgcacaaaatctccaaaacctctgtaaacaagaatctcttatatataagaaacgtgagttgttcgctgttacaaacccacaatcaaagccacaaaggaagaagaagaaaaaaaacaaaccctaacttttgtcaaaagtaaacg

SEQ ID NO: 1637 - DNA, 3000 bp, Unknown
  misc_feature (1)..( 3000): cDNA_ID_2141999_gDNA_ID_1620428_Annot_ID_156791 3000 nt of promoter + ATG
ctcctaaacaagattcgaatttggttaatgggtaaaaaacttaaccttataattcactaccaaattctaacatatcactctcaaaagtataattttacccggataaatttatgagtttgactttgtggatgaaggttacatgggtaataaatggaggaaataaaaatttattgaggtgggggttcaaaaactttgtaaatgtagtactgtagctagttttagagaagttttattttatgacttttgtccaaccaacccacgagtccacggcccaccagcatgtgagatatttagcccaaaaatgagtaaaatgtagttgacccataatctcttcttcttcttctttttgacgttaattgaccctattgagcccatgtacacaaatacattgatattccaagaaatgtagaatctcaaggtgaatgaacattagaaactagccacataaaaattgtgacgataagatttatgctttcttcaatcaaaatgattcaaaacaaaccaaaaacatcataacaattgttaatagtgagagaaacatggcttcaacaaaaataaactctttaacaacaacaatctacaattacaaatccccaagaagatacattaaccacaaatcccaaaaccaaatcaaactaatttcaaattccctaaacccaaaacccaacacaacacagcttcccaacactctctacagtgtcagcttcaagactattggaacaggtaagcttggcatctccagatatcccgatttcgaatactctcctctaggtggctctggtgccggaaccgccaagaaaatcgacgacaaaaacagagcatcaaactctgaattgtctgtttgtttcaatgtggccactctttatattccttctctcactagccaaaccacgaagtttctcggctttccattgccaccgtttctaaaaatcgatatctcaccggagattttccaaggaactatcaaccaagaatccgggaaggtgaatatttcctaaatcctctgttttttgttagtcaagaaatcctctgtttccataatcctctgtttttgttcgatttcttttacaggtggaattggagtttatggcgaagttctttttcacggcgggaggagggatatacagagctccggcgttggtggtgagaactgtgttgacgacggaggaatcgataggagagaacaagagagggaaaggagagagactggacgaagaaggaaagtgtagactcgtcggcgtcgcgaaagttgagaccatcgacgatttgtttatgaacacgttcctctctcttccggcggagtgtctcgccgatctacaagctattatttcagtctctgataatcaatcttgaatcttaatgataaaccataaatatttgagttgaagttgattaattatttgtttacttaaaaaaaagtcttacacttaggatttgaataaagaatatgtaatgggtggccatggaaaataaaagatgagataatgggtgatgatgagcatggaacacaacaaattacagcttgaagaagtaaatgcgaattgacacatatcttaacacttgtttgtttgtgcattgtgattacgaaatttatatagtttatttgaccgacgttgtaatttgatgatttttgttgttgttggagaattgattgaatactgtagatgactacttgtgacgaaagagacttttttaatatataaactctaaagtctaaactgtaaaaattacttatctccaaatttcagcttatttgtctatttctcttaatagtagtataagccaaggttccaatgtgtttgccgtgttttatgcacataaaagggttacgttacacttgttcaaataatttaattggttggaaaaatggaaaaagaagttacatgtaaatttgttaagagaagaagaagatacgagtttgggaaaatggaataaaatcttcctcgtacctcacaagtcctacaaaactctggcaaacactaattaccacgtgcaacataatatcatgtttgatcttctttttactaacgtttcaaaacaaatatttcttctcttttagttctatgattgtaactaataacaatgataataatgattttttgtgtgtgtgtcgtatcactcgatgatgcttaaagattattgattgatcgcaactacaaatctactgattcgttttttgactttttattctttgtttattttggcggggactcgtgtgtagtttaaaggagagattaactataacattaatagtaacaaaaataaaaccagtttaaatcaaaactaaggaaaatttcctcccaaaaattcggggacaagttcgttttcttctacacgcgcaggtcttgaacgtgaggctgtggaatcatcgtgttgtcatgtattacaatatttgtcatcgtttttatttgttttcacgttatctaaactattatacatttgttttctttttctcttatttgtcatagattcttaaccaaaaagtcagaatacttcctaagacttttggtggaagataaacttcttttgtcattgagtatgttaaatagattaaataaataaaaaattagcttcaaaattagatagaaataaaaaattaagaaatggatggtctgaagaagaagtcgacgtctgtgaccactacaactcccacgcgtcactctctctttcgtcacgcgcttgtttcttcacttcctccttctctcaccctcacgggatttctctctctctctctctctctcttttgccgcagcgagatctctctcttcttctctctctctctggctctatgcatccacctgtctccgtaatttgatggacaagaagaaactgccacaccctaacccattcaattcctccgatcacccaccgacttactctgctctctagaaatttccctacgagaaagcttcttccttttgtctttttgcttctcctttcttcttctcttctatttcttctctctactctctactttcttctgtttttggtaatcggatg

SEQ ID NO: 1638 - DNA, 3000 bp, Unknown
  misc_feature (1)..( 3000): cDNA_ID_2141987_gDNA_ID_1620428_Annot_ID_156788 3000 nt of promoter + ATG
tcgagagcctcaacatacttgtgtaatctttcctccttccaacaatttgtaaatcgaatcattagattctaactatacataaaaaataataattgtcaaagcgacttcaaaaacttgaataacaagactttatgggtatgattggtaattacttatagaatggttccataattctgcaaatttatgaataaaaattaatagagttgtgtcatctagaattctaagtaaaatgaagaattagattagtaacagtgagtaataaaacatgatttaagtacctgcatcttcttcttcaatttaacgtctccatcacctgagatggcatcgagcttgaccaattgattcatcaacatctccatcaaattctcaagattcttctcttcaactttccctcctttaccaatcactgtatcaaacgccgacagctaaagtccaaaaaccaaaaaaaacaattctgattcaagttacgagacaagagcgttgttatccggaaaatttaaaattatgtttcttaagttacttgtccggcgagtctttcgacttggaaactaatatcagagattgctttagatgatttctctttggtggcgattttcctcaactcaaggagacgtttctcctgagaaatgggatcttctataagaataagtttcgaacgatctttgacaccagaaagatcaagaaacatctttgagtctctttctttgtctttgtatataatctgcatgtcttgatgatgaactcctgtcgcaccagacaatatcttctttaattcccctgttgttaaattcaacaacaacaacaatcaaattccaaaaacagagcatactaatagtataaaggaaatactgtataactcggaatgttttgtgtcgtttaccgaaagtagattgagagttgatactgatctcgtgatggaccgacccgtatttgacccgaacccgaatgccacgtggcacgcttgagctatgatccgtccttttctgtacaaccattcctccaggtcggagctccatttcaccgtcgccggaagttgttgttccgatactcattttcatcattttctttattaagagagatagagagaaaaaaacagaggaatgatgagatgaagttgatttctgaaaaagatcaagaagaagaagaagaaaaaagaaacgtctgagcaaagagaagtaaatacactttgttttgtaataaattaatgtttctgtttctggacagaactcgtggaagaagaagaaagataagaatcatataaagcagattattgttttataaaattttatacaatgagaaaaaaaagttaaagaaaagagtgacagctaatgtgattgttgttatgtctcattatcagtccatcacagatacatatatttaatataaatgttgtatcccccacatatttatttctatttctgataaataatgacgatatattaatgtcgttgttacatttatatttatttgtcatcgttcttctgtattttataagtcgtgttctacgtttctaagtacaggtaagctaatgaaataactgaaacagaaacttgtgttacacgtcacgcctttaactccgacaaactctgcaacttaaaaatctctctttcttgcagatccacattgtctagaattatcgtcggtgttgtgtgtcttcttgccaagttttgaatgatccatggaccgtacggaccacacacgagctttctttgatcatttcttgaacaagctagtgctttagagacagagacaccggttaggtttgacctcaagactgttcgagaacagagctttgaacggttggagaacagagtataattatttatgggctaataatgggcctaaaaatactgaaataggcctgttgggtcgtagctccatatagttggatgatcttgtcgaaatattttaggggttgaattgtcaaagggagtaatattggggtcaataagtaatcatgcaaaaaagaggatatttgtcgtaagcccactcatttacagctgcaatcattggtacagttattacaaaaaaataaaataaaaaacataatttggtcaatcaactttaaactacacgcgtcgcacacgatccatgctctcaatcgaacgatccacaattgatttaactttattgatcgcaaggtcaagaatatgccacgcaatcaaaacagctaaaggttaccaatcggtcatacgatacttgttacgataaacaagacacgtgtcagtattgactagcgggtaataaaaagtacttgcaaaaccataagcagatgggtcaccggcttgtccggtcagatttggttcttacgatttcctctaggtatattaacaaaggcgcgtcaagttcattgcctagttccagctctctccaggattttccttttttttatgcaaaaacaacaaacacaaaataaataagaagattgtttattttaactttatattacagcttgaaatttccaggcaaatttttttccttcttcttcttcttcttcttgtctcattaattatcttcctcttcttctgtttcaattcagctgggtttagttttaatttctagttgtgatctctcagcttttgttctatattgatcgaagctccacttaacagttcttcgtacgttgtttccgtgttcttcgcttttttattttgtaatttaatttcggttgctttttaaatatctaactccgagatttttaagggattgctatctattttttttttttttggggattggttagtttctcggttagttatgttaagtaacgaactttaaaattagggttttgatttggttttttttttatttcagtggttaagttcaatgtctgtgtatctttaataacgcaccagattcatgtgttagggaatgttattgatctgattttaatcgatacatgtataatgttgtaggtatcagtagtaaaggtgggacatttgtgtcgcattgaggaagaaactttggatttcagactcacttgggacctaccctttaatg

SEQ ID NO: 1639 - DNA, 3000 bp, Unknown
  misc_feature (1)..( 3000): cDNA_ID_2141959_gDNA_ID_1620428_Annot_ID_156781 3000 nt of promoter + ATG
ccctttaccagcaagcggactttcaagggtcttgcaaggtcaagaatactcgaccttgaggacgaaacatactgagagtgtagagtgtgatgctcctgagaattctgttgtctggcaatcttcagcggatgatgataaggttgacgtggtttcgggttctagaagatatggatctgagaactggatgtcctcagccaggcatgaacctacttacacagatttgctctccggctttgggactaacatagatccatcccatggtcagcggatacctttttatgaccattcatcatcaccttctatgcctgcaaagagaatcttgagtgattcagaaggcaagttcgattatcttgctaaccagtggcagatgatacactctggtctctccctgaagttacatgaatctcctaaggtacctgcagcaactgatgcgtctctccaagggcgatgcaatgttaaatacagcgaatatcctgttcttaatggtctatcgactgagaatgctggtggtaactggccaatacgtccacgtgctttgaattattatgaggaagtggtcaatgctcaagcgcaagctcaggctagggagcaagtaacaaaacaacccttcacgatacaagaggagacagcaaagtcaagagaagggaactgcaggctctttggcattcctctgaccaacaacatgaatgggacagactcaaccatgtctcagagaaacaacttgaatgatgctgcggggcttacacagatagcatcaccaaaggttcaggacctttcagatcagtcaaaagggtcaaaatcaacaaacgatcatcgtgaacagggaagaccattccagactaataatcctcatccgaaggatgctcaaacgaaaaccaactcaagtaggagttgcacaaaggtaaatttttgcaatatgtagcacaaagtgtatgaggttgtgataacccttgaatcacttttcaactaacacatgacacattgatgtaaaggttcacaagcagggaattgcacttggccgttcagtggatctttcaaagttccaaaactatgaggagttagtcgctgagctggacaggctgtttgagttcaatggagagttgatggctcctaagaaagattggttgatagtttacacagatgaagagaatgatatgatgcttgttggtgacgatccttggcagtaagattttgcaaattttccatcttagtttatatcgatgttagtgtttttcttataacactgacacaatgatctctcttgcagggagttttgttgcatggttcgcaaaatcttcatatacacgaaagaggaagtgaggaagatgaacccggggactttaagctgtaggagcgaggaagaagcagttgttggggaaggatcagatgcaaaggacgccaagtctgcatcaaatccttcattgtccagcgctgggaactcttaaacaaacaaaataaccaacaacccttttgctgcaagccgaggtatgtaaaagcttttgagatattagtagactagagacacagccaaaagtttatgtcattacattcgactgatgtttgttctgttaatgacagcaggatgggggtcgattggtggagactggagagcaaaatgggatgatgggtttaagataagatattaaaaatgcaatttttgaagtattttgttggccacttagataattagcatcttccatcacccttattatctatctaataataattaatagatattataaagtaaaacataaaaaggttacaggtattatatagtagaatatgaaaagctcttttataagtagaatatgatggtgtggagttgtagtcggaggctggtatcggttctttttatggatgtatttttttccttcttccaaagatctcttgaagtctttttattgtttatattaatcccaatgtacataagttttcaagctcttgcccttttttaattatcttgtcgattcacattttctcaacttattctcttgctgacttttggttttggtctggtcttgtcggtattttgcagcttttcgtattagacggtgatatagatatattcacgaaactgtaagacctcttaacaaacggattccatttcgaatccttacattaaataaattcggatgtttctagctacaatctgaaaattaagcttgcaatgagcaaaacagtgagccctctttttaaagtactttgaaaaaaaaactggatgctaaaatttgttgtttcccttgtaacaatgaggaaaacaaggtttgggttttcaagtttatttctctagctatgctcatgtccatataaacgaatccgctgaaaaacagaaagatgacaccatggcaaacacatgatcaaagtttcgtgatctatggtttcattctatcatatggctcttcataaccaaacttgtatttaggtagaactctatctaaatcaagactttaaaccatatgaaacacacaacaccggcaactctggcatactaccgccttaagccgacaatctcaatcgtcacagaaacacaacaaacattttatcaaacttgctgagtttatggaaaaactttcaattgtatcagtttatgccattatcttacaacaatacaaaactgcatagttaaataagtggttctctagctccttgtaattctaccatcgacacatatagtgataggtctgatatggatgacacatcaaagcagacaatctaacaaaattattaatttttccaaaattccaaataaacaataggataaagtaaacaaaatgtgggacctcaccacttggggcacactatatgagggaataaacacgcaactccataggaagtttcttgaagcctaaaacattacgctgcttctcgatcttttaacccccattattacatattactccttcctacattattcttcttctgctttcgtgactttcaggggacacttttgtttttataacttacgcttaaaatcctatgaattcgccgccggttgacgca

SEQ ID NO: 1640 - DNA, 3000 bp, Unknown
  misc_feature (1)..( 3000): cDNA_ID_3063468_gDNA_ID_1620428_Annot_ID_156784 3000 nt of promoter + ATG
cagatttgtttcagataagcattcataattttgtagtacaaattttggaatccaccttatctatatgtgaggccgttttggaatccactgacactgagccttgaattttcattgaatgctacaaaaaggaaaacaaatgaatctaatttgatactaaataaatcataaaggaatatatagagaaagggtgagttacaagttgcagtcggtgttagggtcgatggtgaagcccaaaacgacgccgcagaagccagacaaagtagaaatggcggtggcgttagagttatagacattgatgagatccatgaagcagttacacagccactttctcttctccgacgaatcagagtaagttccgatcacagtcatcgcgtcgcagcaactcgaccctggtatcggatccggatacccgtagttcacaaactctgtgcacgacgatatcagcgttcccaccgccgcacaatccgctgcgttttccacagtggctgaacatatcgtttgcagtagtaataagaagagagacaccaccggagagaatgatctcgtcatatcttttgattattaggccaaactagttaggacgttttcgcttggtgtacaaggtagggtttatagacaacacgaaaaacgagcgttgggagtgtgtttggagttggttttcaacagaggttgtgtgaacgcgatgaggtttatatgaattatttccacctctaaaaacaagccatatcatgcgaaaagtgattagggtgcgcacaatagtgtcattgacgtgcacgttagcacatatgaaagcaatgttggaagtgaattgcaaaggaaaaggtggagttcatatagagaagacaatcactcaatggttaagtacttttatatataacaacctatgtttcgaaaccattatatcgataaaaaaaattgtttgaaaacttctaactaatacaaacacattgtattctccacatgatatggaacacccaatatatgaataagatgattacgctttatttcctccgcactagtaccttcgattccaatgtgtctcatacgatcttttcgcttaggataaaaaaaagactacatataccgtgtcatgacagataaccatcttattgatgaaaacaatctcaccacttccaatggagctatctacaaccttggaccatccttgtttattatgatcctccataacccatattcccacgctcctctcataacttacgaatcctagctttccttggtaatttatcagagtcgaatccttgctatcaatcagctctttcggagcattcacatgatcaaatttctcggacctaacatcaaaactcaccaagaaaaatgtagaaccatgatcttcagtggctcggtaatagatagccccgttgatgcaaactgcgggtagccacggatagtgatgttggataccgcatttgacgttcctccattgcttcttgggatctctcaatgtgaaaacaaaacaagcattctcaaactcctccgatttagtaatcatcaagcacattactttgtatttattcttgacaggatcgtacccaaagacgaaaacgtgattgaataaatcatctatgagcatttagatctttggtaagagaagagactgcctcgtagtagggttgtatatagcgacagaaatagaactatctgaacaacataaaatcaaaccacgaatgtagccataacagtcgaccgttaatccagggattgatactaattcttggttagtgtttagaggatgagtgaagatgaaaaaagaagatttgtctgattggtagtggaagatgagaaggacatcccaccactgctgcggatgagtcatcgaacgggccacgatcgaatcaatgaagtctctacgggatccgataatggttgaccattgtttcgagacgcattggaacctcacgagagacttcgcagggagtttcttgagtatctccaccgttatatcgagagggatatcaatataacgggacttttccctagtggagatttcacggtatcgacgacgttgtgatgagatattgtagttgctctctttgcttcttctcttcatcacgttaaaccctagagatttgattatatggaagatacaacgagggctttacatgttcatatatttatcaatataattgtgagtactaattcgaaacggataatgaaaatatattataatagaatttttacaataaattaaatttctattacaacaaactaaaatctatcttctttagcaaaaaaaaaaaagacatagaaatcttctcacatggtacgataaattttagctgaggtatcgtttggagtttggacattttttcaaaagtcaaaagtgatctggttcggtccgatttataaaccaaaccgaacaaaataaaccagaacggtttaactaaaatccctaatttcccgtacgatctgaccttcctttagtgatctcataacttagccattctaaaacccattcaccgtctctgtttcgttcgccgtgattcatagtcgtctcgtctcaccgtcaccatcaccgtcttcttcttccattgacaggtttcattatttctgaagattctctattcaagtagtttttaaagttttcctctttgttactctgtttggttttttgtttgattttaacatttctttgttcccccgatttatcatcattttcaagcttaaatttttggatatgtttgcaagtgcctgaagctgattgatatctcttatgaaatctctctgctttcttctgattctgtttccttcaactcacagttcaatctttagtatgctcttttagtaatctcttctatgatttgttgtgggttctctattgttttctatacgtatttccaaaaattgaaacttgattatgtgtgattccttttaagcaagatcaatgaataaaaaagtttgctctttgatctgaaaatcagcaatctattggatattgactttgttcttactactgtaggatcttgtttagattctgcaatg

SEQ ID NO: 1641 - DNA, 3000 bp, Unknown
  misc_feature (1)..( 3000): cDNA_ID_2141915_gDNA_ID_1620429_Annot_ID_156809 3000 nt of promoter + ATG
ttagttggaatatgctctatggatgctgatcagtgaccactatctaattgactaaaaaaataatcatcattcatccaaaatatcctaaatagattttaaaacacccaattacatcagcaactatatatgttacgtgagcaacagcgctatacatgtagaaaataatttccagtttttataacattacaagatcaccataaaaagtacggatgttaaaatgggctaaacatttagagtcggcccaggtccgctaaaataaataaaagcccggtcccgattaaatcaaaggagaaacgtttgggcttaaatatggttttgcagaaaaggtttcgggcttttatagggctggccctattatactacggttctgttcgtttctccatttgacagatccatccaattgatccattcaacatgtccatctagatgattcattcgactcttgttcgttttatttttagtcggttcatttgactggaccatccgaatgagatgttgttcgtttacttatctctatctccatccaaatgatttgcaataatacaaatacctaaaatacccatgctttcatctaattcttaatctaaaatatatttaaaagtaaataaatttcaaataatagttttttatatttataaatttattttacggttttggcgggaaaacgtgattttatgatttgacgggaaaactcgattttacagttttggcggaaaacaaaattttacgtttttggcgggaaaacgtgattttacggttttggcgggaaaacgtgattttacggttttggcgggaaaacgtgatttttgcggttttggcggaaaaacacgattttacggttttggtggaaaaacgtaattttttggttttggcaggaaatcacggttttacgggtttgccgggaaaccgtgattttgcggttttggcgggaaaatagaattttacgatttttgcgaggaaaaaatgattttgcggttttggcgggaaaacgtaattgtacgggttttgctgaaaaacgaattttacggttttagcaaaaaaaatgattttgcggttttagcagaaaatttaattttttattttttaaaaaataattgtaaaataagatttaaatctatttatttattttatctaaaaatacatctaaataatcaattgaaataattagggtatttttgtcatttgttattttagattgaatcatctccatccaaatgatccaatttagttcagtcaaatgagtttcaaaatttagcctaaattttcaaactcatccagatgattcatttggatggatcatctgaatgaaccgtttttggcaccaaacgaacatcaaaactcatctccatcgaaatgatccatcttactgatgaaacgaacatgcctacaaacttttttttttcttctttaacactaaacgacgacgtctcttttttttttctttttttttttctttcttcttcttcttcaatcttctttcttcgatctcttattttttaaactctcttctttgattgtgagaagccataaaaaaaggttcgatatctctctcttaatctttcatctttctcatttttctattctcatagattgatatattctctatctttggaatctgattcataggattggggtttaatggttttcgaagaaatctgggttaaagtgtgttcgtgtgttctctaaatttgattcactaaacgtgggtttcgaaaaattgaattctgtgtagctatgatcttgtggcataaggcaaactgattcctgaagttggaacatcgttctctggttcagtagagaaccgacgaacacccttccccatctccgacgatgttgtttttctgcttaggacacaagtttgttttgttttttttctcttaaactttcatactttcacacactcataagtttacacacattacacatatatataggagatttcttctactcaccatacccactctcttagaccttaaacttagtcactatttaaccttacttctagacattagacttagggatacaagcaaccttacacaaccttaccttagccactaacaaccccaactactctacctcaagtacttagctagaataagctacttctacgaatgggccacaacaaaacatacttcaccactttgggcctacacaacttcatcagcccaataagataaaacataaaacccacttctcttgtcttcttcttcttcttcttcttcttcttcttctcacgtctctctcttacgtcgtcttcttcttctagtttccaatcttcttgttcttcatcattgttgtttccttctcactgatgttcttcttcttctttgcaggatcaatcggagagttcaatctcaacagacgaccataccctcgatacagtagctgctccgctcatcaacgtccatttcgccgcctttagccgtcaacgttctctggttctgttgccgtacaaaattcttaaaggtcgcgtttttatgtaagcgtagggtttagttgtcgtcccgctctttttaattagactttgttaatttaattaggttaattagataagacctaaaacggcgacgtgtaagctgtcgtcttcttgacctttttggtgaactcctccttcctctctatcggctatcgctcgctgcgtctctgtgtcttgttgcttggagcaagctctccagcgtgagttaatctaatctctgtaatgattaattaccttcttttacggtttctggaattgcatctgtgtgtgagcacttggtttgaaatatgatttaactagtgaattcgataatgctgttcaataagaatgcttagaaaagccttaactgggttttactcaccactcttcttattgaatctagaaattgaaagtgtgaatttttgcgagttctcttattcaaacttcactgcgaaaggtggagtttttcgtctctgttttctccctaattcttatagtttgagctaatggtgttaatcaggctcaagaatagataaaataaaatt

SEQ ID NO: 1642 - DNA, 63 bp, Unknown
  misc_feature (1)..( 63): cDNA_ID_3063476_gDNA_ID_1620429_Annot_ID_156812 3000 nt of promoter + ATG
ctttctcgctgctaattcagttgctcctttcgataatgagaaaaatgacttatctgctcaatg

SEQ ID NO: 1643 - DNA, 3000 bp, Unknown
  misc_feature (1)..( 3000): cDNA_ID_2105831_gDNA_ID_1620429_Annot_ID_156811 3000 nt of promoter + ATG
cagagcatggagagttggccttaatcacagtagaaggttcccaggctgcaaagcaagaaaggatatctttaaggccccccatgctgcaggtagatttttcttacttttacttgaaaatattgtaagctattgggaagcataatttttaaggtctaagcgtgttgttttgtactgcatatgtgtcgacatctatgtcaattcatgtcaaactagcaagagtcttccttatgtgtataccttttaattgtaggtggtgcgtttagcttctttccaaaatgctccatctgttccaccattcttatcattgccaagacaatctagaggtgatagcgatgacataatggatgaaagaagggtcaatgaggtagctgtgggtggtggaggagtctcagttgctgttactcgtttcccagtggagcaaaaacgaccagtggggcctcttgttgttgccggtgtgcgggatggagttctttggctcattgacaggtactatgagtctcctgttcttaccttacgacaagactgactcttgttaatacattccttgttcgatgctgactgtatgaattggtgaatcgttttatcttcatttgagatatttatatttaattagattatgaattttcctttccatttatattatgcactaggtaggcactgaaatctgacattctgcattccaaagtttcctcgagcactaagcttgaatacaatatcttgccatgatagtcattttagttgcttgaatgaataaagaaatattagacagaagatagaaattattgtctgacacctccttccatttcttggtaggtacatgtgtgcccatgccatatcccttaatcatcctggtatccgctgtcgctgtcttgctgcttacggggatgctgttagtgcagttaaatggtatggatatgtttctcataatctcgtgtttatgtgagtagttaagtagctggaatccttatacaacattttttttgcgcagggcaagtaggcttgggagagaacatcatgacgatctggcacagtttatgctagggatgggatacgcaacagaagctcttcatttgcctggaatatctaagaggtaaataaaacatataatattttggtgccgcttttccttcaatttggttctactatagacagttttttctagtctctgaattgcttatgctggacagtaaacagaattcagtatttcactcatgtattgaatccttcatcctagcgttcaactcaaccaaaatggcatcagagatttttttttcactttgacttaggttccgagtttgacttaactttatgttttctcaggctggagtttgacctagcaatgcagagcaatgatcttaagagggcacttcattgtcttctcacaatgagtaatagcaaggacattggacaggacggtgtaggccttgatttgagtgacattctctctttgacagctactaaaaaagaagatgttgttgaagctgtggaaggaatagtgaaatttgcaaaggagtttcttgaccttatagatgctgcagatgccacagggcacgccgacattgctcgcgaagctctcaaaagactggcaactgcaggttcggtcaaaggcgctttacagggtcatgagttgcgaggcctttcattacgcctagcaaaccatggagaattgacacgcctaagtgtatgtctgcaatttctctttctttcggtttctaacttggtttctcgtattttaggatacctacagaaatctaaagacctttgtcttgttcactagataggatcgacataactatagacgaatttatgctttgattttatactttgtatcttctggttcctaattgaaatactttattaactttgttgcagggacttgtaaacaatctgatctccataggccttggacgagaatcagcattttctgctgcagttctgggagacaatgcgctcatggagaaggcatggcaagacacgggaatgctcgcagaagccgtgcttcatgcccatgtaagattgtttttgtattttggtttttctttttgcagtttataaattaaacttgtattgtttctgactacgcctactgtaattatttccacaggcacatggtcgcccaactctaaagaacttggtccaggcttggaataaaacgctgcagaaggaagttgagaaagctccgtcttctaaaaccgatgctgcaagtgcgtttctggcttctctcgaggatccaaagctcactagtttatctgatgcatctagaaaacctcctatcgagattctacctcctggaatgtcttcaatctttgcttccattacggctcccaaaaaacctctactcacgcagaagactgcacagccagaagtagctaagccattggcgctcgaagaacctacgaaaccattggctattgaagctcctccatcttccgaggcaccacagaccgaatcagcgcctgaaaccgcagccgctgctgagtcaccagcacctgaaaccgcagccgttgctgagtcaccagcacctggaaccgcagccgttgctgaggcaccagcatctgagactgcagcagcacctgtggatggaccagtgacggagactgtgtctgagcctcctcccgtagagaaggaggaaacttctttggaagaaaaaagcgatccgtcttcaactccaaacacagaaacagctacgtccacagaaaatactagccaaacaacaacaacgcctgaaagtgttacaacagcgccacctgaacctattacaacagcgccgcctgaaactgttacgacaacagcagtgaaaccaacagagaatgcagcaaccgagagacgagtaaccaattaccctccaataagaagccagccaatagattttgatttcttgaatggctaaaccaagttttcacagaagatcccaaaacgaagacaacagagtgtatatcttttagatatatttcataatcaaagctttatgttcattataatttaattgagagtttaatg

SEQ ID NO: 1644 - DNA, 2557 bp, Unknown
  misc_feature (1)..( 2557): cDNA_ID_2025081_gDNA_ID_1620430_Annot_ID_156819 3000 nt of promoter + ATG
gatccaaataagaggttcgctagtaaaattctcggctcagactctaatttgagtcaatgccatcaagaagaactcaatgaaccagatacacataatcgcagaaagataactgaataatcttggcaatataaatcttcttgcttattatcgtctttctctaccaatataactaattaagattctttaaggtctttattttagcatgggtggcttatgattaatacttgtttcgaggaactttcttctgccgcaactaatcttacaacaagctaaaccacatatccctgacatggcagtatcttaaggactatacattaactttacgagcaaagatgaatgaacagagagtaagaaaagacaatgaactacaattacaaagacatcaaaatctataagatcattcagagaatttggaaaaaccataaagaaatgacgaatgtaaagtcatctactgaagcatataaagtactttttatgaaacacaagcatatcgaagccaatcttgaggccatattaaagtgaaaaaaaagcaaggcacccgcacagaacatgaaatgaatgtaggccacagagacgactgaatcttcgcaaactcacaaaccaatttattatccaacttagtgtgatccaaaccaaaggtatgaatacacaatccagctacagaactagcatgaaactgcactatgtgataccacattacagatcttcgtaagacttaaccataactctttatctagctagcaacaagtaattcacatattctcatgaatttgatcaatccctagagtttcactaaccaatatcatcagtcaaaaaggaaaactgacctgaacaccaccgtctaaagcagcacaaggctgaagaataggaccaggattcgaccgttcaacagcaacttgaaccggtacaccaaaacctttccttggtccagtttcacgaaatctcgtctgattctcttcccgacgtttatctccatcaccagaaacagttccagtgttgttatctccaccatcaccatcttcatctctcacagctccatgaccaccaccaccatcgttatgaccaaaaccaagtatacccgttaacttcttcaaaaaacccattaaccccagatatcaaattcgatctaaagccctcaaatttaacagcttttctctcaaatgaatgatcttccaaaattagggttttcgaatatccctttcctctcccgatttttgctactttctccgatcgcttcttaatccaacaatattcatttcctactgttaaaacccagaaatctctgtctttaatctctctctctcgtgaacactgtgttaatcttcttatgcactgcaacaaattatagaaagatgaatttttttttggatcaaagacggatcgagcaagatcttctttttatcattaacggcgcggtttctattaatatactaaataaatattccacattttttttttctctcgtgagtgaacaaaaaaaaaaattgcgatcatttacagttttacttttacacatcactgacatcagagagaattgaacaaaaaaaattcgaaaagtttcgtgttaatcatatatatgaaagttggctaactctctccaaatgattgacacatcatcattttagcatttgccatgtgtctattaagtaattaatgtaagctcttcaacttctaatttataagttaatgatatatttattatttaattttacatatttaattatagtattactaaatttattttaatattacatgatttttcaataaaaccatttaatagttttctcatactcgaagatttttttttgtaatccaaactcaaagtatgagtatataatagtcgtggattatttaatgatttgagtaagttattttcttaaattgatattatattctcttaaatttatatttatacaataaatcattgaggttgaagaatacgtaaggagctccatcatcaaattcttaggtttctagaatccaaaactaccctctcttaagttggtttaatacaaacgttatttatgaattatgtgtatgatgcattgttgagaatgttgttagaaaaaatatttttaaaattaaaaggaattgtttattgtataagtgaataattagataaataaaaattatatttaaattaaacaatacgaaaaaaatccgaaaataccgcggcgtagcgcaggtgatcacctagtgttaataattgaaaattaagaacttctatacattgtttgttacctaaccattcttcatatgtaaacaacaattaaaaatgatgaaggatataatgtactacaggcccataattgagacgcacaggcccagaatcgaataagaccggcccattccaaaatgacgactgaattcaattttgtttctattttttgataaaaaagaaattaaaaaaatatcgcatttcagttgttcaacttcttcgtcgtcgtcttcttcctttgctccgtcgtcgagatctcgtcgaacctcaaatctcaaatctcctgtaaccagatcgtctaattatccgatctgcgtttcgaatctcagatcgaagatg

SEQ ID NO: 1645 - DNA, 3000 bp, Unknown
  misc_feature (1)..( 3000): cDNA_ID_3063513_gDNA_ID_1620430_Annot_ID_156830 3000 nt of promoter + ATG
ttcttgtttttaagtatatcatttattttataatttattgttatccataattcatattaaccaaacgttttcataaacttgattttgtttttccttatttctctcttttttaattagtttagcaaaaatgaaaatgaaacagaacataactttagctattttcctaatcaatgttttcaggttggtttgttttggttgcaacctagaaaattagtttctttagcaagaatattaaattgccacctacaaaatttgattgcaacatacaaaattagttattaaaattgtattacatcaatgaaggtattagtttaaacacaacttccctttcaggtgatgcatgataggaatagttagtattgacttcgcaacttagctttcctaattaatgaatttaaatagaaacatcaacaaaaatcaaacactaaacacaaaagggtattgcgtaatcactcatctttaaacctagatttgtgcagtaatctcctcctgatttgattaaattagtgagcaaaacataaatgtattaggttaaattctcccaattaagaagcttatctctctttgtagctctagctcaacgtactatgcatacaaggatacaacatcggtccgttgtttgcatcacattctttccaactcatacttatgagtaagcatataacaaaagtcattaaatacgcatttttgtgtataaaagcataaatgatgtaataggaattaacttatacaaagatagctttgcatcactgtcacatttgtgtgagaggttaggttaccggataattaattttgttatagtcagattggatatcattaagagaaaaatgttacaactaacaatataataacgtgtaataactaaataaaaaatataatattgctgaattaatacgcttcttattttttttttgttaagaaattataataacgttttttttttggtgaggaaatataataacgttttgatcaaaagatataatcaaataataatatcccctatatattaatagagaaatgcacttaagaaattaacttttagctatcttggtatgtacgcagatgtcatattgacgtatcgcaattagagcaattcttaacaaacttgattcattatccattatttcttaatttacttacaaaatttttcattattattagatataaatatctcaacaacataaaaataaaaaacaatttctaattaaaattagtaaataattaaaaactaaactctaactaaaacaacctaataattaagcaactaatatttcagaacttaatatataactaccttcatttttttatataaacataaaaatatatgttaacaaagatattaataataatcaatgtatggtaacaattatttctatgtaaaaaattgttggttcagataaaataaaaaggtatattacattacattatacacaaataaacttcagattttaaataataatccataaatgttctaatttactataatacatttatttaataatcattttatcttgtacatagtgcggaaaaactatctagtaatatagtatacgctcttttacataattagctgttgattttcaaaataaaataactaaataaaaatacggaaaagaaagatcaaatcaaaacgtgaaggttgatgatattaattcagcatatatttttttggttcaaaaatactaattcagctgaagtaagaagcgtatattggtcaatactattttgcgccattgtcagaatgatttgtttctcttcccactaaagaatttttttctccagcaaaagattcattacaaccgatagaacaatacctaaaaatagaaacaaggtagtgcaaagtaagaaacagcaaattgataaatagcaatatcttcttccacactgaaaaactcttggtttttactcttggtctttttcgccatatcatatacatcgtagcatggaaaacataacgagcaatgaaactctccattcgatcttgccactgacccgagactgtagcaattaaaacagaccagtttgtagagtatttggccttgtaaatcttttttgctatgttttctcatatttctgctgcaaaccaaattcatatattttctgtaccgatagtttttgttttttttttaaccaatttcaactattttctatttcggtgacaaatttttaacccgaataaaccaaaaaattgattacaccgatctaaataaactgaaccgactaagtttatgcatgagacatagtgttttgattttacgagaatttattgatatggcgaatgataaaaatatatatttttaataaaatgctaaaatctagtttttgtaaattgaagaccttttgtcaaattttgattttaacactaaatcaaatggtagatatgagatatcaaattgcaataatggagcaataactttctaaacacaataaatatacttttttaaaaatatattaaaatatcagaacttttcagcaatggaaaatggaaatagttataagtctctcacaaccaattaatgtgatgactatataatagtttataatacatactttttgtgaaaagaaaaaccaaaaaaggaataaaatttgacgaaattgattaatatttttggtggaaaaataatagtgaaagagagagagataagaccaaagaaggacagaaagatatttttaaaataccaaaaaaaaggaaataatcaaataaaattagaaaattccaagagggttccttgaacccaacgcttcttcttaggctcggggctggttcgggattaggttcggaaatattatacattgtcgacattggtaggataagtaggactctttctcattgcttttcgcttcgtcttcttctctctaaaactctttctctgcaagaaaaccaatctctctctctttcactttcttaaaccctttatctctctaaaaccctcctttttaggtaaaaaagttttggtgctgactcaaaaaaggttgggtcttttactgcattttgaaatg

SEQ ID NO: 1646 - DNA, 3000 bp, Unknown
  misc_feature (1)..( 3000): cDNA_ID_2046555_gDNA_ID_1620430_Annot_ID_156834 3000 nt of promoter + ATG
taggcttaatttttagcttcatggacttgtagcaatgtttcaccttctggctagggtttaagctgtgattaggaagatgttgacttattttttcctgttgaccactctatttatagcatttcatgttgttgtagatctattataagatcatattgtttttgtgcaggtcaacgaacttagactcgtggagtcctgagcagctaagaacaatgatgtttggagggaacaatcgagctcaggtgttttttaagcaacatggatggaatgatggtggtaagattgaggctaagtatacttcaagagctgctgatatgtatagacagactcttgctaaagaagttgctaaagccatggctgaagaaactgttttaccgtcgttatcctctgttgctacttctcagccagtggaatcatctgaaaatgggtttacttctgaatctccgaaagagagttctttgaagcaagaagcagctgttgtctcttcaccaaaagcttctcagaaagttgttgctagtacgtttaagaaacctcttgtttcgcgaaagtctgggaagactggtggtcttggtgctcgtaagcttactactaaggtaacgtttttcgtttttataaagaattatagcttagcttctcggttcttggttttgattagattagtatttgttgtatatgtagtcaaaggataacctctatgagcagaagcctgaagaacctgtacctgtgattcctgctgcttctccaaccaatgacacatcagcagctggatcatcatttgcctctcgatttgagtactttgatgatgagcaatctggtgggcaaagtggcacacgggtgcttagccatgttgctccaccaaagtcatcaaatttctttaatgaatttggaatggacagtgctttccccaagaagtcaagctcaagctcatccaaagctcaggtaaagaaaagtttcatttttaacagaactgaagaaagagatagaaatcaattctcgattcctctttgtttacctgttttctttttacttaggttgaagaaacagatgaagcaagaaagaagttttcaaacgccaaatcgatttcctctgcccaatttttcggaaatcagaacagagatgccgatcttgactcaaaagctacccttcagaagttctcggtatgtccttaaccgatcaaactctatactagttttctttagtctcgttgttcatacatgcctaatgcgattacaaatctatcagggttcagcagctatttcaagttctgatctttttggccacggaccagatgattccaacatcgatatcactgcaagcgatctcatcaaccgaatttctttccaggtaaagttctgaagtagaatcaaattcttcagcttttcttaactctgcttataaggtttttttatttgactttgtttattattgggcacaggcgcagcaagatatgtcatctattgctaacttagctgaggaaacaaagaataagctgggaacatttgcctctagtatattcagtgatcttcaggatagaatgctgtaagaaacatacaaaggatcttgtcttttgatttacagagaacaaattgttggatataaatgtcatttttatttttggtttgactttgtagttgaaagagtgatttttgaggtaaattgttaaatgtggaatttgataatttgatgtggatatggtagaatatgttacagtattatgtatggtattgaacatcaatttattcccttgatatggttgcaaaaaaaaaaaaaaaaaaaaagaactcagcataagaggaagaacttattaccaatcaaaacttttgttgaaaagaactaatattgaaaaaggagaaaagtgagcagatggattttctttgaccatatcggcatttctattaaaatagttccatttttattataatataattaaattttgattatgaggattttatattaaaagttatatttattactgaataaatttaatttataagactaaaaaggtgattttacaagaaagtaaaatatataatttttttaacttgaaagaaatttggtcaacaatatagtaaaccgttaaacttggaaaactatattgaaaaagatataggaaagctatatttgggcaaacaatataaagaaaacgtaagatcaacttaggctaatgaaaactttaaattggtcaacaatataaagaagataataatatagaaatgttagtatttccattatttgttaaagaaatgatttaatttagcttttagaaacaaactgacaaaaaaattgatgtggcatacagtaactagaaatatttttacaatatttttttttggaaaaagtaaataaatctagattttaggaaaaaaatgataaaagtaactgtatatatttttattttgtaaagtatataacacaaataaaagcaatattaaatttcaataaattgataaacaaattaacaatcaacttgcgtttttccctattgttctccttcctccttcaactatttaacccaaaaaaataaaatctggttttgtcattttttttttttttcgacagttctggttttgtcaattaaacttgtttaaagataaaaaatataattggtcaaagagtctctgagaatccaaacttccaaaaccaagtgcgaaccatggttgagttaaccaaataacctaatcaacgtttaattacgcttattttatctgtggaaaaggtcaaaagaaaccctaaatccccaaataaatggcggcttgattttccctcccaattcaaaccttcttctccactccaattctcatcttccctccaaatcgtttcgattcgctctcagatttcgaaaatttcccaacttttttggagcgaaactcaaatttatcttcttcaattacttacagatcgatttacgagatgcagaattctcccaaaactaaaccctagcttccacttcttcccctttccttcaattcttcacaaaatccgttctcggttttgttgttaatg

SEQ ID NO: 1647 - DNA, 3000 bp, Unknown
  misc_feature (1)..( 3000): cDNA_ID_2046551_gDNA_ID_1620430_Annot_ID_156835 3000 nt of promoter + ATG
ccttgacccgctctttcacaacccgacccggttaaagcaccagacccggataaccaaatcacacgagagtttaagaaagattctccggggagaccaacaccgttaacgaagctttgagtcatcgaaactaagaagaaccattcagtatctgttacttcttcatcgtttgattcatcggaaaccccaattccgccggagattaacgagttaagctcacgtattactcttttccgatgctcttgctccgccgtgttggtgttgttcttcttcttctctttatcttcctctcctttgtagtaaccatctccccagccgaggatcactgtgttatctccggtggatgaatcgaagtcgtgtgagatctgccagaagatagcgtaagtccagttttctccggcggattctattaaagcttggagacgttgttgaagagtatcttcgttgaactgaggctgaggtggttgttgtggtggtggaggaaagagagatgagtggtggtttgttccaatgaaagcttccatagccgccgccgacgcgtcatcgtcggaggtcaagaagttgattgatgatgttgtgccgttcatgtgaacatacgccggttgaaaaggtgatattttccggtgaaaggtgaagacttttttccggtgagaagaagagagaggtgacgtgtagggaggaaaaatcaaaagagggaaaaagctaagcaaatggcgtttagtgattgtttggagaagatgattctctctacaatactatattttatttttattgtttttctaaaacaattgtaaataattttttcttattttcttaagtttttgttgagagttgcgacatattatatgacaaaaaccaaacgataataatttggttaactgttacgaaaacgtaaataaattattcatggagtgataattctcgtttggacactgttttgtctgaaacataacttagatccgtttattatcacatagccacttattgttttatggagaaaaaactaataaataatccatttatggtgatatagtgacttagagtttcgaatatggaccaatgctataattcaaaatttcataagttagaaatctaaaatataaattttatttttcatataaattaatattttaaactgcaaaaaagaattgcatttttaaaaggaaaaaaatagattctactcaatttatatcaattaagttaggaatttaaaataatatttcaactgattttatgttagttataggaaaataaatatatatgaaaaaactaaaagtgttttctttctccaatcatcttttttttttaaatatcatttcattatgttcattttattaaaaatcagtttgaaccgttaatatgaaatttacgttttcaaataattatccggtgtaaatttttttttggtgtaatggttaactaaatatccattaatacttcatcacaccatatatgaagtttgattttcatagattacaaattattgaagattaatggaaacgatttctatctagagattttagtgtggtgcatagaaccgtatgtcgtagtacagtaccatctgtcaaactgtaaaattgtacaagcatcgatgtaaaactatcggttgtggagttgactacgaaaaccataaaaagaaaactcaaaaaatgatttgctagtcctaaaaattatttgtaatatatattcaaataataatgtatccaacaacatagcaacttccgttcaatttttgaaagaggaagaaattaacgtataaaatttgtattttctctataaaattcatattcgaatttattttttcttagacattttaaattgtttttttctttttttaaatattggaattatgttgtgtagcccactttaattgtttgggtcctctgtctaggcatcgtctgtctgctttccatgtttctgtcaccataattgacatatctatttattaacaatcttcatatttttgtcacggtatactgtaagttttctttaaccacatttttttcatcaaattttttatcgtttggctaaaactataatgaccaaccaaagtatataattttttaaaacgttacatatgatttttttgtcaaagttacacatgattattgacaaagaactacacatgataatgccaaccattacttataaacaaaatatccagaaaaaaaaagaaagaagaagaaaagtagtcagtgaaaaggacaacatgtacaataatattcaatggttaatcacgatggctaaaatgatccagctcacgtgattctcgtggatgatgtaattacaaaacgactttagacccactaatcgtacactaacatatgattattgacattacataataaaatatctctacttcttgccagttttcttacaagacattgataaacatgttacatgtcacagaaacattgtatcaagtaaaaagttttactttatcaaaaaagaaagaaagtaaaaggttcgagaggaattagtgaagataacctaatttaataccttaatgtacttccataacaagtcgattttttggatttaacaattattttggttttcaatttttcacaattctgtcttcatctttcaagcgatcctctttgcgctaataacaagatggagaaaatcatgataaaatttagcgatgaggttttatcctttttcattttctgttttatggttaagttttgtgattaaagaattagaagttttttacaggatttagactatggttagagtttacatttgatttagaattgtgtgactttcatataaaaataatgacatctacgaaattacgaaatacaaatatgggcttattcattattgggccatacaagcccatcgagtttagtattgatcctctaatcaaaaaacgtaaacaaataagataacagaaaaacaaaaacaaaaatttctgctttgaagaagaagagtcgatccataatcgccactttcagatttccagattctggggaaacatctctaaactcttcaacgatg

SEQ ID NO: 1648 - DNA, 3000 bp, Unknown
  misc_feature (1)..( 3000): cDNA_ID_2046515_gDNA_ID_1620430_Annot_ID_156846 3000 nt of promoter + ATG
tttaccaacctaaattgacaaataaagagcaattcagcatggctttcatttggctcaatactgagtatgaaggcgaacgcaccagtgcccactttggttgggctgtaagaatttaattttttgttttgtttttttaaatcgtgatatactagatcaaaattaaacccacttaatgcaaccatcatttagcatatgtataattagttcatttgaataaatatcatggttaaaagttttactgataactttttttttttactacgtatgaaatatattaaggtgattcctgcactatatggcgatagccgtacacgacttactgcatactggagtgtgagtaacaatgtcaccaattatcgtctgtccctatcacaagaaagtagattttttttttctcttctttaaccccaaatcgttttttgcagcaagatacattcgaaagcggatgttacaatataaaatgtaagggtttcgttcaaattgataggagactctttcttggagccggttttgcgaacacctctgtggtgggaggccaaaattttaaagctttttttgcaatcaatcaggtatataagtatatataacaactacgtttttgagttaaactaaattcttggtttgatattgatttattcaaaacaaaaatttgaataaaaataaaatttctcaaatattattaaaacagttctttagtttcaattggttagtaatattctttaaccgataaactcgaagaaaattttcactagataaaactagtgaatttcttcacaaactttagtataatttaccaaaaacaaatataaccttacacttctttttttatgggatctacacaaataataggatccaaaaacaaacaatttgctgctgacagtggggaagatttacttagggtattggccagaggaacttctaccttttttcactgaaggagcggagtcagttatatatggtggattgacgaatgctccatctgatggcattcaaccctttaatatagttagcccaccgatgggtaacgggaacaaaccgctggatgaggaagttgatctaaagcatacttgttatatgcactctcttaaatatgtgacacaagattacaagagtgtcgatgttgataccaacaaggtcgccgaagttgcggacgcaggtatatgttacgacgcgatttattttgataaacttggggggtatggacaaacgtttaccttcggtggaccaggtggtcattgtgatgtgtgatcttcctttatgtgatactttgatatttcacttttattcaataaaacaatatttaaatttctaattccctagtcgattttgatagctttatattcttttacaatgtttttgtataaccaaaactcatggacatcaaaacaagagatattcgcgtgtcgcattcttttaatcatcaaaacacacagtactaggttgatgaacaattataattctaaaaatcttttacaagtttttttgtcattccaacttaaatttgagaaaattgttgtatgcatcgattgtttttgtattgtatgtttagacaggcaactactaactatgccaaccgccagatatccaatggaaagggtttgaaattgctcgaatttttctgatattgtgtgaaaacccttttcctatttttttggcgattagtgtagtaagtacttgcgtataatacaaaacactacacttcacctataaaaatttaaaaacgtctccaccttatgtaaaaccgagtaacgggtaaaacatgtcatgtacgtacggaaacaaaattatatgttgattgggttctaaataaaatactaagccatgaaatttaagcctttcataaactgatattgaagcttcaattggaatctgtcaatcaaagattgtaaccattgacaaaaacttatagttttaaaatcagctaccgacaacaataaatttgtcattgttggattcaaaatacaagtctgttttcacaataatgttaacttgagtagtttcttctttcattctcaaatctgctatcaaaagccagagttttggtaactttaaataaatcggtcaggacgttaacaaatttattatcactaaacgtcattctactaattattttttcttagaaaaatctgttactatatggcagatttatgtcaaaaataatgtctgacgccactaataaaataaatttgttacacattataataaatctgttaattcctaacaaagcaataggtattttaggtatgaaaataactcaattaacttttatattttctgaattagtttactaattaaaccctcacaataataaaaatattactatattgggtcaacatagttttttcccaaaacaatactatgaatggggttaagataggaaagataatatggcatcaaaatgaagactttataccaaaatatttaaagattttataccaaaatatttaaagattttataccaaaatatttttaaagattttataccaaaatatttaatagttaatattattaagtaaattaccttataattaagaattttcaaatgactaccttccctatatatacattgcctccgcctctgttattaccaacggctgaacatagaaaatatgcaaactaagcaaatgacttctccttggttgttgatcatcatattctctctttcattaccttgcttccatggaaggtctcaaaatactaaggtctgtcaccattttgtaaatataaacttaactatacaatatatacaacttaagttctaaaattctcatatattgtagcctcaagaacctgagtacgaatgcgttgatatctacaaacaaccttcgctacaacaccctaaactccaaaatcaccaaatccaagtatatttctatatatttacatttgtgtgtcgattttctccacctaatgtttatcatgatcatataattatccctatttaatcgatatattttttgatacatcacatagatgagaccgagcgacgaagttctagcc

SEQ ID NO: 1649 - DNA, 3000 bp, Unknown
  misc_feature (1)..( 3000): cDNA_ID_3063517_gDNA_ID_1620430_Annot_ID_156829 3000 nt of promoter + ATG
aaaattgtaacaatttgaagcttttttcaaattcacattatgctatttttgtaaaatcattttcttattggatgttgaaaggtggaagagagttgccagctaagttcagtagatgacattgcaggagcagttcaccacatgctaagtatcattgaagaggagcctttttgttgctcatcaatgtcagaattaccatttgacttctctttgaatcactcaaatgtcactcattctctctgagaaatctcttttttgttgttgttattccttcttttaattttatcacatagcacatctttagtttttttttttcagaatgaagaaacacataagctttcttttaaaatcctaggttctttttctgactttgtaaaggctaaatgtgaatttataatggcacataacatattagttgttttactcttaattttatgcattttctgatagtaattaagttataaattagtacacttgtgagtgtttgaattgttttatatatataactggattcttatatatacaaatcatcaaaaaatttagctaggctctcgatcttggatattagttagtagagagtatatactaaaaatctttttaagtgtgtttataaaatttcaagggctaaacagatgatattttatggagatagttgtcaatttaagaggctaagttgtaacatgcaaatggaaaaatctaaagaaatcaattacgtgttaatgtgtaatcgtattaaaatctttttgtgataaattaatttggatattctgttacagaagattttaagacatccgccatcattgcgagtgagattgttgtgttcggttgcttatgttgttatattaccatcaacatccacgacactattttatggacctttctccagtggcccatattaatagttttagatatgggctttatttgatatatccgtctagctttaggccaccaaggctggcaacagaggcgagagtacttcactttagtattcggacaaggtttatatttctccaaaattgtttgctatctttcgacttaatttgcactcatactcgataggatgataaatgctcatcattttggtacaatacacaatttttttggtacccgctgcttttttttcgttcaatgcttatcatattcgactttactcgtaaccgacgatctttgtacccataaagaagtggaaatcttgacttttcttcacgaaataaagattctcttcattatctcctttggactccatgcgaatttggtcaacatgttcacattttccacataactggttcgttctaagaagggtattgttgtttattataaagggaatagaaacaaatttattttgtttttagattgttagcatatatacaattaatgtctgtatataaaaagaaattaggatatgtatttgatttttgttttctgttctattaatatgtacctttatgtgaaaaatacttgcatttgttgagagaacacgaaaagatatacatagacccgcgtaatctctcccgtttaactaagattgtttagggctgggcacaaggcaagtacttgccgatttggaggtacttgtgacttgacttgccttgtcaaagtaattggatttttggcttgttatttgccttgttaaaacgagtacttggtctaccaagtatttgtctaaattttaattacttgcaagttacttgacccaccttgttacttgtcaaaattaaatacttttacttgaacctaaaatatttggaataaaaaaccctatttcatacataatatttaaggtcaatgagttttgttataataaattttaaaattttagcttttatagaccaaaccaaaattataaatttgttataataatttaagcattagtatgttagtaacaaatatacaatgttcaacaattaacaaggtaagtaatagaaaaaaaaaaaatccagacctaattattagttatcccacaagtcacatgtacaaataacgagtaacagagcaagtaaaaggacaagcatcaaaatgatgcaagtaacgaggcaagtaacgggataagtatcaaaacgaggtaagtaacgagtcaagtatcaaaaaaaattatgatacttgatacttggcttgctcttgcaagtaataaaataaaccgacttgttacttgacttgcctatgacaagtacttgaattttcaagacgagtacgaaccgagtagcgagtaattgccgagtagcgagtacttgtgcccagggctaagattgtttgtaataatgaggattactaaatatggtccttcgagatgggacaaaatatttgcatcggctcttccacactagagatgcatcacaactgcatatagaatcttctaacacaatggagttcacaaattgttgtggaagttaatgtctcccaagttcaatgaatctgtttgtttgtcttaattcaggagataacttgagcaaagagagacctccatgtggtattatccactgcacataaataaaaaggaatttcaaaataaggtttgtaaggatttttttttagaaaaaaaaacagattatgcggtaaatagacaatttctggtttaccattttaccttatgaatacattctagagaagatgcgccactgataccaataaatggattttatcattgtgaaattggatttgggtatcgcttattggtgccttttctagtctagtatctcgaccggtgaagacttattctctcacgtctcagtgtcctagaagaaaagatgcaagtaataaagagtttgtgtagttataaggtttccgagttcggatgacattttttgaatcaaaatctcgtgtatgtgattgagtattaaaaatagacatgtaagttcacgtagaagttctcgtgtataaccaagttcggaaaagtagacttatgtgagttcatgtagaagttccaatctaacataaacgcaaaggttttcaataacacatgagaacaaaaaaaaaaacaagagacgaatgttttgagcctttaga

SEQ ID NO: 1650 - DNA, 3000 bp, Unknown
  misc_feature (1)..( 3000): cDNA_ID_3063533_gDNA_ID_1620430_Annot_ID_156820 3000 nt of promoter + ATG
aatgaggtgagtgttgagtttctttctgtgtgtatgtagatcggctaggttgtgcggtagtgatgatattttgcattctctcaaacgcaggtgtttctggatattgtggaaagtgtaaaccttctgatgtcctctaaaggtaaataattgccttttatgaagttttttgaagttgtctttcttgttgatttgctgtgtatgactggttttgcattttatggaaacggttaggcaatgttcttcggtgtgatgtgacggggaaggttttaatgaaatgtttcctttcgggaatgcctgatttgaagttggggttgaatgataaaattggtcttgagaaggaatcagaaatgaaatctcgcccagctaagaggtatacgttgttaatacattgaacatcagtagccactgacttttctttgtgctaactgactctcgttttgtgcagtggtaaaaccattgagcttgatgatgtcacatttcaccagtgtgtgaacctgaccagattcaactccgagaagactgttagttttgtaccaccggatggagagtttgaactgatgaagtaagttttcgaatgtccactgttgcaaattgttctggtaccaaatgtgtattaactttatgatgtctcaggtatcgaataacagagggtgtaaatctgcctttccgtgtattaccaacaatcaaagaacttggtcgtacacgtatggaagtaaatgtcaaggtacataacttttctcaaggattacaggatacaaaaaaattggcttgatctttgctctcttacaatcccttcccgtgttttgtctgttcaggtcaaaagtgtgtttggtgctaaaatgtttgcccttggggtcgtggttaaaattccagtgccaaaacaaacagccaagaccaatttccaagtgacaactggtcgcgctaaatacaatccatcaatcgattgcttggtttggaagtgagtttatataatttcccctcatattcatctctataattcttttgttggtgttttatcaatcattcggcatctttctctcttttactctttaggataagaaaattcccagggcaaacagagtccacgctaagtgcagaaattgagttgatctcaacaatgggagagaagaaatcttggacaaggccaccgatccaaatggaatttcaggtcagtctttgtctcttttaggcactgttaaatagaaccagatttgcttaaagcaattattaaccgtctcagctttgttcttttctaggtgccaatgttcacagcatctggtctgcgagttcgttttctcaaggtacgcattgttatctatgcttttgaaagtaccatccttccaaaaaatgcaatgctaagtagcagaatctctaagccattgtgtcattaaatccgttcaaatcttttatgtgatttgcgttttggttaatctgtctctggtctttcaaaaattgattgctatactacttttttggacctgactatccggaacgattggcaggtttgggagaagagcggttacaacacggtcgagtgggttcgatacataacgaaagcgggatcttacgagatcagatgctgaacattaaacacagttcaggttcagtgacatcagacttaaaagtttcatggcttctagttttttgttccttatgcaaaacaaaaacaaaagagttaaatatgttttataccttgttttatgtttgttttgtcgattagagatatctgtgttaatatgatttcttatgtcttaatttggtattgaattctgtttttctttctttctctgtttgtgaaattgtacgagatatagtttagattaattctggtgtaatcgaacgtgatagagtatttgtgaaagcagtcggattctttttagtagtagaatcgggtgtaatatgttaatgaaaacaaattttacttgagaatagttcgaacttcgaaggtttttacacataacatagatcgttaaaatcttttgtaagtctactaattcttcagaaacaaacgggaaattgtaaaagtaatagactatcaaagctacacccaagtacgtctttcactcgtggttggttatgcatgatcgaatttctataacttcgcttatggcaaatgtggtcatggtggttctttggactgtgtcatgtggctctctgcccacaagacaccagatatcatggatactttgctactcacatgcaactcaaatatggtctaagacaacaaacatgattctattgaactgcttctccatcgattgggatcacctcgtcggtattctgaaatccacaagctgggtgtcttgtttttgcatcacgttacttttcaaagttccctataatgtttgacgagaatgcaacaaccgacgacatggataccttccacaaatatcaataacgaattctgaagtttaaggatttttaacttcagaattcgttattaatcattcacaagttattgtgttattttttataatatatccaatgcaaatactcttttttctcatctccaaactgaagtatttttatttttataaactcttaataaaaacggatgaccacaaatatttctgctataatttggatgataatgaaaacaaaccaactacaatctactaaagattcaaaaatattttctcgaatgcttaaacctcacgtaagtaaataccaaatcaattcagataaaattaacaaaacaaactcaaataaaatctcctaaaaatcctataaataaaaagatgatttcattttttttcttcctattaaatttacattttccgccacacttcatctctcccactagtctctcctcgagactctctctgtatgtgtgcgagaagcgagaagcgagagagagagagagagagttgttagctcacacgctttctctattttctcggaattcacaaaacagaaagtttcatcctttacgagaattaagccgaaagaaacaatctttgagtttgatttcttcttccttccttctctctctctgctcta

SEQ ID NO: 1651 - DNA, 3000 bp, Unknown
  misc_feature (1)..( 3000): cDNA_ID_3063547_gDNA_ID_1620431_Annot_ID_156859 3000 nt of promoter + ATG
cacaccatcgttttcgctattgattatataattttaacttcacattaatatacataattgggtatgtaatcaaactttttagtaaaacaatatacgttataatcaattttaatatttcaaactccacataattgggtataccatctagtatgtctaagaaaacatactaaaataatgtttaatatttttgtcaattcacatttagccatatcatattcatatccatagtttgtttgataaattctttaacacttaaatttgaacttcaaaatttagtcagttgcaatccctttattattaaaagggaagtacaaattgaaattttgtctaatttggcctcaattttgatttcaattttggattttgttctttgctattcaaaatcattaagggtaatttggtcttaacaatctcctaaactttatatgatccgattcaatttaaaccgttcaataaaattaattcccttcaatctaaaccgttcaacaaaaataaaaaatctatatcgtttttgaaatcaaaatatgatcacattccatccctaaaaacactatattcaatcatgaaatcaataatcaataatatccaaatcatatattacaattcttcactaatcattagaaatttatatttataagtttaagatatcaaatttattcaaaatatttagtataagaaccaaataaaccgattgcccgcggtaaaccgcaggttaaaaacctaatttttattattataatagttttctcaaagaaattctaatatatatatatatatatatatataaattactccagaaaaagttgtggacatcgataacatacatcttactgcatctgtcccaataattgatttagttatatgtggtgatgaggtttatattgtcgtattcatagaaaacatccaaaaagagtaaagtctcgtgtctatacatctatttatagaaaaataaaaaataagatgcagcacgtaacaatgaatgacataattaattggcctttaaaatgtctttgaagtcgacctttagggagggttatgcagataaaacacttcccacctttagtgatatttgggttatttttctatatttaaatgtgattaaggagtccaatgaacttatcgttgtaggtatgagaaacgttatttacgggttcagacaaaagttatttaaatggagtaattttaaaaaaaactaaacattttgatccactaaggaagatgaaacattcatcaagtttgttaatgacctagtttagatcgactagctagatggctagccatgtggttgtctcgtcatcgaacatcaaatactaattaatttttctttttctcaaagtgtaactttatatatcattcaaaagatctatacactgcaatgccaaactcttgtttagccagacacatatctactcgattacatatatgtgatttgcattgtgaaactttttaataatctcaaaccacaaaaaagagcagttcaagcactacaaacgatactaatagtgcttcagcttgttgatctaattgaagtaagcactataattttaaatttaaatcctttatcaaaaattttttttaacaaaaataacaaaaattcgttcgatccaaatttagtttattacataatttaaatttagaacaaattaactgcatatagaaatataaaatatttcattctgttctagtgaatattttttgttttttgaattttttttcccacataaaaaaaatcatgtgttttttattgttaagcatgcaaaattgcaaactgccgagaaaatagctaaaaattgtagcaaattattttaatggatattatatatcattttgtgacggtgtacaagaggatattcatagcaaagtgattatgtttgagccccacaaaaaaaaacttattgaataacataactaacaaaagaaaagtttattgaatatttggaaaggtaatatatccatccatagaaattaaaattaatttataatctaatttgtggaccagataatccttttgaagcctaacttaactgccacatgttgctgccgtcagcacccgttttgcggaactgaaacaaacgaaatgtatattctatatttagttttacttgcagattttacacttgtaacaaaaaatgtgaattgagaatgtgtttttaagtaagtagttaagttaatttgtcttggtcttcttcactagatgatttgaataagttgtgttactttgtatagtagggatccaattaactatagatcggattttatagatctaaagatgttaagtaaaaaaaaaaaaaaaaaaaaaacttgcaacaaatttctattttctttcaaatttgcctttggtttgctttaacaagtcatttttgacaaacaaatacctatgtctaattaccgttccaaatttaatttgaatctgtccttttctctataattgttgtcacaactattaaaaaataattaataattattattactttcacaacttaatttttttttccacaactataaaaatggaaaattagtgaaataagtagttaaaaaataattaggtagatagtctttaaaaaaaaatgtcttcaatgaaataccgaccaaatacgttactccattgtcaaaatcatggccaagttagctaccgtcttgactagttattcatcatttaagagtgtaaaaaaatgtcaaatatttgagtggtgccttttactcgattgttcaaaatagaaacatattcattaactagggtggacaatattttctgtttgtatctaataaaaataaaatcgtcgtttgtttttttttgtcatcttacacagctcataaatgataacgaaatatgtggacaacagaaaatatcaatttatggctttctaaattattataataatttagcatgtggtgataccacgtccaaactgacatatctttgcactatatatatgttgttattcctctttcgattccctcataaaccatattaagaactagcttatagataaggatatg

SEQ ID NO: 1652 - DNA, 3000 bp, Unknown
  misc_feature (1)..( 3000): cDNA_ID_3063567_gDNA_ID_1620431_Annot_ID_156863 3000 nt of promoter + ATG
aaaattgttgttatccactggaaaaggtgcgtctgcttcttttccatctttataaactgccaaacccgtggctttctgtgcatctatgtcttccaagcaatctatataaattataaacgcatgacatcatggaactaagacgcaatatacatttcttgattggtttacataaatgtaaaatcaaagtaaagcggacacagaccttgaaggccaagtttagaaagcatgagtcgtccgccaggttgcataaactcacccatcattctttctggttctctcatgtccctctcgatcacatgtactcgacgcccatcctatagtcggatattagcataggaaaatgattgtgtataatatttgtattcaaagccgactctgccttaaggtattttttcctatattcattcggtccctttttgactaaaatgttctcgtagacttgtaatctagtgctagaggtattataacgtggacgaaaaaagttctagagttacacatctcctaactcaattctcattagttttccttttaaagattcctaattattgcgctttaatttgttcttatatccttaggcgtttttcaattcttagagccgattttgattgtgtcatgcaaaaacaaaatattgcaatatctatcttgccaaaaaaaaaacatacataatgtgtataggttttatcctattattaatacggagattttagtacaagaaagtagttaataaaagtgtgatgcagatttaatatttggacacaaagctatgacgccactttacataccttagcaagagcatatgcgagagccgaaccacctacaccagccccgacgataatgacgtcagcagcaccgtctttttgatcctcagccaccgtatcagccaaatccgtcgccttcttcttcatgttggtaaggtagaacaccgtccacgtcagcacgaaggcgactaacgtccataaacaaacgtgcgtaaaagccatatataaccaaatctatttgttctcaatatgatttatgagtttttaaaaaaaatggcttatgagatagttgtggaaagaggagtgacatatatatagttcaaagatatgtcagtttgaacgtcgcattattaccacatgctcgttatcataatctcggctgtcaaagtttgacataaaagaaacgataagtttatatcagataacaaacagaagatattgaccaccctaattaatgagtttttgttactatatagaacaagcaaacaaaatgcaccactcaaattattgacattttgactattttaattcatttaagagtttcaaaaatctcaataatttgctaattatataaaatgtcaagaagttaactagatgttttagaagagagatgcagattcggcaggcggttcttgggaggatcttggagagcaaatgtacagggtccaaaataattttacaaatttttcttcacactttagggtctttcgtttaaaatcatctttattgtaggcttaaatatataatagtacagaacccaatattctaatgagccggccctgagagattcgatacttggaccgattacgaacaatgggaagtgcataggcgagaggcgagccgccaacttcggctccaacgatgatgacgtcagtaccatggtcttttctcatctaccgcattatccacaagtctgttattatcttgctccagatggctactagggaaaatgtccaagtcaacacgatagtttagtagcatctatcactacaattaacggcaaatccatatctataagggtttagggtttaggatttagtatttgcctgttactttagtctttatatggcttttaagagaatttacaaaagcacaaacgtgacatcatcacatacatgattatatccaaacttctgataaatcaaaaagaaaatcatagtgaataaacacatttcacaatgaatgatgtcacttcttgtttcgtgttccgtttaatgttgtttctatttttgtcaaaggtcgacgtaaaatatcgtttcgccaaaaattgttggagactaattcattttttggctgctttccatgaacaagtcaatataatcctcaccacataactttatcaatgattgtgattcggtgtccatattttcttcatatatatcttatctacacataaattcactatcgtcttaaagttttcttcttcacatttactctgtcttggaaatatagagttattgggagggaagtcaaaacaggaaagatcaagaaactaaacactgctcctaagaaactaaaataaaataaaataaaaattcctacatgcaagataattttcatagcgttagacgccgtacggtggcagacttctagtcttgttacatcaccgtcaccctctgattttctcgtcgtccagtccaccgtcttcaaagaaattattatgacttcaagacaaaacttctagtttccaaaaaagaaaagaaaagataagagctataaacgagtcagtgtacttaaataaacgagtcagcgaaagaatgtagcgttccaatatattaaataaaacaaaattatattcatatacccttatgaaaaaagcataatacttcattatttgatgctcattgctcatctcatacacaaaatcagattcataagcaaaggcgacgacgatgaagaatgactaaataagttgaaggagtcgtctccatgataaaccgtaaccaaaccctgcgacattctattgtatgtgtatcttttttttctttttttttggtcataattgtatgttttttttgtttcttggcattgtcactgaaaattataccttttcatttttgccttctaaataacccaattgtgttactttacagaaaagcccatccaacgattatttttcttcagcccattagcccattaacttcaggataaagataagagctacgttcaactctatggtcagaaaaatcagagaaagaaagaaaacagagcaattacttgaagaatccataggaagctgaag

SEQ ID NO: 1653 - DNA, 3000 bp, Unknown
  misc_feature (1)..( 3000): cDNA_ID_2142065_gDNA_ID_1620431_Annot_ID_156866 3000 nt of promoter + ATG
attccaacatggtttatcatatagtatagaggaatataaaatgaccacttaaaacaaatgacgagtaattactaaaccacgatgacaaaaaaaaaaaacagataaataaggaaacaactagtatgactttaaatttttcttttaagtgaaatattctcctttgtttattacagctaacaaattatagaaataaatatatatatatatatatatatatattgctattggagaatattccaaattaaactctcaatgtacataagatagacttttcaacgagtgattaaaaaagcaataattcataatatatcttaaaatgtcaaaagaggaaatgcaaaacaaaaccaaatcgagaaaacaagaactaaaattaattatcgacaattaaatgaaaaaaaaagaaattaaacatgggtaagagagacaaaactaaaacatgaaatagaagacaacaaaaaaaaaaagtagaagagatgggaaacaagtcgatagagggttcgtaactaaaaagatcacatgataagatataaaaggcataacgcctaattatatctgactctcctttttattgtttattgtatggtcagttgctccaatttgccttcatggtaaggtctgatgcagcagctttcccaattttccctcagtgtcgagtctcgctcccaccattggtgaagtccgtgagctgtcgttgacttagtcggtttgttcttgtttacagtcatatctgctgatggaagaaggtggagaggttccgatgacaaatccgacggtgatagttttcctcttcttcccaccaatagactcctaactgattttctagcaccgattctctcgatgtggcttgctcctatctcagacatgaaggttttgtgtctgaagtaatcgatgtatcctgcacatattggatctgctggattcacatataaataaggtatccatgatgctgtctttggatcgtcttttggaacctgtagtaatttaagacaaacagtttcttgtaagaaaatcaacttgtatatagtagtactcagtttggagtggccaacaaggaatctcaaatgaatgaaacttgatatttttatgtaatcgcaagtgaatgaaacttgttattttaactcttaagtagatcaaacatttttaatttaagactatttatttacctgtagatcggttaaggccatggctacggtggctttgacgacactcttggtgatttgaaacaaacctttaattatatcgccaccaggtagctgctctagaggaatagacgagatgggtgggttgaatatgtaactctcgaggaggaatccagaaattttcatggtctttccagccagcaacactagggcggctcccaaagagtgtccagcaagccagatagctgaatggttgtgtttgtccaccatacggcggattacatttatggcgtacatagacctgccaccttgatggagggtgttgaagatgcatttgaggtcaagtttcaaatcaaacttccaagtttttccctttaaaactgtgccgcggaaagcaattacatagcgtggaactttcacatgaggggtattttggtagaggtggtatagttcgtattcgaaaatggcaccatagatggagctgtcatcgtcgatcaaggtttcgagtaaagtgaagtggaaaaattcccaccatggcttggctagtgcttcagaaccttcccgttcctcaagcctgtccccttccaatgtatacactccatttaccaaacttgatgccactgaggttcgatggtactgattgttcctattacaaggaaaataaacaagcacatgttagttttagagtccgagtagatatggaacaaaaacttctatctttgtctatcataagaaaaataaaaataaaaatctattttgagtgctataaaacaaattaaagaaaaatatatcttaaaaggaagtatctattttatttatttcaaaacaaataaaataaaatgttaccagtcaatagatgtaagatggaaggggccaaaaatgttgaaagtatctgtatctttggaagccctctcttctcctcccatcagttttccgagagaacctcgtcccatttcttcttcttcttcctataatctaaggtattacattgccaataagtaatcaaactgatataaagtttaaacggtgaagaacaatatgaaaatgtttcacaaattaattatacatatatttcattgaatgcactactggctactctttctggccattgccaaaacttttatataaatgcatgttctgtaaattaattcgaatttcggtataaatcctgattagtgattactaaaaattagaactgcaaaaacaaaaagctaaacttatcgtttttaaacgacagattatacaaaagattgtaggaactctctctctaggctttgttatgactatcattcactcattacataaaataaacagaattctttttaaaaggaagaaaaaaaaatcagaaaatgataacataaaataaaaacataagttaataccttttttcgtgatcttactggtcaatcagactcgaatttaatcgaatatgatttaagtaaacttaagagttcgtgaacttctttctatctctcttctagctcagatgcaccttaggttgacaaaaaaattagatcctatagagttattctgttcttctttttattctttttttcaagaggaaaaagaactaatgagttactacacagataagcatcttgctatttatagatggtaaaaaaatgaagactttttggatccggagactttgagaactatccctttaacactgaaccagaatgtattaactacttctttagttacaaattgacaaattttctacaaattggcaattaaaaacacatttaataagtgtgaattagtctctgactacatgtacagcaactggtccgatttatttatcatatagtataaagacaacgtttattcatccatcatcaaaccaatatagtcccacatg

SEQ ID NO: 1654 - DNA, 3000 bp, Unknown
  misc_feature (1)..( 3000): cDNA_ID_2142068_gDNA_ID_1620431_Annot_ID_156867 3000 nt of promoter + ATG
ttatcaacagcttctttcttcttcaatttactggttattttttcgagattggaagttggttcatgcatctcccaaaaagtgggtgccgttagaactggactttggtcttatagttctcacgtgattttttagaaaatacaaaaattagagttttagagttacttaagtaagtgaaattaaacctaactcaaaacatgaaattttcatgagttaagatgtggtaagtttaagttacatattttaattcactttaaaaacaacttttagtttttttatattaaaataatatatatttttcttaattcaatatcaattattgcgagaaaatagttttattagctgaattttaataacatttcataaatataattatttgaatttcttatttttgttgctataactatttttgttattttcatttttgaattatccataatatttgcaagcatagattttaagaagatgaatgaaaaagagagggacatatatctcagtacctattcagatcattctcactgatttacatactctatggtatatcttaataatattataataatatctttaatataatttaattatgtaattaaattttaagttattaacacaattgaaggaatcaaaaatgcacatgtggtaaacaaatttatcctataataacttgttgatggagcagttcttagtacccagcaaggcaacaagtggaagtggtcactttctctccttgcaacttttttaagatccagaaatattatatttgtttttttttagaatttgttagttgtgataagaaaacaaaagttattaattaaaatgaaaaaaaaaattcccatttttattttaaacgacatattaacagaataaatgaattgagtgttagaaaaaacaaaacagaattgttacttattaagctggtgccaagtcgagatcgattaagaggtttatttgaaatatttcatattaatggtttattgtaaaaagaaaaataaggataaaagttgaataattgtcactttgaagggctctttcggatattggaagtcacatgaagaacttttttacctagccaacatgaagaaatattaaatggtgaggtatacagtatactgtatataaatttatcttcttgccacttggtgcatatgtcttggatttagaaaagctaaaaagaattctgaatgcaattttattattgataattgtaacgatagataaagtcaaacaattataataacactgccacttagatagaacttataagaaaccaaattgataagcaacaataaaaaagtgttgaccattattttcttaggccatatagtaatatcttgatgcttgacatttgatatttttatgtccctcccttattcttaagcatccattggcattacatgaatttgggttaagcgaatagagtagtgtagagtatcgttgaccttaagtataaaattcaatcgcaaaactttttccgacagaaatatataaccttattattaattaacgttgagtgtagtgttaactatgcttgagagtaaatacaatttgaatagaaaacattattatgtaatctttatctatttagaatatgtgcaatttgaataatataccgagcctaaaatctaggataacttttatcaataaattcaaacgcaaaataattttcgtaatttctaaaggagttagtaaaggaataattgtgagttacgttcattttagacttatcgaaggttaatatatttatgatttttatacgaggttagtaaattacagaaaatcactttcgagggaacaatatatgatttcaattttttgtcgattcatcttctgcactgaactgattttggttccaatgttgaaaaaagaataatgtcgaatcaaactgagagataataaataattgctatgatgtgagtctattatgtatatcaccatgcaatatttttctgtatatatatattacaattaatacaatgattgagtttagatatagttatgtattggattatatttcttgtaactaaccttttacttcagtttaaagccaatttgttgttaaaccaactatttttaccttttctttattgagtttgatcatgtgggactatattggtttgatgatggatgaataaacgttgtctttatactatatgataaataaatcggaccagttgctgtacatgtagtcagagactaattcacacttattaaatgtgtttttaattgccaatttgtagaaaatttgtcaatttgtaactaaagaagtagttaatacattctggttcagtgttaaagggatagttctcaaagtctccggatccaaaaagtcttcatttttttaccatctataaatagcaagatgcttatctgtgtagtaactcattagttctttttcctcttgaaaaaaagaataaaaagaagaacagaataactctataggatctaatttttttgtcaacctaaggtgcatctgagctagaagagagatagaaagaagttcacgaactcttaagtttacttaaatcatattcgattaaattcgagtctgattgaccagtaagatcacgaaaaaaggtattaacttatgtttttattttatgttatcattttctgatttttttttcttccttttaaaaagaattctgtttattttatgtaatgagtgaatgatagtcataacaaagcctagagagagagttcctacaatcttttgtataatctgtcgtttaaaaacgataagtttagctttttgtttttgcagttctaatttttagtaatcactaatcaggatttataccgaaattcgaattaatttacagaacatgcatttatataaaagttttggcaatggccagaaagagtagccagtagtgcattcaatgaaatatatgtataattaatttgtgaaacattttcatattgttcttcaccgtttaaactttatatcagtttgattacttattggcaatgtaataccttagattataggaagaagaagaagaa

SEQ ID NO: 1655 - DNA, 3000 bp, Unknown
  misc_feature (1)..( 3000): cDNA_ID_2105929_gDNA_ID_1620431_Annot_ID_156864 3000 nt of promoter + ATG
cgtataaaaatcataaatatattaaccttcgataagtctaaaatgaacgtaactcacaattattcctttactaactcctttagaaattacgaaaattattttgcgtttgaatttattgataaaagttatcctagattttaggctcggtatattattcaaattgcacatattctaaatagataaagattacataataatgttttctattcaaattgtatttactctcaagcatagttaacactacactcaacgttaattaataataaggttatatatttctgtcggaaaaagttttgcgattgaattttatacttaaggtcaacgatactctacactactctattcgcttaacccaaattcatgtaatgccaatggatgcttaagaataagggagggacataaaaatatcaaatgtcaagcatcaagatattactatatggcctaagaaaataatggtcaacacttttttattgttgcttatcaatttggtttcttataagttctatctaagtggcagtgttattataattgtttgactttatctatcgttacaattatcaataataaaattgcattcagaattctttttagcttttctaaatccaagacatatgcaccaagtggcaagaagataaatttatatacagtatactgtatacctcaccatttaatatttcttcatgttggctaggtaaaaaagttcttcatgtgacttccaatatccgaaagagcccttcaaagtgacaattattcaacttttatccttatttttctttttacaataaaccattaatatgaaatatttcaaataaacctcttaatcgatctcgacttggcaccagcttaataagtaacaattctgttttgttttttctaacactcaattcatttattctgttaatatgtcgtttaaaataaaaatgggaattttttttttcattttaattaataacttttgttttcttatcacaactaacaaattctaaaaaaaaacaaatataatatttctggatcttaaaaaagttgcaaggagagaaagtgaccacttccacttgttgccttgctgggtactaagaactgctccatcaacaagttattataggataaatttgtttaccacatgtgcatttttgattccttcaattgtgttaataacttaaaatttaattacataattaaattatattaaagatattattataatattattaagatataccatagagtatgtaaatcagtgagaatgatctgaataggtactgagatatatgtccctctctttttcattcatcttcttaaaatctatgcttgcaaatattatggataattcaaaaatgaaaataacaaaaatagttatagcaacaaaaataagaaattcaaataattatatttatgaaatgttattaaaattcagctaataaaactattttctcgcaataattgatattgaattaagaaaaatatatattattttaatataaaaaaactaaaagttgtttttaaagtgaattaaaatatgtaacttaaacttaccacatcttaactcatgaaaatttcatgttttgagttaggtttaatttcacttacttaagtaactctaaaactctaatttttgtattttctaaaaaatcacgtgagaactataagaccaaagtccagttctaacggcacccactttttgggagatgcatgaaccaacttccaatctcgaaaaaataaccagtaaattgaagaagaaagaagctgttgataatatttctagttttgttgtattttgtaaatttggtcttgtgttcaatttattcgtagtaccgtttcttttgttagtcaggcttttggttcgagagttttcttaaaactcgtcgcctttattttcataagcgtttttgtcgggcatggattgtacccttcactttagcccaacctgaaacaagattaacttcattagcagccaaccaatcccaaaagactcatgatagtcggtcatgattctatcaccaacttagtttttttttataaatagagaggcatctcattaagagagatgggacaaataaaaaagatgggagaagaaacccaaacttcaaacaactgctctattcatccaacttgggttcaactgctcttttctttcatcatgtcgtttgactgcttatttcgtccaactgacactaaactattacgctcgtctatctcgttgattgacagtttagttcgtccaacctggcatccaactactctgttcgtccatctagttgcttgaatgctcagtttgtccaacttggcgttcaattgcttagtccatccatctcatcgcatgactttgtttgactgctagttcgtcactcaaactgcgtagctcgtcgtccagattgactagctcttagttattgtaatatgaactacgaattatttgtccatttctatgaatatgtaggcagccttttacaatgcacatctataaactaaataaactatgtgttcgtcatgagaactacttaacttctgaacttcacagttgtcatgaaattttttttccttgtaaacaaacttacaatattttatcaaaatctatgcataaacattttcgattcttgtcggctttatgtctggaagatttcgttcagttttccggcttagtatagtttttgttttcttttccaatttttcatttttttcattttttagttatatatatattatacacgcatatttgtatctctattttattatgtcataaacttttgacatatagattttagtggccataatatatttttaaggacattttgtcattagtgctgaaatggtgagtcaatttcatagaataatgtaactttctaattgaactatattataataaaaatacaacactaattacatatcagcatgtcgtaccattacttcttgaatttgggcttaacgtggcccagagttgacataattgcatccacataatatttttttctccgatcatcggaaaaagcagtaatcaagatg

SEQ ID NO: 1656 - DNA, 3000 bp, Unknown
  misc_feature (1)..( 3000): cDNA_ID_2142053_gDNA_ID_1620431_Annot_ID_156862 3000 nt of promoter + ATG
tggggtcttgaagctcttgtgtgtatttcgttgcttcaagctcttctgttgcttcagtcttaaaacgttgtttggcattttgtgtgatcaaatacaaagatttctttttctttaaacatcttagagttctcaatatcacaagtaagattgcatcattactgatgcagttgcaactgcaaattacatcatcagtgacacaaccttttgccattatgtttagttggaaagagacatgagaataagaggtcttcatgaatcattttgtatatccattggctctcatctgttacctagtggcttaataaaaaattgtgaagacaataatgcagaaactcgaaagaggccttttatcttaaataataataacgagaaagagtatcattcttataaaatcatattctctacattattagttacttctttacatttaaaaacagcaaaataaacatcaccagccgaacaagacaagaacaccaatgtgttcgatcaaatcttcgtaactccccaaatgtcatatgcaaccacccaactgcaaaaattcacaagtacaaaaaaaaaactcagagttcagttactaattgttattgtttgacaacaaaaggatactaactttatttgttagcaagttatataatctctcaccataatagattcgatttctttgtcggagacaggtgtacgtttcggctggagagatgctttccctccatcagcagtgttcttcggagctgccggaacatcagaactcgccgtcacatttttcttaacgccggaaacagatcccggcgccggtccagaacctgagaaagtcacacacaaaaaaggagacgttaagaacaagaataaagcaagaactaaagaaaataagagtagtgaaagagaataaactaaaccaaaaaaacataaaacaaagaaaaatgttaaccagatgagatagaatgtctctgaggaaatttgatacgaggaattcttctcatcttcagcttcctatggattcttcaagtaattgctctgttttctttctttctctgatttttctgaccatagagttgaacgtagctcttatctttatcctgaagttaatgggctaatgggctgaagaaaaataatcgttggatgggcttttctgtaaagtaacacaattgggttatttagaaggcaaaaatgaaaaggtataattttcagtgacaatgccaagaaacaaaaaaaacatacaattatgaccaaaaaaaaagaaaaaaaagatacacatacaatagaatgtcgcagggtttggttacggtttatcatggagacgactccttcaacttatttagtcattcttcatcgtcgtcgcctttgcttatgaatctgattttgtgtatgagatgagcaatgagcatcaaataatgaagtattatgcttttttcataagggtatatgaatataattttgttttatttaatatattggaacgctacattctttcgctgactcgtttatttaagtacactgactcgtttatagctcttatcttttcttttcttttttggaaactagaagttttgtcttgaagtcataataatttctttgaagacggtggactggacgacgagaaaatcagagggtgacggtgatgtaacaagactagaagtctgccaccgtacggcgtctaacgctatgaaaattatcttgcatgtaggaatttttattttattttattttagtttcttaggagcagtgtttagtttcttgatctttcctgttttgacttccctcccaataactctatatttccaagacagagtaaatgtgaagaagaaaactttaagacgatagtgaatttatgtgtagataagatatatatgaagaaaatatggacaccgaatcacaatcattgataaagttatgtggtgaggattatattgacttgttcatggaaagcagccaaaaaatgaattagtctccaacaatttttggcgaaacgatattttacgtcgacctttgacaaaaatagaaacaacattaaacggaacacgaaacaagaagtgacatcattcattgtgaaatgtgtttattcactatgattttctttttgatttatcagaagtttggatataatcatgtatgtgatgatgtcacgtttgtgcttttgtaaattctcttaaaagccatataaagactaaagtaacaggcaaatactaaatcctaaaccctaaacccttatagatatggatttgccgttaattgtagtgatagatgctactaaactatcgtgttgacttggacattttccctagtagccatctggagcaagataataacagacttgtggataatgcggtagatgagaaaagaccatggtactgacgtcatcatcgttggagccgaagttggcggctcgcctctcgcctatgcacttcccattgttcgtaatcggtccaagtatcgaatctctcagggccggctcattagaatattgggttctgtactattatatatttaagcctacaataaagatgattttaaacgaaagaccctaaagtgtgaagaaaaatttgtaaaattattttggaccctgtacatttgctctccaagatcctcccaagaaccgcctgccgaatctgcatctctcttctaaaacatctagttaacttcttgacattttatataattagcaaattattgagatttttgaaactcttaaatgaattaaaatagtcaaaatgtcaataatttgagtggtgcattttgtttgcttgttctatatagtaacaaaaactcattaattagggtggtcaatatcttctgtttgttatctgatataaacttatcgtttcttttatgtcaaactttgacagccgagattatgataacgagcatgtggtaataatgcgacgttcaaactgacatatctttgaactatatatatgtcactcctctttccacaactatctcataagccattttttttaaaaactcataaatcatattgagaacaaatagatttggttatatatg

SEQ ID NO: 1657 - DNA, 700 bp, Unknown
  misc_feature (1)..( 700): cDNA_ID_2142105_gDNA_ID_1620432_Annot_ID_156880 3000 nt of promoter + ATG
aagaaacccagaagaatcctaaaatctaaagctcaacaataaacatatcctaatcaaaagaaggaagctttgaaattagagtcatgtgggtatagtgaaaaagcttacatttagggatctgatgtttggaacaagaagggcagaaccaagagcctttgggaactgaaacgaggatcggtctgagacagaaaagatgaaaccctttatcgcatttgtcgcaaagaagcagctttgctggttgtttaccggaactgcattcttcgcagactgtatcccaatcggaatcggaatcatgatccgacatgtgttgcggtggttcggatctagggtttgacgcttgtgttctccttcgcctcacagccaccattcttacacttattgatttaccagagaaagagagagagtgagagattataaatgtgagatctagccgaggttgagtagaagagttcgcgctctggattcaccggattttcccggggaattttaatttggcgccactgttacggtttcccgatttgcagactggtttattttggttttatctaaccgattttgagaaattaggattagatcggttcatatattttggttgttcggttcggttcaatttgattatcccaccggacaaaccaaaaccgacataagactctccttcaatgtaactttcaactaaattgattttgctctttgaacgatg

SEQ ID NO: 1658 - DNA, 3000 bp, Unknown
  misc_feature (1)..( 3000): cDNA_ID_2142147_gDNA_ID_1620432_Annot_ID_156892 3000 nt of promoter + ATG
ccccggtttgcttcttgatttctcggtctacaagttggtcaagtcctatatccgtgcctcacctttccgacgatcagcacttaaggtagtttcttgatatcctcatattattattaagtacattgttcttttctctttctacttaaatatagctgatttacttatgataatagtcgaacaatttatgctacaaacagaatgttacttgtctttttggcactcagtgaataatttcctgagaacatcttttcctatggttttctgtttcttatattgaccagtttttcatttgttaatcttttgaacaggctctctcgaaagctatacctgatgaagaacttgtgttccttaaggcacagttcatgctcctggatcctaaagacggaggcctatcccttaactgtttcacaatggtaagtatgtctttcatgatttagctatagcattttgactcggactttgatttgtgaatctagatccagtatatttatcccttcttgatctctagattccattttctgaatagaaatagtttcctgaagcaagagatagaaatattgattcaaaataaacacaaactaatatataccgtttataatcgttgagtgtaactgcaggctttaacaagatatgctactgatgctatgatggaatcaaggcttcctgacattttaaatacggtaacacatctcttattatatattttatcttcgcttttgaagtttatgagtggatcaattatgagtgttagatatggtttcatgtgttgctagttgaaaatgattgtacattttctctagggtgggaaacattgagaaatgattgtgactcgttgagctttagtggtaactgttttcaccgtaattcctcaatttgaattctgagtttcccattttttaccactgtgcttgcaacagcagacaattctcattgattggttttagatttagcttgctacaatcaccaaaatatcgccagagttttctctgatattgagattgaggtttctttgctgtttttttccgtactcctatggacttagcactgtgtgctgaattacgccatttttttccttttataaagatgcaacctctggcgcaaaagaagcttgactttgaagagttctgtgcggctgcggtcagtgtttaccaactggaggctcttgaagaatgggaacagattgcaacttcagcatttgagcactttgaacatgaaggaaaccgaatcatatctgtccaagaactcgccggggtatggtcctaatttaagcatctatgagatcgtgtaatcaccatctctttcttaagattaaaaacaatattcttatatttgggcgtgatttaaagcaggagatgagcgtgggaccgagtgcatatcctctgctcaaggattggatccgaagttcggatggaaagctgagtttcttggggtacgctaagttcttgcatggtgtgaccgtacgaagctcaagctcgagacctaggtgacacaccatgatgtaaaaagtcttctaacatgtgaattgagtttcaagaaacatcctaaacaatgtcgtcgtcagagaccttggattcaaagattaaaaaaaaaaacttgaaatggaagtgaagtcaggtaggtatttcctttgtaaatgattctttgagcattttgttttcgaaacaaactaaaaaaggaaaaacatattatatatgttatagaaggaattggagaggtgttgttcttctggttttattctctgctttcactttcgttagtctgataatatgttgtgtacagaaggcgatagaagttttttagccgatagttgaagcaagtgtcaaatttagtgtataggaatgataaagtgttttttcttactcgtattgtgagtacgagtccttcggtgtgaatgatactgtggagtgccccatgctcgtgagaggagctggctttgtggctttggcaaatcctattggaaaatcaggtgagaacattacatcaatccataggggcattatcaaaagagaggcgtgacacaagtggtctaaacagctttaaagaacagacaaacaaagaagatgtggtttcttgaattggtcttaagattacataccagagaaatgtgattgaattggcaattaaatcgttgcttacatttagtttatcaaatgctaaatcatgtcaaacatgtatgtctctctcacatgttaagtgagtgtaaccaaaaatgcggagaatattggtagagaaatctttaccaggacaaaaaaaatatggtagagaaaaactgaagtgggtggttatagaacaaacttttcatatgaatcagtcaactcgtaaattattatgcaagtctaatttaccattcctagaaaattattgaaatgtaatttgaaattgataaactcgtgttgtaaccacttgtttttttggcaaagttaattcttgcaaagttagttacactcgttttacatgtgtttgaaacattgtttagattttttgttactgtttgatacatctatctggtagagaaatcttttatacattaattgagacacattttggagatctaacatctattaaatatatcagctttttcatataaaagtagaatttaacaaacaaatccaaaaaaaaagagaaaaaaacacattttcgatttggtaaagaaaatacaaagtttaataacattaaaagttcaaatcaaccatattacatttacataattatacactactatactaaacttaagtataaaatctaaattgtactgtataaattatttaaagattaaaaaaatccaagtagatgaacataaaacacgtgcctctcctaagtcctcctaactaattggtattaagtcacaagcctcctttatccactcggtctccttcactataaaaagcaaagaaatcccaaaacacttgtagcaccacaacaacaatatccacattcttcttcttttgagtattacatccaacgaaacgtctctttctttctctctgataggcaacaatg

SEQ ID NO: 1659 - DNA, 3000 bp, Unknown
  misc_feature (1)..( 3000): cDNA_ID_3063577_gDNA_ID_1620432_Annot_ID_156884 3000 nt of promoter + ATG
atatttgttttaaattttaaaaggaatcatggaagcaaattgaagactcattataagattgttcgtcttgtttgagcggttgtagaaatagatttggggaacttgggtttcatttagaaaacaatcctgattttcttttgattatcctcaaaacaaagtcgttttagggatactaatagagtcgttaacaagtgataatgaatgttataagttcttttaatgaatgatgacaacatgtttattttggcttggtcaacgaacttctcatgttttaaatggtagtcaacgcttagttcatgtttaaaatggccacatataaagtcgatgtttaaaatagccacaatttaaaacttgactaataaagtcgttaacggatgataacggacgttagaagttccgttaatgattgataacggcatgtctattttggcctggtcaacgaataatcatgttttaaaagttagtcaacgtttagttcatgttttaaacggccgcatacgaagttgatgtataaaatggccatttttttaaagttggaggattaattgacattttgaaagttggaggatttgtgtgtgtgtttttaatccaagatctgcttgtttatctgaatcactacatttggtattttattcccatattttatagaaatgtattggaataaattcatattttttcctttaactataatctcataatatattagattatttaatttctttatttgtttttttcaaaaaaaattaatgaaggatccgaatcacagatattcatttaattgtaatatttgttaatttactaaattaccctcacaatgttgtagttcacaaaatgcttcccaatttataatatatatatatatatatatatatatatatatatgttttttagttattatagactacatcacaacttaagataaagactaagacttttgcatcaagcgaacaacaaaaccagaaattatgcttaattaagtgtcagtgatcgctatataaacaaaactttaaatctcttacgattcaataaaaataaggaaacttcatgatacatcacaaattcccctaactctaattataaaagaatatgagtaaagaacatattccaaaataaaaaatttaataataacaaaatatataaaagacatattatttatttttttctagttattatagaccacatcataacataagataatgacctctgcatccaaagcaattcacaacaagaaactatatcccattttgggatttacttaattaattatagttacatactttatctcgtatgcttacgagcccaaaagaccttcccgttgatccgcagctttactgaatcattttctgataaagaccacaattttaccgtttcccaatggttgagtacgcgattcatggtagcgaccgagtccaagaccagcttcgcaaatagtgcttgctcttgaccatcgtcatgttgcatgtcaatgccttgaacacaattttctccatattgttcggtgaaacattgcttgatcacctcttcttgcgacataggaaccccacgaggaaacgttatatacaaggtccgttcgttagcatccgcgatggagttatccccaacagagacatcatgcatcatgttgatactcacggaagtcggatatagggaatgatgggaggatggtagagtcttgtgacaggaggatgagagggtggtggagtctgttgatagaggttaatcaaatcacacatatatatgcaggaaaattgtaaaacaatttagtaaattatttgtactatattataactggagtaaattataatatattataactataatttggatactatgatttttttcttaattaaagtggtcaattagaaattgtcacacgtctctatgcatttgtatgcaatgtctttacatatgatatgggcatatttatgatgtgctttaaaaaaagaaaactatttatggtgtttctttttatcacatatcctctttattcatatctaattggattatttcatgtttttatttattctctaattttgtgattttgttataagaattgctaaatttatttttgaataacttgtagaatttttaaccaaatttggatgacacttatggttaaaaaaatatgatatttgatttttcttttgtttcttttgaatatcagttattaccattaatgtcatccaaatttatggaaaaaaaatctcaacaactatatttacaaaaaaaaaaattaactatgaaaaaacaattttcctaataaacaaattttgaatacattatcaataagaaattgtcacatcaatttcgccatttattaaaaataaagaatatgtttgcctaaaccaacatatatatatatatatatatatatcttattttattttcacatcaaaactaataaaagttggttttggcacttggttcgtcgagcttaatagataaataaaattgaataaattaatacttctttttatattctatttttttatagagtaaataatttttctagatatgactgagactacatcttatgatttatttgacacgtatcacgattctgtgagttagcaagttcggtaaccaaaatttatataataaaatgttaccatgaaacatgaaaatcaatataatcgcattaactaattatctaaatcaataaaaacattgtaccgaaccaatgatttaccaaattgaaatcaccgatttaaaccgataatcaaacaaacaaaaacatctttaaccgatccggttattgtttgttatcatcaatattgttcaaaggttaaagacgaagatatctaaagcccgtcgacatttcatttccgacagcaaatttgcgaagtcaaatcgcgtaatcaaacttcagttttgttccgttttcgaattctccatttcgtataggagatctccataaaccctaatcccctcagagtgcatctaacattcgattgtgtttttctctattcaaagaagaaattttcatggttttctaaagcg

SEQ ID NO: 1660 - DNA, 3000 bp, Unknown
  misc_feature (1)..( 3000): cDNA_ID_2142132_gDNA_ID_1620432_Annot_ID_156887 3000 nt of promoter + ATG
caaacagtgaacttcaatgagtgtgaattgattgtcacgtcacagctacactcgccgcacgcaaatatagcgaccataacggaagtgatgacaaaaagagctctgacgtttgctacggagacggtttctcaaatccaagactatcttctcccaaacgctacagatactcaggacaaagccgttttctccgcttgcgagatcgcgtacaaagccgtggtttctcgtcttcagagtgcttatacgtcgatgaagaacagtgattacgtggcgatgaaggcacagcagaatcaagcacttgggtatattgatgtgtgtgttgagaggactaacttctttcgccggactccgatggtagcagccaactattatgtgaggttgacggcgaagattgcttccattgcaggccagatccttgctcctagtacgaccacgtccctgtccccttgaacaaaatattattttgtatttttgttagagaaaaactcgagctttgattcatcaataattatttatttatttattaattttcgttgtcttttctcatagaaacaagacaaaccacaaaatttagcatttcagaaatttgtagaattcagtgaattttggaaattttctcacaagagattcgtagaattcagtccactaagttttctatgaatgatgtggttattaagataagatttgttgtgtgcaagaaagtgagttaccgaacaaacagccgtcacttacaccaaaaaattcaatatatatcatatatggtgtaagaaattacacactcccaaagtccagcttgtgacgagaggtgcctttgaacttataaaccatctgttattcttttttctttccaatggtcttaggcccggtcaaataaacgaaccaaatgtaccgaatcaaaaccaaaacaaaaataatcgaatcgaatcaaatcgaaaattgaaaaataactgaatggttactaaattttataaccaaaagaaccgaaaccgaatgattatgtattgaaatatttcaggtaaccaaaaatatctcaaatataaatatattttcaaaaatattagttatttctagactaaataattaaaaatggttgaaaaaaatatatattatagtaaaaatattcaaaaataaccaaaaatatccaaaatatctgaaaatattcaaaacaaaataaccgaatagatactaaattttaaaatcgaaagaactggaaccgaaccgaatcgaaccgaactttcaaaataaccgaatggatactaaagtaccgaaaaaaccgataaccgaataaatacaaccgaaaccaaatggataaccgaacgtacaagaatatgtgatcttcttttaacatttacacccaaaaaaaatgtgtgatcttatttcctccaaatgaaatattattatttaggcccttatgaatacccgccattttgagctcggacgtccacgtcggtctaatccaattgcctacgttacgcggttctttctgcgtgaattatgtcactctttctcttttttggggtgttcattagagcagcaccaatggtggtctctcttatgagtcctttatcataaaaataaagaaaaataattaaaaagagagggacagaagagagaggagctccaaaaacccttatttaagggacagtctcaaccccaaatatacacgtgtagttcttttagtagtcaaactctattaaaaaactaaaatataataacaacattaaaatattattattattttggtttttagggactcataagagagaccaccattgctgctcttagtacactagacaaacaaatatactctatttcaaagtaatacttatctagaactatgtatacaattattacatattgcaatacgataaaaaagagtatcatatctagaaaagtggaatggtctatacgtttgttgatgcttaaagtaaaattttaatttatgacataatttggtagaattctcatctgaatatataatagtagttgttagaaattaattaacttgaaggtaaagtgtgcaagtcataattttatgttacctcctaacttacacttcccaaaataaattacattcgtaaagtttcgtataatacgtaatccatacgaatcagaccaaaaaaaaaaccaaaactcaactgtgaaaaaaatatttttgataataaatattgttgttgtgtaacagtgtttttttatatatatataacaaatggatggattatggaataattttaacagaatatatgggtcaaacttttaatattatgggaatagaagctgacaacacacacatcaaaaagctgggacacatcaggtagtaactgaagtcaaacatagacaccaaactcaactaaacccactctttttcaaaagtcagtgctctttctctttgtggggtttgttgtttactatcgacactttcaagggactccatttttttcctatttttataattattaccaacaccaacttcacaatatttgttctgtttttgttaatatacaactttaccggatttgtactaccatcttcttattattctttttttcggatcatatattaaaatataaaaaattgcacggttagtgagtttcagaccaacaaccatatatcaacccgctctgtcttttatctgaaaaacgtgtgttttttccacatttggttgaatctgaatcacataatatatgtactctcaattacaatgcaaaccctaatttgtacttctgtgcagtacactttctctctctcttcattcatttctcttcttctataaaaaaaaattcttcaattcaatatcactaatatgcgattctctcttcttcttcttcttcttccatcttacgccaaacctcgagtctgcgaatcattcgattctcagattcgcatattttcttcgaattcgctaggctcaaaacgttgtttccgtgtacaagaagcaacctaacgatttggggccaggtgaaggaagagctgatttaggttattgagattcgttttcttcaa

SEQ ID NO: 1661 - DNA, 3000 bp, Unknown
  misc_feature (1)..( 3000): cDNA_ID_2142142_gDNA_ID_1620432_Annot_ID_156890 3000 nt of promoter + ATG
gtttggtaccttgaccaagcagctgcctccgagctctagagaggtagcctaaacacattaatattggtgttttgtttgtagtctctacgttgctttgtgttgaataaccggttaatacatttgcgtacgtttacttcgtacaaaatgtgttgaatattcgagctagttgtttcttgtagttgtgatgtgagtccctggctatgactatatatcattataaaaatatatagtgggcttcatttaatctgtcatttcatgaatggtgtttaattaaacttttcttttagggtttatcattaattattcatgctttttaactatatattgtacatagtatatacaagtgataatcttatatactatatattattgttttgttttattatataaaatcaacatgtattagatgagaacacctgcccaatgtaagtttttttaattaacctccataacataattatactatatagtaatgctgcaatacgctcgtatacgaataatatagaagatgagaagaatattattcgttttaaaattcacagaatgggatttacttcaaagtggtaattttgttggccaatagtagttgatacgcaagacatgcattaagttagttttaatatgtttccacacagaaaaaacatggacgtagaatgcaagcattaattgtatataccaagtaatttgtgtatatcatgtcaaggacaaaaaaaacaagtcaacagaataaaccacaaccccatatataaacctgttttcggagaatctcccaaataattattgcaccaataaccagtatctaaccttgaaataaacactaaagtaaaatcttaaatcgaaactctcgcttataatagaaaaatgtgccagaagagaaaataggtttcttggcctttactagggatttgtttctgttttcaagtgtgtcagatttgctcaatatttatcaagtatgaacaaaaagagaaaaaagtaggttgagattttaatatggttgttgaaccattaagaaaaaggagcccattttcaagactcaagagaatggtaattttctgtcgatttgttagtctataaacaccgcttgtagatgtaaaaatttcaatggttttgtaaaatgatgcaaattgagttgttcactgtggtgatcttgcgtgttgaggatgaatttgcccgttgagctaataatttctggtgaacatattatgtcatttgtaagatgttcattgattgtgatgatagtcatataatatgaaaactaaagtattcatctactttaaaaaaaatgaaacctgttacattgcaatgaaataaaaaatccattaaagagctaggaacaaaattcagaggaaaatatgattctactgttccaaagaagaatgtatgtgataaattttattcttgcatctatctttttataattcccatttggtggttatatctcatttatcttcattcaattgatttatttatgaatatattgtataaggctctagcaaacaaatatgagaaagttttaaaagccaaatgtaaagactaaattttaaatatcgatttaataaggaaaagttgttacatctgcaaaatatattgtatatacactattgaaactcgtttctgtcgatagtgtcgaatcatgtgcaagcaagctaagcgtagagtggagacaaaaattctagtagtaaactttatttagtttatcgttgttcagaaaagacattttattagtttataatttgaagagagtagtgtactaaattagtagtattgaagagcatcgttctattttattttcttaaagtaattacatatagagtcgacgttccaacgacaactctggacagctcacgcattatgtgattggtagttaggtttttgtttgaatagtttttttgcacaaaaatttggtttggaaatattataagttacacatatctacggcctttaaaatcatgcagccactcaccttcaacccttgtatggaccggagcttcttactagggattaccatttgaatttaaccaacatttgaactgcggacccgatgaactaaacagaaatcaaacgaaaaaaaaattaacgaatttattggctacccgttgacaatttatttaacatttatatgtactgatgttagcaaatgaaatatgtcttaaaattaatggacaagaaaaattggtaaccaagtagaaaagtgctttgagagtgtatgacaatgctcaagatcactagttcaactccatctgaaacttgaaagggggtatttacatttgaaatgtggttcctgatacttaaaaatattatagagcaaagattcagaattcttatggtttatcaaaaaaaaaaaagaaagtaaagtgccgaagcccgagttcatgggatgtgcttttaggttccgaatggttacgtttgtaccttaaacaacagaatgtgccaaaagtgacagcatttttgtgttatattttcttgtatgatctgttttttttttctactttataagatgtaactatagtttaggtacatattaatttaagagatatatcatcaatcaagtgggtgtttaatattttatactagtttatttccaattacttgtgtaatcgtttcataactcgatgagctgctgtgagatataaaattatatatgttttgatgggtttcttatgacttgcagttttgtgcatatataattaaacaaaagcgacccatgttatgagcataattaaataaagaaaaaaataattaaataaagaaatctatgaaacttaacaagctgtttaggaacaaaaagaagagttgaaaactcattaacaatgaagagtggtaaccctaaaacaaatcataattaaaatacgataagcactaaaatacataataatttttttattacaaataacgcatgtttatcctaattgcacgttcatcacctaatcatcaaaacatttaacaccacttcttcttcttttctaactattacatctccttgatcagattctcataatg

SEQ ID NO: 1662 - DNA, 3000 bp, Unknown
  misc_feature (1)..( 3000): cDNA_ID_3063581_gDNA_ID_1620432_Annot_ID_156881 3000 nt of promoter + ATG
gaagtttggagaacggatcctgttgaaggagtctgatcttctaccaaagaaacttaagaagaaaacaagaagacgtgtcgcctcaagcactatgaacacaaataagcagttggtctgttctgcggactggcaaggtccaccgccatgggactcatctttaggcggtgatggctgccctaaatttctattggatgtgatggtatttgaatcaatttctgttttctgttgctcttttgtttcttggttttatttaattagaggacaagaatttgatttcacctatttagtatctttgtttttgaatctaaccattttcagtagaatccatgtggtatcataatcagtttcttgtaaaactactttataggttgaaggtttggcgaaacatctacgttgtgtggggattgatgctgcaatcccacactcaaagaagccggattcaaggtactttatcctaaagctgctattaaagtttttctgtgacatggggttttgatcacaatatctgtataggattgattttctaattgtgatgttgacacaaatgccagggagttgcttgatcaagcattcaaagagaacagagttctattaacaagagatacaaaattgttgagacaccaggatttggcaaagcatcaaatatatcgagtaaagagtcttcttaaaaatgagcagctacttgaggtacaaacaaagttaattttcaacgtataagctgttatgcaagatctgtgatgtggcatgatttggtttactagatttattaatcaaaaaggacacataccctggaaattttgctttaaagaataggatctctcaagacactagttaacaaatttatttttaaccttactttctgggtggaacattttctacactacctgtaattatggcatgcttggattcaccgagccaaaataacctcgtccactcactgtgcaaccacttttcttacattcagtagaatgattacggattttttgtgaattactgaaacaaataagcttcgcaggtgatagagactttccagctaaagatcagcggaaatcagctgatgtccagatgtacgaagtgcaatgggaaatttattcagaaacctctaagcattgaagaagctattgaagcagcaaagggtttccaaagaatacccaactgcttatttaacaaaaatttagagttttggcagtgcatgaactgccatcaactatactgggaggtaagtcacctaccccatcttttgccgttgtgcattatagttcttgaacgagtataccttgtgtcaaaaaatcatctggtccatctatgttagttgttttgctgattgaacagtcaaattttagttgcctaacgatatttatcaaatcagtgatccaattaatatttgtatgaagtcttagttggtgaattgaatcttgatttctttaaaacatcttcatgtgttcatgtcttagagcagaaatcatctccacaagattcataacttcctatatagctctgatctgttctgtctctaatagtcagtgtccgacatatttaatgtttgttatgtggtttcagggaactcagtatcataacgcagtccagaagttcatggaagtatgcaagttgagtgagtgattcactttttttttttttttttgggtttttacaattttggtgaagtgttcaatctctcgttacctcagttcctcaaatgtttttattttatatcaaacgtctctaagcaaacaagatgtgtttgtaacttgtgtcgtttgcacacatgtgttccagaggttattaaccgtgtacaaatgttttagtttgttttacaaagttgaacacattactatcttatgagaagaatagacttgtagtattttctatttaccagttaaattcttgcataattttcaaagtggaatattattttcaatatgctttcttgagatgatggcttttctagccgtagattcatgcattttaaatatgatgatataccaaatttaggtattgtggattggattggtctagttcattagttaggcaaaaaatttaacctcatcaaatcaacattacctctcttcctaattttctccattgaattcttgttcaaccattttttttctttcactagcaaatacggtgatgaactcgaaaatgatatctttgcgacagatgaattaaccggtataattggaaagcgtttcttgagcatcagtgttcctacttgaggaagagttgtcttgtagacctaaacaagagatcaattgccccaacacgaaactatgtagatcaaataagtatttagttcactcttctttgctcacttcaaatatgttttagacttattagaaaatccggtgagtcagatattcgacgggcacattcacatcggaattaatagtttcatagggtgttgtctcttaaatttggaccgaccggttggattgcctatctgccgtataaagaaaataagacaagagaacattaatttcatggttgaaccggacggttcttggctaaattgaaccgaaccgattgatttcagaaggtatgtataactttttttacggagtcgtcatcactttctctgctcgtcggcgaagttcacattcaccggtcgtatagtgtcttcgtctccttcctcgtgaaatttgttcatcacagtctctacagtcaccaccataggaggtcgtaccgccggatcttcgccacaccattaatttctgcgttctctcttctcaattcgccgccgatctctctgagcgtaattaccaaatcgtgcttaggtatgtcatcaaatcttgtctcacaccttccaattcatctccatgcactaattcattaagtaattagtcaagggtttaattcaaactttatggttaaatcgacgagagtgctgatgttttggggttagggtgtgaagaaaattatattgattctctctctctctctctcctgctaattagatctccttctcctagaaactgctgtgaggatcgatctcgattgatc

SEQ ID NO: 1663 - DNA, 3000 bp, Unknown
  misc_feature (1)..( 3000): cDNA_ID_3063620_gDNA_ID_1620433_Annot_ID_156901 3000 nt of promoter + ATG
taaatattcttcaagaggtcaccggagaaaggtgtggttttattaattcattctctaatctatgattggttataattagtttacgttatgaggattataaaagtgatatacacatatgtatactatagttccatagaaggtcgtttggtgagaagttacaagaggagtttcaacggtttctcggccctactcactgagtcagaacgagagggagtagccggttagtgttcttagatcgagacacattttatgttgaaatgtttttaaagatttaaccatttgaaactcttttgtgttgttagaaatggagggagttgtgtctgtgttccggagtaagaactacaaactccaaacgacggcgtcttgggacttcatgggaatgaaggaaggtaagaatacaaagagaaacttcgccgtagagagtgatactattatcggattcatcgacagtgggatttggccagaatccgagagcttttctgataaaggctttggtcctcctcctaagaaatggaaaggtgtttgtaaaggtggcaaaaactttacttgtaacaagtaagtcattaaaatttctctaatagaagattagtattgttttaggcagagattgatgtgttcacaatttcagcaagttgatcggagcaagagactacacaagcgaaggcactagggacctccaaggacatggtactcacacaacgtccacagcggctggaaacgcagttgcggatacaagcttctttggaataggcaatggaacagcgagaggcggtgttccagcctctagagtcgcagcttacaaagtctgcaccataacagggtgtagcgatgataacgtactgtctgcgtttgatgatgcgatcgcagacggtgttgacctcatcagcgtctctctcgggggagattacccttccttatatgcagaggacacaattgcgattggggcttttcacgctatggccaaagggattctcactgtgcactcagccggtaacgctggtccgaatccgaccacagttgtgagcgtagcgccgtggatgttaacggttgcagcaaccaccaccaaccgtaggtttttaaccaaagttgttcttggaaatggcaagacacttgttgtaagtatcaagtaacattctcattttcatcatcatagtatctttgtcccattaaattaccaattgggttttcttaacaggggaaatcagtgaatgcttttgatctgaaaggaaagaagtatcctcttgagtacggagattatttgaacgaatctctggtgaaaggaaagatcttggtttccagatacttaagtgggtcagaagtagctgtttcattcataactacagacaacaaagactatgcatctattagctctcggcccctctctgttttatcacaagatgactttgactctctcgtctcttacattaactccacaaggtacctagcagtcttctttctatttcattactcttaatattctccttctttgtcctctgatacccttgtgtttgctttctcaggtccccgcaagggtctgttcttaaaactgaggcaatctttaatcagttatctcctaaagttgcttctttctcttcccgcggtccaaacactattgcggttgatattcttaaggtatcatattatttatgctcttgattctttctttttttttcctggcctgagagacaatggttggtggatggattgcagccagatatatcagcaccaggagtggagattctcgctgcgtattcacctttgagtttaccatctgaggacaggcgcgataaaagacgtgtaaagtactctgtactgtccggaacttctatggcttgtccacacgttacaggcgtggctgcgtacatcaagacatttcatcctgattggtctccttccgtaatccaatctgccatcatgacaaccggtaaacaaaagtccaacttttactttcttgcatcgcaagtaacgtgtgttgacaactctgttcttatactgtctcttaatgaatctttgcagcttggcagatgaatgctactggaactggggctgaatcgaccgagtttgcttatggagctggccatgtcgacccaatagccgctataaatcctggacttgtctatgagttgaacaaaacagaccacatctcctttctctgcggcatgaactacacttcgaaaacccttaaactaatttcaggtgatgccgtcatttgcagtggaaaaacattacaaagaaacctcaactatccttcgatgtcagctaaactttcggaatctaatagctccttcaccgtgactttcaaaagaaccgtcaccaaccttggtaccgccaactctacatacaaatcaaagattgtcttaaatcatggatctaagctcaatgtcaaggtttcgcctagtgtcctttctatgaaatcgttgaaggaaaagcaatctttcacagtgactgtttcgggcagcaatatcgacccaaaactgccttcgtctgcaaatctaatatggtctgatggaacacataacgtgagaagccccattgttgtgtatattgatggttactgatgaggcattatcagttcaccatagttatcaatcatcataacattttgctatacatatatttcttcaaaaacatgtctactccatatacgttttctgattatgtcatcataatgcaaaatgaaaataaagtactaaacgatcgagaaaaaaacagttgtaaaaaaaaaaaagattttgattaaggagttgaagaaacaaaaacaaaattgagttctaaatagatgtgaccaaataaaaagtagatatctatttcctaaaaatgtatttggtcaacatacgatacttctagttaccaaaagagttttgctcaacatacaatcacagcatttgacagaaatatcattaaaattactaattttatactagtgtataaattatatcatgttgatctcgataaaaactgagaaattagacaacctttaattcattttataagaaaaag

SEQ ID NO: 1664 - DNA, 3000 bp, Unknown
  misc_feature (1)..( 3000): cDNA_ID_3063602_gDNA_ID_1620433_Annot_ID_156912 3000 nt of promoter + ATG
tcagttgttgatttctcgattccagatctattaactccttcatcgtcttctgctctccatcttcgatttcttcttcaacgagcttcttaccctcatcatcttcttcttcttcatcctctatcaaatccggtacaatggggaatcgaatcgagctctttagcagctcatcatcatcatcgtcgtcgtgattagacctaacatcacacgatctgcgtcgtggctggtccaaaacagaagcggatgcgtcacgaacagagtaggagcgaacacggcggagctcagtggaagctgagacagaggaagatagagcttcgatggtagagagacgttcacggagacaggtggcacagaaaccagtggtgggtttggaagaaggatgacggtgacagacggcggagtgacgacggcgacgacgctgatgggtttggtgggtcatagctcacagggggtggtttgagttcagtgaatggaagaagaagagagtgaagttgaagaatctgtcagtcacattttcaggatctcgagaagaagaagagaaagagagtcaagagtggcgttgtcaacactacactaaccctttccctttccttaaaccttttctctcgttttattatttcttcattttaatgcgtattatatttatttctgtactttcttatagttaatgaaaaatacagaaatgagttaatgaaaatagagagaaaataatgttatgttttttgtacaaaatatcaaagaaaaaatggtataattgtgtcacatgagagtggcagagagaatcaaaaggaagaagtgtacaacacatcccataatgggtctgacctctggtatttgtaggacgaacataaaagactcttaattagtgaaaatattaaaattaaatggatagacctaaaagattgaaaatggtgaaaacacgtgtgccccatttgttttcttttaccttgggtggtaatatttggctgcttccgtcatttctttggattcccttcgaatcgagaaatagcttcaatgtcaacttttatttattcttctttatttggtttggatatattagagttctgattagtggagtgatttttaccaagaggttgtttagtgcaacaagatgtaacatttgaacaacacgctttactttttgatgcaacgacataaactagtttttgaattaagtgggtttgttcaaatgttacatcatttgttacctgaagtgtgttatcattcaaaacaatatttcattgttatcgtgaaaacagagaaaccactctttacaatggttttaatagattttaactatgacatttacctaaaataaaggagatttattttctctaaacgtttgtggacagcaatggctgacgagtgacattgagattcggagttacgacaagttcccaaagagtatgtgttcttttattaaattgaaaagaaaaaaaaaaccatagcaggtcccaaaaatacacagtagtaattgtttttgtctcaatgtgattgtaccggttttgttttctttctggtaaacaagattggaattttccgacgactttgtccaccacagacagaagcaaagtttagttttacagtgctcaatcgaaacgttaaagaaagcaactgctggcaaataaaaattttaatatggtaaaaagtaattaattattttgggctcaagattgtaatttggagcccaataatgttagttgggcccaaaaggaaacaaataagccttttaggattttggccttttcttgtgcaactgtaataacgaatttgccactcggaactttgccgtcgtcatcgtcttcttcgttcatcttctaccggcgcaaagaatacaaattaaatatcgctgagaaatgtgtccgtgagccttgaattccatgggaattgagtatttcaggttattgaagctagcttccttgtcgaaataaagggcatgttccaagttttgtatatcgtatacatcctttctgctctctttatattgggagatcgatgagatcgaccctaaccgagtcgatttggtttgggtcgatctcagatatctcccaatactttacaacatacatacaactggagaaagaaatcaactttttgtttgtcatagcaggtcagtctcattgcttatgtagtttacttttcggtgtcttactattatgcaccgtttagatgattctgtggcaaagtagtttgtacaaaagactcatctttcatcttaaaaccgtttagacggacctcattttacttgttggtggagatcatgcatacaacttgcagctttaaatacaaccatcactgttccttgtcaagagaaaatcttgcgtttgtctcctctttctgattctctactggatagaataaaagaatcaattaaacatttccttgttcatgtatagaaggtgcaacctaaaggcttcttctacattagatcctctagcgcagaggtatggattccgctgctcatatcactccttgagttgtaactgctttctcgatgagtataggatttgcatatagttcgattaagttttagttttggattaattttgactctgttacttagagaagagaggagatttcaaagacatgttattagttctcttttcttattctccgtcatccttagactataaaggttttaacatcaatgagtcgttttctactctcgagtcttcttgtgtggaaaagtcaaaagtatacaaaatactcagaataccatcatttgttcattttcattgactatgaaaatagaataacagcaaaacttgcaagaccaatcaagctctttgaatcggtctacaacacattaaagaacatataatttatatttctattgtatgtacagataataatggatcattatgcttatattatatgcacaaatgtatctggcgtttaacaaaaggaataagaaacatacatgacttcaacaaactttatttcttggaatttggacatctgacataatattcacttctttcctataaccatgtctatagacac

SEQ ID NO: 1665 - DNA, 3000 bp, Unknown
  misc_feature (1)..( 3000): cDNA_ID_2142209_gDNA_ID_1620433_Annot_ID_156915 3000 nt of promoter + ATG
aaactcgaagtatctcccgtagtctgtgagttactcgaaaccaacttaggatccgatgatgatgccgacgacgaagaagatgatctctgaggtatagcttttaatccagaaaacttatcttggtttatcataaaaggaagagaagctaactttgaagaattcaaacgataagaaaccgtttgagaaaacttagccctcctaatccacgaagtagcctcttcatccatctctaagctcgaaaacaaactaaacaacctttttatcaaagactaaacaaccaaaactctcaatatctccaaagtacctaagcaaacccgtgaatacgaatgagatgacttgctgcaatctccaacgatctcatttccacgaagatacaaaatcttttcaaatccatcgaagccccatttctcaccttcaaccattaatccacaaaaactacaaatcataaaagaagaaaactttcctacgaatactactaagctcgaaatttctccaaacgttcccaccaaaatcaccggaaaatcctgaattacatacctcttcctacaaaatcaagcaacaatactcagaaaatcgaatccatagaagctattgaaaacgataatgagggttaaaagatcgatctgaatcaacaaatttaggaaactagttttcgatatttgtttacctgaatcacaacaaaaaactatgaagcgtcgtcgtgtgttaaaaggaagagaagaggaaagccaagtgaatcggaaatcaagaagatccggcgacttgaagccggaggaagatggaatcgaaggagaaatttgagagctaaaccataagacgtttttggattctcaaagacctttttgacgaatccagacctcttacgcctttttagatggattttttttttctttttttttcacagataaaatgtggaaaataaataaattcttttggaatatttagaaaaatacgttaaaacgacagcgtattaatctgtctgtcagcatctctgatatgctctaattattctgtctgaaagagaaatttaatttaggttcccttttttagtcaaataaattctaaaggccatagacttcggcccattaataataaaactggcccaaattactttatgatataggccatgatgattgcttgatagtaaccagaaacgaaagaggcctcaacgttgacaagcttcactaatcctatgagaaaaactcttctgttttttttttaaagaacataattcacacaaattaaccattctaaacaagaactttaaactacataaaaccattcctatctcttattctcaacattggggaagtgcttaaacaattgttacaaaacaacttttgaataaatacatgctagttttttttttctttgtcaacaactttattagattgactcaaaacaagcccatgctaggtttttatatcaattaaattcttgtttttttttcaaaaagaaattaaacattgtttttttttttttttgttaattaaaacatgctagttgcatgaagttataagttctgtgatgacactgttttaaattatgtattagatcatatgcatctatatttttttctattttatttgtaaaagagaaaattataaatgctactggccaaaaatacgtgtgtgtgtggagaaaacaaaatggccaaaaaataaatgataggagaggaatagaagagaaagaaagaaagatttaagaggtgagtccaaaagattggtaaaacacaaatgcttaacaacagagttaatttttggggacaccacacacatgacacatcactttgtctccagacctatgtctgtcctacgcctttggacatacccttttctcttttatccgatcatcgtatcctacacacattatctcatgattactaatcttgtcttcctttttttttcggtttaaagcaataagcgatatgtacacatcgcatacattaatattttacaccactagctattttaagtttctttattgaacatgtgtacctagctagctagttcatatgatcatatcagtggaagactggaagatatactaaattatacacaaatatactttctgttcagcaaatgttttttgagtcaactattacatttaattaatggtttaaaatagcgagctaagagtggagttaaaatggatgcgacaaaaggaaaatatttgaaaatttgacaacatttttaagatatatttacaagaagtaccaacctctggtcatcattgtattcttctaaatcgcagaatacaaaggttagtacaaaagaatctatcaaataatgggggtactggatttgtcaactatatcacttggaaagcttatgcatggggtataaccaagtacgaaagtataactttattcttaggtcaaacttgcacaaaatattagggttaagaaagtcacctgaatgatttcacgggaactatatatggttaatgaatacccaccctataaaaaaaaacaagagtgacacagaaaggatacaccatttatagacaaactagaactggcttaattttttcgtagcttgcacaatttcatatatatttttaagaaagtcttatggaagatatgtacattaagaggtcatgcgtttctgatttatttgtgacaacctcagttgaaatcattttgccttgttgagcgtttgtgattctggcttcagttttgattctggatatacttccagtgaagttaatatgatttgtaataacaaactagacaacaaatggctagatgtcgaaacttgaaacaagaaatatcccactcctcaattataatttcataattaaataatcaagtttgatacttgtcacatcaaaactctttttcctcattggcctgtttctctcaaatcttcaataaattctctatatatatatgagaaactttgaacctcatttttcatatatatcactgttcttcttctatattggagttcatctcttttgtttctaaagaaagagagagagagagagagagaagagaag

SEQ ID NO: 1666 - DNA, 3000 bp, Unknown
  misc_feature (1)..( 3000): cDNA_ID_2994869_gDNA_ID_1620433_Annot_ID_156918 3000 nt of promoter + ATG
ggtttaagagcaggaaatcaagaaagatcctacaagctcttccttcttatctaagcctctgacctcatatctctgaacttggtattcctcaaatgtggcaatatactgcgaatacgaattggttagcccggctattaccacgctgaattctcttccattgctgccttctttaagcactgttttcacggcatcacgtagtcgcctccctgccattgttgtgaattcttgcaagcagaacaatagagaaaggaaattactaatgttctacatcagtttagaaatgattttttttgttctgggggagaccggaatacctccggggacgcagagaatcactagctggccaatgcggaggatctgaactggtaatatcgacggctgaaaatggattaagaaacagtttttccatcacaaatagctaagtgggattcaatttttatccatcacagtacaagattatgctctcaccgcccagtcgtatggttgtttcatttcaccggtatcaagcaatatgggtttaggtcgttggcatcgtacttgttcctcagttggattcttgagaaggttccttacaagcctccagaaaggatttcccttacacaaagtcacaacataaagtatagtactaaacatctttcattaccaagttagaaggagaatttgggttttacctgatcatctccttgtttaaagtcaaatgctccaggtccatcagttgttcctgcagcgaaaccaaaacccattgcagctggacatgttttcaccacttcggaacctccattttgtccattaatcgtcacttcaagctgagagaaatcaacatatgcatgacgatagtcaacttttccttgtatctcctcagaggctttagtgaaaagatccgcagccttcttgaactgcctctctccaataatgcgggtactctcaaattcatcagggtagctgaaacatttagtcatgccaagttatacatctaacaagcttgactctctaaataccatattgtactaagagagaacataattttctgtgattggtttccgcattgctgaaagtaaaagtgtgcagttaggaataagacgtaccctggtccacggccgtagcattgctcattctttccaccacaagtactttggttgaattcacaaggaaggcctgtgtctatacagaaggctcccaacacattcggactaacatcaccgcagttagtttgacagaaggcagagacaaatctaggtttgtcagcgtgtctaaatctacttctgacccgtctagcaacgcttgacatccttgtaacggttttaccgccggtagacagtaacgaggatgccatttccatcaaatcttgatctgcaataaaagcaacaaaaagttagttttacaataacaagccattactaaaactcttggagctatggttatttacgctcaccataaggatcactgattatgcttgagactcttctaggagattcaacatcaactgatctacaaccgttttctcgttcaaaccagtcttccatgatacgtgctgcagtgcctttattgtccccgctgattcaaggcatttgtacggctcatcgaagtgccatgagttgcaaaccaattgaaactacccactggaccccattgatcatcaacgaatttgacaagtgtcatctctttatctacatcatattcatatttactacgttcatgtgccggattgttaaggtaagcactgggactacggttcacaccagcatccaagagctcccctgcaagctcagctccaaaagaaatgtctttagagaaagcaacatataaaatgaatcataaaaaaagtgtcccacaagctaaatcactcacctttgttgattaaaatggacccgggacgaagattttcatgagcttgtataatactttgctctataccgtccacaagagcattgaaagattgatgaacaaacccgagagatgtaactaagtacaaaatgtattggagataaccccctggaccagcatgagtatgagttccactaattgcaacattttcctccgtataaagctcaccgtacctctgtttcaatctttcaatcactttgatggtcacaagctgtgaggccataccagcatcaagattaacaaaagcaatccttttcttgtatggctcagccacgatgaacgcacgagctctgagcctgaagtgaacaccagatgctacttgttccatgttagcataacccatcatgttaacatcagctgcaggtcctgtgatgtcatagcttccaagacccatcaaataatcggaatctgagaatatacaagtgagcctcaacagaaatagcaagaacaatgtgcagtgcatagacatagaccacctcgtcatcttcacactcaatatggagtaatcaactctttctcatttctagtccttcctagagaataatacaaacgtaagcaacataaacaaacacacatatttcatgaatctaaaattattaaacccaaaatattatccaacctgaagaagaagtaacgcaatccttaatgattttagctgatgaacacactaaccatttgctggagctgatagaaactaattgatgtgaacgatgtgaagcaaaacaaaagaagatgagagaaactcaaatagacaaatactcaataaagtttcgtttttttttctggtaacaacgataatagtatgtaagtaagagtaaagtgtgaggaaagttcttatttttaaggttgcggagaaagaaagctacccaatttcagctgttttagcgtatctgtccttctcaattcggttttcacttcttattcgatttctaattttcaaagtttggatttttggggtaaagttagttaaaatgcatacataacgggggtagaatgtaatttataaaattgtattgggtctgtttgtgaataaaccaaaacttgtggttcttctctgtctcaacctcagtcgccgatcttcaacagtggctgaaacaatagagagagagcgataca

SEQ ID NO: 1667 - DNA, 3000 bp, Unknown
  misc_feature (1)..( 3000): cDNA_ID_2142215_gDNA_ID_1620433_Annot_ID_156917 3000 nt of promoter + ATG
tttgtttgacaaaataaaataaaatactgtagtctgtttatgacaaaaaaaaaactgtagtctgtttatttcaccaacaagctctttgaaattctcctttcatatttgagtttactagattatactacttactgtatttgtataaaagtagtaataatataaaaatgtatatacaccttctaaaatagggtccaatatagttaccatatagttacagctacattaacaatacatttattttattttcggtcctatgtataaacattaacatgattgttgacaaaacatataaaaagtttttgctaatttcataattttcttaaatcattttttgtttggttatcaaggaacagtgtagcttttgtttttctttttttgggtcaaaagtgtgtagcttataatgtcattttggtctataaaacagcaaccttctttaactgagacctgttgttttttgaatgtattcgatgtatcatatttccacactttcaagacaattcatatattattcgatcaaattgtttctcgctaccaaaaaattgatagccgtatattgattgacaaattgacagaagggaaacagaaaattccttggataagcataaacagggccaaaatataaagttaaagagggatgggcttcatggatttgaaagaatagggcccttctaaaccaaagaataatggagattgattggtcaaattcaagagagtctgttttctttcttttttttacaaatcaaaacagtctactgaactgagtcctgaaagaaagaaaaagattctaaaattggttctctgttaacctcaaagttattgaataaaacccatctcatgtacttggtaatttgaagatctttgcttacatgaagatatccattaaagcacggacttgtatatatatatcatattagattggttcatatgcggattcctgttacttgactaagattggttcaaccaaaaactgctttcattaaaggtgaatctaaacgatggttttggagtctgtggaaaaagggatacaaacaagatttttacgctacggttggaagaaatgtaaaactggtccaacaagactatcttccattgcataacattgatgattcgataaacaggcactatacaatatcaggagaagtattcaagttgatttttactgcaaaagatgtattatttgaacaaagaaataaagatgctgtgctgaagaggagacttttcaatattgaaaatttgggattttgatagaaactaaaacctgccaatcgtagttgaggtcatttattacatgtttaaaaccagcagatctcctacaaaacaagttcaaactttatagtagctaaacactaggcttagggatgctggctcatcaaaatcataactcaagaagtgtaaagtcttaacaagaaaaacgaatactcggtcatcatccgtagattatggatcatttcctacaaagctatcgacgaattcaaagaaactatcaagtcacaacaactgtatcttcttcccaataaaaagaaaccgcaaacagatagatcaagaagtacccacaacaatggaagtaaacagatcaggcagcttgaacatcagcagtggttgttgcaggagtagtctttgacaggtttgggatatacttccaacaacgtttgtgaactccgcttatcttctttggagcttccgcagctcgcaatcctgcatttgagaccatgtatgtacgttactctcatgaaagctgcataaaccttaacaccaatgcaatggtgattatctagtttcagatatggctactcctaataatttcaccctatactccatagacatgacaaaaagctccaactttgacatcaatgggcgtaaaaacttagcaatacgaagcaaatgatgacaaaaaaagtcaccatctttgtgaacaattccccaagcttttccatgtctaccatcctgcatttgaatccaaaatcaaacaaatacccaagtcagataatcaaaccccaaatgattaggtaataaaaacattatctcagcttacgaaaaatggaaacttttcaatccagacatgaaagagaagaagacgaagaaccttatagagattgatcttagtgatttcataagagattccattccagtgagctttagccatatggtatccgattccccaattaggtaagaactgagcgacttcgattaagtttttcttctttcttcgtttaggtttattcgaatcggagctagggttttcactcgccggagtagatgccgccgacggcgccgcagagaaatttcttaagagactaagcgagagactgaaagcaccaacagtttcggttctagagattgctctgttcataagtgtcatcgccattgtatcgctctctctctattgtttcagccactgttgaagatcggcgactgaggttgagacagagaagaaccacaagttttggtttattcacaaacagacccaatacaattttataaattacattctacccccgttatgtatgcattttaactaactttaccccaaaaatccaaactttgaaaattagaaatcgaataagaagtgaaaaccgaattgagaaggacagatacgctaaaacagctgaaattgggtagctttctttctccgcaaccttaaaaataagaactttcctcacactttactcttacttacatactattatcgttgttaccagaaaaaaaaacgaaactttattgagtatttgtctatttgagtttctctcatcttcttttgttttgcttcacatcgttcacatcaattagtttctatcagctccagcaaatggttagtgtgttcatcagctaaaatcattaaggattgcgttacttcttcttcaggttggataatattttgggtttaataattttagattcatgaaatatgtgtgtttgtttatgttgcttacgtttgtattattctctaggaaggactagaaatgagaaagagttgattactccatattgagtgtgaagatg

SEQ ID NO: 1668 - DNA, 3000 bp, Unknown
  misc_feature (1)..( 3000): cDNA_ID_3063599_gDNA_ID_1620433_Annot_ID_156913 3000 nt of promoter + ATG
tcttgcctaatccaaaccaaatcatatagaaaattcttgtcccctttttataaatccaaaatttatcattaaaccccatgttaagaaaacactttaaacacatcaatactttaaacaaaagaacaaattatattagtcacaagtgatattccaactggggtgaaaaggaatatttacctgtgattcctgggattaagtgagcataatagtatgcctggcaacatcttctcttctctctctctctctctctctttctttagaaacaaaagagatgaactccaatatagaagaagaacagtgatatatatgaaaaatgaggttcaaagtttctcatatatatatagagaatttattgaagatttgagagaaacaggccaatgaggaaaaagagttttgatgtgacaagtatcaaacttgattatttaattatgaaattataattgaggagtgggatatttcttgtttcaagtttcgacatctagccatttgttgtctagtttgttattacaaatcatattaacttcactggaagtatatccagaatcaaaactgaagccagaatcacaaacgctcaacaaggcaaaatgatttcaactgaggttgtcacaaataaatcagaaacgcatgacctcttaatgtacatatcttccataagactttcttaaaaatatatatgaaattgtgcaagctacgaaaaaattaagccagttctagtttgtctataaatggtgtatcctttctgtgtcactcttgtttttttttatagggtgggtattcattaaccatatatagttcccgtgaaatcattcaggtgactttcttaaccctaatattttgtgcaagtttgacctaagaataaagttatactttcgtacttggttataccccatgcataagctttccaagtgatatagttgacaaatccagtacccccattatttgatagattcttttgtactaacctttgtattctgcgatttagaagaatacaatgatgaccagaggttggtacttcttgtaaatatatcttaaaaatgttgtcaaattttcaaatattttccttttgtcgcatccattttaactccactcttagctcgctattttaaaccattaattaaatgtaatagttgactcaaaaaacatttgctgaacagaaagtatatttgtgtataatttagtatatcttccagtcttccactgatatgatcatatgaactagctagctaggtacacatgttcaataaagaaacttaaaatagctagtggtgtaaaatattaatgtatgcgatgtgtacatatcgcttattgctttaaaccgaaaaaaaaaggaagacaagattagtaatcatgagataatgtgtgtaggatacgatgatcggataaaagagaaaagggtatgtccaaaggcgtaggacagacataggtctggagacaaagtgatgtgtcatgtgtgtggtgtccccaaaaattaactctgttgttaagcatttgtgttttaccaatcttttggactcacctcttaaatctttctttctttctcttctattcctctcctatcatttattttttggccattttgttttctccacacacacacgtatttttggccagtagcatttataattttctcttttacaaataaaatagaaaaaaatatagatgcatatgatctaatacataatttaaaacagtgtcatcacagaacttataacttcatgcaactagcatgttttaattaacaaaaaaaaaaaaaaacaatgtttaatttctttttgaaaaaaaaacaagaatttaattgatataaaaacctagcatgggcttgttttgagtcaatctaataaagttgttgacaaagaaaaaaaaaactagcatgtatttattcaaaagttgttttgtaacaattgtttaagcacttccccaatgttgagaataagagataggaatggttttatgtagtttaaagttcttgtttagaatggttaatttgtgtgaattatgttctttaaaaaaaaaacagaagagtttttctcataggattagtgaagcttgtcaacgttgaggcctctttcgtttctggttactatcaagcaatcatcatggcctatatcataaagtaatttgggccagttttattattaatgggccgaagtctatggcctttagaatttatttgactaaaaaagggaacctaaattaaatttctctttcagacagaataattagagcatatcagagatgctgacagacagattaatacgctgtcgttttaacgtatttttctaaatattccaaaagaatttatttattttccacattttatctgtgaaaaaaaaagaaaaaaaaaatccatctaaaaaggcgtaagaggtctggattcgtcaaaaaggtctttgagaatccaaaaacgtcttatggtttagctctcaaatttctccttcgattccatcttcctccggcttcaagtcgccggatcttcttgatttccgattcacttggctttcctcttctcttccttttaacacacgacgacgcttcatagttttttgttgtgattcaggtaaacaaatatcgaaaactagtttcctaaatttgttgattcagatcgatcttttaaccctcattatcgttttcaatagcttctatggattcgattttctgagtattgttgcttgattttgtaggaagaggtatgtaattcaggattttccggtgattttggtgggaacgtttggagaaatttcgagcttagtagtattcgtaggaaagttttcttcttttatgatttgtagtttttgtggattaatggttgaaggtgagaaatggggcttcgatggatttgaaaagattttgtatcttcgtggaaatgagatcgttggagattgcagcaagtcatctcattcgtattcacgggtttgcttaggtactttggagatattgagagttttggttgtttagtctttgataaaaaggttgtttagtttgttttcgagcttagagatg

SEQ ID NO: 1669 - DNA, 3000 bp, Unknown
  misc_feature (1)..( 3000): cDNA_ID_3063608_gDNA_ID_1620433_Annot_ID_156907 3000 nt of promoter + ATG
aaatgtagatatgacatattactctatatatatattagccgtaactatcactggagatgtacactgtaacatataaatgattgggggacaaaggtttttctctaatagtatatgatcaaggttaattaaacattctgaactggattaaggtgatataatatactactctctaagtacggtatggtaccattaccggccatgtaacacaagcttaccggtttaaaagacataatctatttgactaaaatgtaattaattaattagggctccctaaacactgttattaggaaatgcgatccgtgaaatggggaatgttatgttgtacgaaactcggtaatggatttctttgacatgttccaagattcttcataaaataaaataaaatcattatggtgttttgaataaaagacaactcatgcgatggtcaactactgtgatagaaactcaccaataaaatcaatttgacattctttttgaatgaaattttgttgctaagggaataaattaagagatgcatggtatattttagtgatgtaccatttaaccatcttgtaaaatatactcatttcttttctcatttattataaagtttatataatgcattatttgatactaattatgtatacttattatttttttttattttttttaatgtatacttatttcttatgtttaaatgtttatttccttaaatttaatcaaaaaaatatgtttcaaacatcgatctgattaattacaaataacctccatagaatctgtgctttaaaaagacaagcaactatgatgatcattaaccaaaccgaaccaaattgggagcaatcggagatctcacgtgtccacttttcattaaatcataatgaatagatctaacgtacagtattaagccacgttaacaaatcataatggagaagacagattcctcgagatcttaaaaaaaacagaaaaggaaaataaaagaaaacagtaaagagagagagagagagaaagaaccgaccaatgataatgcaaaacgcggatctcacgtggacccctttgtacaacttggccatgaaagttaccgctgatctcgaccgttcatttggcggctccttttccctcatctgacacataaaatcccaatttgccaatattatacaaaatgtacgtaatcagtgaaaataaagattataaaagtatacagaagcacgtatatgtttgttgtatattagtttaatatgaatgttgaaaacttggtattgttttttcagaggcatcgtacactcccacaaaatgtcaacttcgcgtatttaaattaattaaataattatcatacattgtttttgagttttttttctcccttttttgtgcctcaatgtcaattattttgtatttcacaatttatcagagtgttcaccagcattattattttgtaattatatcgttcacggaatttttcttcgattcattttattttctttctcaaagttccaaaattatatttttcatgtctttccgtgtgaccaaatcaaacacaagaatttacgatttcatcattaatcgatttacatttagttcgaactctaacatatttgttacgccatttatactagtgaatatgtaagacagttataactgtaaagttctaactatactaattacttttccattgaaaaagcttaaaagtttttagggtccaattaagtagctaaagtttaatcaaaatgatttcaaaagtagtagaaaaatatgcagttttgtttaaccggtggtgaaatgatgattatgaaattaagaaaaaaaaatgtttatgattaagaaagagtttgtaactatgtataaggagtaaaagtaatcttgattaggaaaataattttaaaattacagcaaacaatttagttttcattttcaataatagtgaatataattaaacaatttataaaataaaataaaaataggagaaattgaaaaatggaccacatttggtgtatagatagacacggacggtagtgagcaattttttaagcggttcataaccactttattttaaattttaatacatgttttaatcatcttttctcatttcaaatatctatttgaagcgtccgtttaaaactttcaaccattttacccaaaactgttaagtcatgagtatttttaactattaagcaggaatattactatgcaaggtgacaaaaaaatagaaagaagtaaaaaagagaatcaaatcttaaattttaagaagaaaagaaaaaacagcatcaaccaaaaataataatttatcaaggacagaactataagagcccaaatcatcacctcctttctctgcctacttctctcttttttttttaactcgagaagtttataatctggtttctgattttagttttctttccatttatgggttcatttgcttcttcttgcacgttatagttttcctaattgggtaagctccaaggtagcttcttcaatattaatttcatttttttcattttctgtagccatatgtttattttcccgagaaatattatccacacccagatctttaaatctcttttaactctgagtctctgatacttaaataccactcatgctgcttattagctccaccaaatctggaaaaccaatagattctttttatttcttctgcaaaaatctcagagctaccctaaaaattctctctttttgactcacttaccagatctccactagattttactcaattctttttcaaaaggtttaaacttttatagattccttgaagtgggtctaagcaatgcttcagagaaattccgatgatttcttctctaaccaaaataaaaatgaagtatcatttgatagtgatttttgtgttcttcttttgattctcttatctcttccttcccatcaataaacccaaaaaaattaatatcatttttgggatcttattgatcccaaaattcgtaaatccgttgacctttgtcggcatgatttgttcttacttaccgtaaaaaaaacagagctaggttttagttttcggacatg

SEQ ID NO: 1670 - DNA, 3000 bp, Unknown
  misc_feature (1)..( 3000): cDNA_ID_2991813_gDNA_ID_1620433_Annot_ID_156904 3000 nt of promoter + ATG
ttggaatactatttcttgcttgattcacaagataaccgggattgttgtccatggattggcatatagcttccctgagctccgctttgtttaaacggcatagttctgactcactttcttctgaacaacttgaatcatcacattcttctttgtttgaatctgtctcatcattcatttctacctctttttcttcgctttttcgactcacaacgcttttatcatcgtcttctattgtagcttcttttccatttaatgggagattttgttcagtatgatcaatatattcattctccaaatctgtagacaaaacaagtacattaatattcacagagaaaatacaaacaccaaaatttaattaccagaaaatgttagagatataacctaaacgtttcctagtagttgaaatgtctgaagcagaaactgggctgttcatacactgaacatgttctggtgagaacagagaaaaacgacagaagctctcatgacgacaaaagaacaaatctttttgattaaacaatgaaaactcttgatcaaagctatctccagtaagattaggtctttcttcttgaggatcataaggaatgtcaaaagggtttcttccttgtaacatcacagaaggagctgagcctggaatctgtaatcctttaacagtagtaccatctgatgaattatttcgacgtttttcaagtgagttcctcgaaaccgtaacgtgaaggttgttggtgttgttctgtctagggctagttgtttcttcagcttgaagcttattcttttgatctaaagctagtctaaagcgtctcctcgctcttcttctagcgattaaagactctagtctcttatttctctcaatctctgaaatcccatgctcattagcattactcatctcctgtttcatctctactttaccatctgattctccatatttgatctcacagttgcaaaccattggttcttcaacgttgagatgacccaaatcacgagaaactccctctccaagaaactccttctctttgtcttcttcttcctctactacattggtttctaaagcttttggagactcttcgaattgaggagtacgaccaaggagatcattgtaaagagaagtcaagataactttgtctttctcttcttcgcttgtctgtgaatcccattcttcaactttcattcgagcatttcgtctaacacttcgttgttgttttaaatggcatctcttttctcctccacaactcttctttggctctgaatacgaacttgagaatcttaaccctagcttttctcgggcatacactagagcacatgcaagaaccggtgatgtatagatcaagaagaagaacagagaagggaggaaaatgtatagcacgagtaaaaacattgaaacccctgacaaaaccgggtggtttatcatgaatttgatgctcatgttcatcgaatatccaagaattttccataatataacgatgatctctttcgtgtcaatgcccattttccatataatctcaaaagatgaaaaattgatatgaaaatcaattgaaacaagatccttttttttcagagatctagcaaagaatctggcatcaaagaaaaaaactgataaatggagtatctaaatttagagaagttatatcgtctggagatcctctgtttcaggatgttaatttttctttctttctttctattgtttacttaagagggaatttaaacgacaaaacagaaaaaaaaagttttgttagttaacgattttttttttgggaatgtgacacgtttaggcacttttagagaattttatttcttttgaggcacttgtcagggatgaggcacttttccaactttttcattaaacttttgaccaatttgcccctgaaaattaaaaaattataattaaaaaaaaagtttcatctctccacgttccttttttttccttcttcttcgtcgcttctctctctctctctctctctctctctctctctctcttctctctctctctctcttctcattattacttttttttctttccttgcaaaatcaaacatttaagagtttatcaaaatcaaacatttgagagtttatggaaaacccaagttggcaaattccagtattaaatttcatatccatttgatcgccttgtttggtacaatttgattatttcttgataaattgatgtttcattgaacgtctaaccttaaaagcatattcttttacttatgagaatcacttatttccacatggttacgtttacatggacaagttatcatggagacaaactagcatcattttttatcttctctgtcttccatgttttttttttttcatcatttttattttctttttcaaaatcattaatcatggtggttctctataattcttacaaatcatagaaattctgagattatctcaaaattctctatcataacttaaaaacgaagaatatattaagaatcaacaacagaacattgctgctacaattgatcttcttacacgctttatatacttaaacttgagtacttggacactcatcaatggacaactatgcttcagatgtgagttactagatgaccacttggactagagtgcttggacacttatcaatggacaactatgtttcaaatgtgagttattagatgaccatttggacttgaatgcttggacactcatcaatggacaactatgcctcagatgaagttacatcgacaatggcctttttgctgctactcgcgttctcaacatcacgaaccgtttcaagcccagattgcttagaaggtaactgatcatggttaacatcctcacttttcattgtaatcgatgacagagattccttaatcaaggagagaaataaatggaaccaaatcaaataattgttgagagacagggaagatgatgataaatcatatgaaattgggtttttagttttgatttggaatattgagattcccgtaaaaaattggttttgattttggaaagagaaagaaataaagacgatggagaaaagagttgagagagaaaatg

SEQ ID NO: 1671 - DNA, 3000 bp, Unknown
  misc_feature (1)..( 3000): cDNA_ID_3063612_gDNA_ID_1620433_Annot_ID_156906 3000 nt of promoter + ATG
gtgttttgatatccctcggcctagtagtggaatacacaactcttttagtcggagccacacttctaagcatagtctcagacgactcagagagcttaatactactactactagtttcactctcttgcaaattcccatcatctttcaacttaaacaaaacatgaaaaccatccacctccactttctgaacctcatcattattaactttactcaagaaatcactatacggtacactcataaacgtcgtctgtgtccgaggctccgaacccggtaacgggattccgggtcggagcaatcgcacaacaaacataacaatacccaattgtagtaacattacaccaatctcctgcgcttgaattatcggtttccattgccatttcttccctttagaccaccataactcattcttaccttgcttccgtcctttatccttattggtctttccttctccttcacttgagctagctttctgatcaccttcttgacaattcacaatcgttctactactactagtactcttcttcctcgaaaacccttgccaaagattaaacctttcctggtttatcgaccctggaactgattgaggaagttgaatcgatgaattggagacgaatcgattcggattctgacgaaaaccaaaagatcgatctcggaaaaagctcgaagcatgcaaatacaataaactactagtactacaacaagttgagaatcgaaacttatcgtgaatcaatggacttagcaattcgattgaagtcattattttttctttcgaaaccctagaaattgaggaaatcaaaggaagacattgcaacacatttttgggtttatctaatcttctttttgggtcatgaacgcgaggtttactgggaacaacgacttcgaatatgaaccgttggatttgaataaagagagttatctccaccgttgataacgccggagttctgttttgtaagaagattatctgaaggccagaatccaatgtggcgagatgtatagaaagcaatggtgttttgtgtgacgtggatgaaaggtaatggttgatgagattttaggttttttcttgaccacaggttttaaacggtggatatgggccacgaatctggttttttggcttctagggctcacagaatggcccaaaagataatcattttcagtttcatggctataaattttctgaatatttttcatagaaatttaattttgttaacatcgtcaaaaaatcaaaaaatttaatttttggttctaatttgggtttctcgtagtctagaccattaagattcaaatagtttcataattgtgtatactttttttattagtttctagaaaaatagattcggcgtttaacacacaaaaaaaaaaagagaatattacacgtagaggcactattttgaaactttagccacaaataggcactttaaaaggagaaggcactttaccaaatcaaaatttccaaattgccctctgaaccacaacgctttctcctcattttctctctcaactcttttctccatcgtctttatttctttctctttccaaaatcaaaaccaattttttacgggaatctcaatattccaaatcaaaactaaaaacccaatttcatatgatttatcatcatcttccctgtctctcaacaattatttgatttggttccatttatttctctccttgattaaggaatctctgtcatcgattacaatgaaaagtgaggatgttaaccatgatcagttaccttctaagcaatctgggcttgaaacggttcgtgatgttgagaacgcgagtagcagcaaaaaggccattgtcgatgtaacttcatctgaggcatagttgtccattgatgagtgtccaagcattcaagtccaaatggtcatctaataactcacatttgaaacatagttgtccattgataagtgtccaagcactctagtccaagtggtcatctagtaactcacatctgaagcatagttgtccattgatgagtgtccaagtactcaagtttaagtatataaagcgtgtaagaagatcaattgtagcagcaatgttctgttgttgattcttaatatattcttcgtttttaagttatgatagagaattttgagataatctcagaatttctatgatttgtaagaattatagagaaccaccatgattaatgattttgaaaaagaaaataaaaatgatgaaaaaaaaaaaacatggaagacagagaagataaaaaatgatgctagtttgtctccatgataacttgtccatgtaaacgtaaccatgtggaaataagtgattctcataagtaaaagaatatgcttttaaggttagacgttcaatgaaacatcaatttatcaagaaataatcaaattgtaccaaacaaggcgatcaaatggatatgaaatttaatactggaatttgccaacttgggttttccataaactctcaaatgtttgattttgataaactcttaaatgtttgattttgcaaggaaagaaaaaaaagtaataatgagaagagagagagagagagaagagagagagagagagagagagagagagagagagagaagcgacgaagaagaaggaaaaaaaaggaacgtggagagatgaaactttttttttaattataattttttaattttcaggggcaaattggtcaaaagtttaatgaaaaagttggaaaagtgcctcatccctgacaagtgcctcaaaagaaataaaattctctaaaagtgcctaaacgtgtcacattcccaaaaaaaaaatcgttaactaacaaaactttttttttctgttttgtcgtttaaattccctcttaagtaaacaatagaaagaaagaaagaaaaattaacatcctgaaacagaggatctccagacgatataacttctctaaatttagatactccatttatcagtttttttctttgatgccagattctttgctagatctctgaaaaaaaaggatcttgtttcaattgattttcatatcaatttttcatcttttgagattatatggaaa

SEQ ID NO: 1672 - DNA, 3000 bp, Unknown
  misc_feature (1)..( 3000): cDNA_ID_2106017_gDNA_ID_1620434_Annot_ID_156928 3000 nt of promoter + ATG
atgcagagatgatgagaatcaaaagaaatatcacaagtttgagttcttggctaagaaaacgcatcacctttggtttggtggcagatgaggacgatcaagcttgtgttaagattacgaggaaacgagaaagagagagatcataattgagccaaaaagaaaaaggtggatatagagataacaacaaagtgtgtgtgtgacgtaagataccaatatcagtgtcggttccaccaccaccttggtatgcgtgatagctttgttgccagataatttcttccaggtgttttattattaagaaggtagagagttatgagaatctgccattgatggtagtttacctggagtttccatcaaaatgtacacacaagaagaaaaataaggaagagctaagtgatgagagcagaacaatgtatctcaaagattcctaataaattggtgagtagtcacaaaggcacacttggaaacaagacaagaccatactgatgttgcaattatactagtcacaaacgggtctcgtgttacaaactaacataaaataccctattgctacttgtttgttccaggaggatcaatcaactttatcttcaactcaatctcacccgattcaacagcacacagcctcagccacacactctgcaccacctctccgtctatgcaactgattgtgctctctcgagatacgcagttctctggatccggtaatactttcctaagcgttgtctcaccagaggacacgcggactacgtgtcttagtctggcaactgagataagcggttgaaggctgagagaggcatggcccatcttgtcatctgccttgaacctatctttatcaaacacttcctgcaccaccccattaacaatctcagcatcatgatcatgatggtcacaaaaggaaagattcatgaagatgtagacataccaatgcgagaactgctgcaggatctttcagagtaaagttcagttcctcattccacactggattcaggcaattgttgatcactttggtcttcgctgactggttttcaaaacagtaaaacatcacatcaacagacaaataaacacaacgagatacttgtttccttggtagaaacacaaacactggttctagttgccaagaacaatgaaaaacactgaccaaacatacctcatttcctaatttgacaatcacataaggatcacttgacttgaaatctcggatcaccagtttctttccttgaataacagtcacctggagcagtcctagtggctcgcccatctcagattctacaaacacatgctaccaactttagaaacttcttgagacaatcctcgtgaataacagagctaaagcaactgtctttattagacaatcagttgaatatgacaaccaagacacagagaaagagaaggaagtactagtcattcaacattcaacattcaatctctaggaagctaggatatatctaaacaactacgccaagcccaaaattttctgagagcttcttgatatagaaaacgaaattctgggaaagattcacacttatatcagtaaataataaaaccacacagagagaccaaatgctgccaatctacagaaacatctatctagcgagtaaggtagagaaagaaacaaaaatcgcaagcagaccttgatcaagagacaaaccaagaaacacagaggactctgcaaatcaaaaaaggctcaaactttgtgggttgaacccagaagctactcgagtctacaacaagaccaatagaaaaccttgaaaccctaaagaatgagtaaagtagcgaagaacggtacgaactgaaaaggaagtttcagtgtttcactgagaaatttgcaaactttagaagaaaaaaactaataaataagaaacagaaaattactgaacaactttaccagtttggaaacaagaataaaaaatcgtcttcttgtggttgtgatgaattgagcaaaacagaaagacttgtattcgtcttctttgagattaacgcagcagctacttacttacacctttgtagaggaggcgaggactatcattctcatcagaattttttgtttttagttgaaaaacatttttatacaaatgttgtcttaaagacaaattccatggtctcgactcgactctcgaggttgctataaagaattttatttgaccaaacaaagtcttaacatgcgttttgaccgtaatagtaatttagtggtatctaactaatgaaaacagtaaaattatccaaatcatattctacaagttatcgaatactcctttgattcttgaacaacgtagcagtaacggtaatgaattaattactacaaaagttaggtaaacctaatcctggttataataaattagtgaatcaaatacttttgtgtgaccctttaccacacgaaaaagaaaaaaaaaaactttaaaaattgtttatatgcttgaaatcagaggtggcctctgacacgctttgactcggtctaaccattaaagctccaatataggaccatgcgaatttgtgtaataaacatctcacactttttatgcagcataatgttaaacggtaaaaatgttattttaatcccttaactttcaaaatgtgttcattttatttaaaacataaacattaacatttgaaatacaagaattcgttgaccacaccaaatagacatgcccaatacatactcaaagcccaataaatctgaaaatgtccagaagatctttaaatgggcctaatgaatatatatattttgaaagccctaatgaagctttgatacaaagctttctttataaacgctgcgtcacatcactgaatcaaaaaccctagcgatacttcatctctcgagccggagccgcgttgcgaaagcatttcaatcgtagtctaaggtactctatcgatgattcttcatttctttctttcgaattttacaagcagatatattccttccgattattctcccattaaattttcagtgttgttttgatctgtgaataatgttggtttgttatgttactttgatggtttcagagaatg

SEQ ID NO: 1673 - DNA, 3000 bp, Unknown
  misc_feature (1)..( 3000): cDNA_ID_3063694_gDNA_ID_1620434_Annot_ID_156938 3000 nt of promoter + ATG
cttcttcttcttcttctgggaattgatcactctggtaaagcacaattggcacgtccaaaacgacaccgttccatcgaaagaggccacattgtgattggtgagcccaattaggaaggcctattttactaatgttgaagcacatgttgtactataaaaaaacagagtttattatctgtttctttggcttgacatgacaaatgtacaactgggagagaaagtcagtccgattgtgttggggatgacgatggcaaaagtagtaaataaggaagaaacaggaggggcgttttcgggagaagaaggaggaatatgagtgtgagttgttgttgtaggaatctgggcaagacaataaaaaaggcaataccttcacatcatttgcatctgagaagtcttggtgggagtctctatcgtcgtcgtatccaaagctcttcaatggagaccgatctcaagtcaacctttctcaacgtttattctgttctcaagtctgaccttcttcatgacccttccttcgaattcaccaatgaatctcgtctctgggttgatcgggtatctctctctcatcagtcagatcccacatatatatccttcgaatgctggctgattctctctttctttgcagatgctggactacaatgtacgtggaggtcagacttgtctacaacagcctctttctctctctctctctcgcttttcatcgatctcctttttttttctcacacttacttcttcttctccagggaaactcaatcggggtctctctgttgttgacagtttcaaacttttgaagcaaggcaatgatttgactgagcaagaggttttcctctcttgtgctctcggttggtgcattgaatgggtataccaatgataaagacttatcctttcaatctctattagtaatagatactctcctctctctctctttatgtcgctatcactcatcatattcattatctttgcagctccaagcttatttccttgtgcttgatgatattatggataactctgtcactcgccgtggtcaaccttgctggttcagagttcctcaggtaaagttttcatattttttgtcacgctgcagtccactagactattctaacacaatgttacaggttggtatggttgccatcaatgatgggattctacttcgcaatcacatccacaggattctcaaaaagcatttccgtgataagccttactatgttgaccttgttgatttgtttaatgaggtaatctgttttggcagatctactattctcttttccacttttgatattttatcctcagtctattattccatttgctgtctaggttgagttgcaaacagcttgtggccagatgatagatttgatcaccacctttgaaggagaaaaggatttggccaagtactcattgtcaatgtgagtcaactgtgggcattgtctaaattttagatacggtttcttctgatggttgattagatgaaaggcagtattctgacctgatgcaatggttttcaacttgcagccaccgtcgtattgtccagtacaaaacggcttattactcattttatctccctgtgagtatggattctcttcttccctagtcatatttggggtcaaaaacaatcatgttattccttttgtctccatcattgcaattgtagatcccgtgacaagctgtgtttttctattcaggttgcttgtgcgttgcttatggccggcgaaaatttggaaaaccatattgatgtgaagaatgttcttgttgacatgggaatctacttccaagtgcaggtagattgctgttaagtattcatgagagctatatgataggtagtgttgggatgttgataaccattcttttgtgtaggatgattatctggattgttttgctgatcccgagacgcttggcaaggtttcactcgtgctaacacttggtttctcaggctgatgtgaatgtattcacttggttcagcatattggttttttataatgcagataggaacagatatagaagatttcaaatgctcgtggttggtggttaaggcattagagcgctgcagcgaagaacaaactaagatattatatgtaagaaccatatcatcttgatcaaaaaggtttgtatcctgtttggaacctgaaacatgttttgttctgatttactaggagaactatggtaaacccgacccatcgaacgttgctaaagtgaaggatctctacaaagagctggatcttgaggtttgtagcgaacctcagagatatgatgttgtaatacacaactaacatttttgctaattggacatggtttgatctgaacatgatagggagttttcatggagtatgagagcaaaagctacgagaagctgactggagcgattgagggacaccaaagtaaagcaatccaagcagtgctaaaatccttcttggctaagatctacaagaggcagaagtagtagagacagacaaacataagtctcagccctcaaaaatttcctgttatgtctttgattcttggttggtgatttgtgtaattctgttaagtgctctgattttcagggggaataataaacctgcctcacttttattcttgtgttacaattgtatttgtttcatgactatgatcttcttctttcatcagttatatgaatttgagattcttgttggttgatgcctgtgactacatacataatattgaccaacagaagaagataactcgatacatacattgattttataacactgagatttaagcaactcttcttcttctctaatgcctacattccattccaaaggcaagaaaataaagcttcaagcgcaggcctcgacacgtcaccttgtcgcttaatttaatacaacaactagagtttatttataaataatggctgtgaagggtaaaagcgtcttatcctcaacgaccaccatcatcatccagctagcagcaattggtttttcactcacacactagaaacaagaaaaagaaagatgggagatttaatggctcggtctctctcttgatctgacgacgacg

SEQ ID NO: 1674 - DNA, 3000 bp, Unknown
  misc_feature (1)..( 3000): cDNA_ID_3063680_gDNA_ID_1620434_Annot_ID_156943 3000 nt of promoter + ATG
aaaacgtcgcgagatctagatctcagggagagacaattccgcttaaaaaaaaaaaaaagctaatcagttgaaatatatttcacctaaaaaagattattcttctacaagttcagattaatcagacagaacaaaagaagagagctttaacatttaacgaaactggaagaagaagaagaaaaaacaactgtacctgtggtttaccggtaacgacagtgacacaatcttgacaaccttgaatcctttcgtcgccgatgagtggtctgatgtgaacagcaaccttaacggaacaatcatccggtggcggcgtagattccattggaagaagaagaagaagtaatctagaatcgaagaagagagaaagagagagagagagacagtgaagttgcaggcagacagacaaatgtggtttgatgatgtgtttggacagagagagagacttggaaaaaaggaaagggtagaaatggaattttgtaaaagaaaaaaaaaactttatcgaggagagagcttaaccgcaacgacaataacactctgttttaacttcccttaggctacactctttagtccttactatctctttcttttcttataaaacggaccgacgtgactttcctttcactcttcccggttctaacctctcctctctctttctatctttcaagtgtgacttctgacaaaaagtggtggaggagaatatttaagcaaagagagaaaattaggtcaaattctttactttattgcatgtgccgttgtaatgtacacatataccaaatgattgtaaaatttattacataaaagagttttaggagatcgtattcaatcttatattttaaatgatttgagttattttgaatttttatacaattttcaagaatttggataaattttaagaagttgttatgatttattgtaaaattttctaaaattctatctaaactcatgaaatttcaaattctgtatttttaactaaggaaatccactaaaattcacttaagtctcttatagtcattaaaaatttaattcttaaaatgtttttaatgatttttaaatagattttagaatctaatctaatgagattttcaaaaatccataattgaataacataaaatttgttatttaaatacaaatcacctaaaatgtttgattgaatacattccttttagagtttatttagcaattatgtgttcacctaaattacaactgtaagttttaagtttaattcgttttccttatatttgcaactaacaatacctttgtggagttatgtctcacaagctatgaccaacggattggtttaaaggtttacatctaaactacaattgtttatagtgtcagtttggtatttaaatatgattaggtaagaaaacagacaccgccaaaaaaatgggttgttgacgtaattatgaagcaaagacggctatgatatatattattttcttatttttatatatgtatatttatatttatattcagatgaaaaaactaaataattactgcagtgaaaaactaaaagagaaattaaagaaatgttagatatgaaagtgaacaaacagtgaatgcaaattgtggctacgatcgttgacaaaaagtgtcattctttttttctgaaagcttaatgcacagttgcacagaattagaaaagaaaaaaaaaagagaaaaaaaacacggacgacttttggagaaaggtccacaaggagagacaatgcgagctggcggaggaatcgtggtcacgtggctttagcgatgggtcccaatttatcggcttttatgggaaggaactccctactcttaggctaatgttcggatccaagaaaataacagaaactaatcaaaaaagcaaaaccaaatccgaatccaaaccagtaatatacacggacggattctaagtccaactctaacaatatcttatatctctcatggttctctaaaggtatgaggtccttaaagaaaatctcaaaaataaagaaaaaatgagattttttgttaatagtgggatttaaaggataaatcttattaaaaaaaaaaaaaaaatcttcgcgaatagtgaacatgttaagtttttgattatccgaagaatttggttgtgaaaatttgttccaatttggagatgtgatcactgatctacgagagattgatttctatgatttgatatactagggagtagtggttataattctaggtttgtggcagggattggtttttcagctggtatggatttagagaaatgataatcagaggagaaggaggagagtcgataaacacgacgaatcgttactccgaggaactggattcattaacagaagccatcgacggtttcttggccttgcaagatgctcttgaaaaaggtagatattctgattattatttttgttgcggattgtatccaaagttgcattattttttcagatgttacatacttatttcttgttataagcctgcattatcatgttggaatcaactaataacatcatatgaacaatgattatgatgtttaatgtgactctttataaaattccatttgcagaggttcagtaattccaagaggtcgggaatgaaccaatgccacaacatcatgaacaagtcagcgacgcaagttcacctcaccacgagattgtaaccctgttaaccaatgttgaacaactggagaacatgctagaagaaacaaggtctatgcttgaggtgaaagacaaatttaagaaacccatacaattttatatggaatcatttcgtagaatatctaaatgttaagaaaatgttggggtttttttttttgctaaacttgtaaatatcattaaaaatgaagtggaagtattacaaaagcaatacctaatctagagtaaccttggcaaaaagaaataaaaacaaggttacaatatttgaaaaatatgatagaaattatctgatccaaagaagcatgagtggtctccaacgcttccgagagcgtcttcccgtgatggtgttgcggatttctcgatcaatcatcttaaagagagcagaaggatg

SEQ ID NO: 1675 - DNA, 3000 bp, Unknown
  misc_feature (1)..( 3000): cDNA_ID_3063676_gDNA_ID_1620434_Annot_ID_156947 3000 nt of promoter + ATG
ttcgttattaggcgtgtctaccgcatcaaggagaaccaccaggacgagcggcgggtgctgctgattgcttgttgtagctaacagatagctgatggctttttaggagtcagattgttcttttcatgttgatagaattgacatcttatacacatcactaaatgagctcatgaggaaataaacctcatcctcaagttgcagatatttgtatgaacaatacaggttttatttgttctttggtttgttgtaaatgataaaatatttgtttagtgtccacttttgttcaagtaccttaagactgagacaagaaaccagagcagaggcaaagcgcaaaaagatgcaaagtcttttctttaagcgttaattgataagcataagacacattacaagtaaaggttaagacaaatttgaagtgttgtatatctcccattccattcaaagatcaacaacatttagcaacaaaatattacagtgaaggcaatttgccgcagattctcatgtaatggccaacaaaatagcatccttgtattacatattgctacaccagtacgcatagtgttcatctctcctatggatgctcaccagaccaccgcattgcagacagataaaactgcttccgtcagcaaaggcatcgagcatgatctgtgacctcccacttttttccagaatagatatgccatgagcatctgctgtaactgtttgtttggtaccaaataagtcttttgacgttgtaggctcatcaagcgcaagaggctgtgcttctgtaatggcacactctgcaaatatagaagccagctgatccatactagctgtttcttgaattctacgcttgtatagttcacgggtacggttcagtatctgaagaaccgcctcatctcctccttggtttctcatcgccatcacgacctgttcagaacaagatagactgactcagagaagggttttataaagaaaaaagttcaatgcagtctatatacataaagtgaacgatcttgccatcatacatttccacaaatgcgacgaacactcaaaaactaatcccaattcaacaaggaagatacttttatcattctaaaagtctaaaagaagataaagaataaaattgcaatcttatgataaagaaagagatcattcttctaagatgttatatctgcttaatatgatataggcaatggatgaaggcgatgtgataggattcaaaccagtaaactacttctttattcacatccccaatgaagagacagatttgaccaagggatgtagttgatgctgctgtatctgttggcaactagacgaaggaaatgaatgtaacagatcaagcttatgatacagctataaaatctgtcgttataatggtaactaatgatcatagggatagaatcacgaaacaaaatctatctttgtgattcatcaagcaatacacaagcctccaaaaactagttgttcatccttatgcgagaaaataaatttaacttctaagtagtatttaatttcgattctgtgacttaagccacaaattccaacgaaccctaattctaaagtccaaagatagcaaaaagagcaccaaagcaaaaccgtatagatatagaacaattggaagaagaatgtttgaaatgcaaaaatagggaaaatttcggagatggaaaagaaacctagaagaaatcgaaaataccgcttggagagcttgagatggttctccttgatcgacgagcctacgagcggcggagaggaaatctctggcggtgctgggtttgtcgagcatgaacgtttcggtggagtcggcatccatcatctgcgtctcgggatcactgttcatggcgtaatgcatctgcgaatggagagaatccaaggaaaaaaaaagacaaggagagactagtagtgatgaaaacgccagaggattctagcaacttcttgtctcattccctaatttctccgacaaattatacctcttatgtaattcggaacactttcaatcaaaaaataaataattaaaaactaatctgaacattttcaagcaaaaaaaaagaagaaattcggaacattttcaagcaaaaaaaaaactaattacaaatatatttaacaaatcatggaacatagataatccttagaatacatattcaaaaaaattcacagcaatagggtaaagtgtaaatatatggtcttaattttgtagaacatatcaaattagaatttctgaaacttttagaacatgtcaattttaaaatgagtagaacatctacaatgtataaaaatacatgatctaaaatatttagaatttagacaaaaattagagaacatattctaaactttttagaacgaatttcaactattttttaaaaaaccagttttcgacaaaatcataaattttcttctctaacacttcttcatcattattggtcaacatatgttttctgatctgaacttggcataaatgttaccttctttttcggtgatatattgtgataacctggtattcactaaaaaatgatgaagcgtatagctctagacattgaagtctcaaaaatgggaaaggatcaacattgctttatcatcacaacgacaagatttttccactacttagcaggatttgcaggacaaaaccaatctctgttttcaagattctactttgattaatataaaaacatagctgttggttatttgttacttaacataaggcgttttactcatttttatatatatgagaatgtcaatgatctatccaaataatcaaacaaacaaaactctatttacatcatctagatgaattagcaaatgatcaaataaacaacattcacatgctggatgcaaataccaaatgcaaacgaataggcccttaaaacaattcaagtataccaaatgatcaaacaaatagacccttaaaataattaaagtgagtccatttaggtttgggccctccactaaattatcggaacagtgaagtcctctggtccctctgtattcaccaccacaggctcattgacagaaagagagtgggagagagac

SEQ ID NO: 1676 - DNA, 3000 bp, Unknown
  misc_feature (1)..( 3000): cDNA_ID_3063669_gDNA_ID_1620434_Annot_ID_156953 3000 nt of promoter + ATG
tttttcaatgttccatatccgttttgtgatttatagggtttttgtttcgttgtttcagaacgtttgttgagaagaattacaaagatttgaagtctctaaaccctaaattaccaatcttgatccgtgaatgtagtggagtccagcctcagatgtgggcaagatatggtaaatttgctttatctcttatctctgtgaaggaaaattttgactcaaattgtttaatttttagagatatgaaaattaattgtgctcttttaaagatttgatatgaatgtagttacatatgtgacttcttctattgcttctgcattcatattttgtatggaggtgtctttataacatcttgtgttcacccattatacactcactatcgagccttgtacatcttgtgatgaaaatgtttcttgttgtgtttgatgtgaatgctgaaatttatggtttatgggattttctaatgtgggttgttctttttctttctcgcgattctgtttgttttgaattttctacagtgttaaattttggtttgtttgtttttaaaaaacttgacatgaatgtggtcattggtaataacagatgtggcttctttcttttgtttctgcattaagttttttagggaagagtcttttaacactatgagttaaccaattacacttaaagtagtacactcacactcacccttagagtcttggtcattgatgataaggaattgtgtataaccgctatgtatattggcttgtgctttataagatgaggattgttttcccttgtcccttgttgtgttttatgtgaatgccaaaatcttatggtttatgtgattgcctactgctgttgttcattttctctctctcgtttttgttttgttttgaactttatggttgtcgcatatcagccttaaattttgagtgagttttaacatcttgagttactcttaaagtacacactcacccttagactattggtcattaatgaaaatgcatattggcttgttcttttgaaatgagactggtttccctagttccttgttgtgtatttatgtgaatgccaaaatcttatggtttatgttatctcattagctgatccattttatatggtttccctgaccaaacatatcagtgtcttcagcaacttaaagtatttaagcatctgtgttgagtgaactttgaacatctttaaactatgttcccacactccgataatgtagtaaagtataatactgtaaatatgagagaacaagatgattctttttctttttggtgataaacttgttttacgcaacagtcatatgcgttaaaattgtcatcctcgattctacttcggaactagtatttataaatgtgtctgtttttgtattgcgttaattcgtgcttggcttgtgcagatatgggtgtggagaggtgtgtaaacttggatggtctgacagagccacagattctaaaggcccttgaaaaccttgtgaaatccggagctacaaaggcctaagtttgtttgtttgtttgtttttctctatatgatcccgaataagattaaaccgcaaaacaatcatttgacatttcctgtcattctactactttgtaactccgtggtgtcatatcgccttgcatttgagttggtttttttgtgtaatccttgaacttggaattaaaccattccgtataattgaaatcacagaaaggagaaaaataaaccatctctgtttaaactttttgttttaggggatgtgggcatgtcggtttttgaccgtgttttccgcaacaattcccggtccgatcagccggttcagtccggtttcaaaaacattgctaagagcgaatcaagttcgcaacctcaatagggtccaatcccaacacattcacgtgcgaagctcaagtgatctctctcaaccgttctcgttaacacgcatctgtttcttttccatattcacaattttacttacataatgtttttttaagtttttccgaatttatattccaaaataaatcagatttgatcttctctatgagattttataattacactacattttataacaaatttgaaaagttctttatttatatttatagtacagtaaaacctctataaattagtaatgttgggactgcgaaattttattaatttagagaggtattaatttatctataaattaatatttatcaatttataaaaagattttcctaatttggtaattttttgaaaatttctacaaaatttctttattatagaaaatatctttctagaaccagttacaagtaaaacataataataatgtctaaaaacagcaccaaaagtattgatacaataaaatatgaaaactatagtcaaacaaataacaaatatgaatttaagcaaaaaaattattataaatatattataaagaaatcttttacatataatatatatatatagttgatacatttatacaattattaatttatgatattgatggaccatatatttacataaaatttttttaaaaaattattatcttattaatttatcgatttgtgtcactttttacactggtcccaattcgggaccagaagaatttattaatttataaaagttattaatttatagactattaatttatagaggttatactgtaatttgaaaacatttttttatatattgaaaatgcaccataatactctttctatttatttaagcattttaaattttaaatatattatttttaattaaattcgtaaattatttattaataataaaaagttaagaaaattatttaatatgtttagattaatcattatctcaaattttgaatatatagaaatataaaatattactattgaaatattatttagatattaattcattaaaaagtaaggaattcaaaaaaaaaatgattatataataagatatgtctccaattctacaaaattataatacaaatttcaaatttctgattttaggtatatacaatctaattattcctcttccatgattcttttacaatcttaccttctcttccgattttagttcgaa

SEQ ID NO: 1677 - DNA, 3000 bp, Unknown
  misc_feature (1)..( 3000): cDNA_ID_2781298_gDNA_ID_1620434_Annot_ID_156949 3000 nt of promoter + ATG
acattaagctacaaaaagaaattgaattgtgcaagggttttcgtcgaagaaaatattaaaattctgtaccaattaattaaattcctaatccctagaaaaataaatacaattacagttgaccacaagatttaattaagctaaacgtggctaataagtgtttgatcgagatacggtctccgtctttggagccgtcaaacaagcggccaaagcactctctagtttactgactacctccaccattgacggccttttccgactacacggcatcaaacactccgctgccaagtatccgacatgagccaccgcctcgatttcgtaaggggtcggcggtggaatcctctggtcaagtattctatgagcctcatccagcaaaatgtatggtacaacatattccactaagtttctagggttttcgtcttcgttattgtgtatcgctttgtgaccagacagcaactccagcaacaccacgccaaagctgtaaacatcgctcttggttgtgagctgttgaaacttgtagtactccgggtcgatatatcccaatgtaccggcagcgtgtaaagagagatgtgagacgtcatcttcttccgttggacccatttgagataggccgaaatctgaaactttggctgtccatgtggcgtccaaaagtatgtttgatgactttatgtcacggtggatcaccggaggcacgataaactcatgaaggtattggatcccacgagcagcgtcaagcgcgatcatcaagcgtgtttgccacgaaagagggtcaaattgaggattgtgaaggtgatcggctagagatccatttttcatgtactcgtacaccaaaatcctctcttctgtgtcctcatagaaacccagaagtcgaacaagatttttgtggttaagccgcgacatagactctagctcgttcacgaacgctgaatccttatctgctcgtcggtgtctcatcgttgtcccagacaatgtaggatttgttagctcagctcgtttgattgcgacatgacgtccatccgacaaaacaccttgataaacagagccgaagctgcctataccaagatgaaaccggacagagaaaccatccgtggctagagctagctcgtcaattgagaactccattagctgcccaggattacctaaacttgctagagtgcacagcctcttctcgagcttgggtatgtctattgtcctagtatcatcaagacgtccagagtcatggacacggcatcgacagtggcttttaaagatcaagaaactgatgacaaggagcaaggaaaacgttccaacgcatccgaccactagaaacgcaatgtttcttctgctccaagttttgttcttagagttttgagccctagtatcaggaaactctccatcatttcttttcaaatcgcaaatcatcaactcattgccgcataaggactgtgatcctgacaatggacggtaagggcattctcttctacacggtcctggcattaccacttgagaaattaggccttggaatggagtgaaaacaccggatttaaaattctcattcccccaacaaattagagtgtaatttcttgtggcaacaccgcaaaacattggccctttagcatatattgatgtaaaatgaatgtccttaagcgtttgaggcaaactaaagttgttgttgttgccccaacacaccacagttccattagaccatctaacaccgcaaccacggtcttccccaaccgctagtgctaagaacttttcacgtggcagcgactgtgtttgtccccaacactcgacatcattgtcaacagtgatcgcacacgcttgtcgtgatccagccgctatcgcgatgtagtggtctccactcggcactttggctataccttcacaactgatcataccaggtggctgagatagcccacagaaaaaattatctcccaaggcaatggaacggtaattatccggccgtggcagatagtacggttgccagcaacggaggcgccttgagactctttcaactccacaaatgcggaaattcccggcttctagctcttcgagctcaggaccgtggtagattcttttgtgcaacatattagttccatcaacagagaatctccaacaaagaagtgtggaagtgttggaatccagccgcgatatcaatccgcacacaaacccattccctgaaacaacccccgaaaaccttcgatttcgaaggttaccggttaaagaaaatggaatcgaatttaaagggaaactggaacattgaagataagagtggttgttgagagcacatacaagagtctgattagagatgtgggagatggagacggtggagagggagaagcaaacaaaggagaaggaagatagaacaagaagaaggagagacacaaagtaagaggagaaacaagagattgagatggtaagtgccattgaagaagagttctcatggcgtgtgaatgttttatgtttgaggagttgtgtttttaagacggcaaatcaacgcggttagagagacatgagacagagacagagacacctccttaccaagagaccaaaactaagtcttatttacttcattcatagtgatttttctctattctaaattatttttatggtcaactctttgaaaatttcaacacttactttcagtggcatcgtcgtatctaaaaactatacttaatcctttggttgaaacaaaataaagaatgactttcgtttatatattccaagatcttttaacattcataatagggcttgtacaaatccttcatgagaggatgacactcttcgtcatttaatgaaagcaaatgtggcccattaagtataattgaagcccaattacctttcacacagttaacaattaagtttttggtctgatcacaatgtttgcgttagctgcgaaacaagatgctgttacagtcatagaagtcttatgcgtacacgactccgatttcaaaatctgaacggaatataaactctcgacgacgaaaatctcaaaaaccccaaaatctcctccaactccgagtt

SEQ ID NO: 1678 - DNA, 3000 bp, Unknown
  misc_feature (1)..( 3000): cDNA_ID_3063665_gDNA_ID_1620434_Annot_ID_156954 3000 nt of promoter + ATG
ggggcctcgggatttttgttatccgcgatatacctaatggtttggtttgctattatcttgagactcctaatgaaagcatcactcatggttaaaatgtaaatctatctctcactatcttcacaggtcgacgtttatggatacaaacgagcaagccttgtgttagagtggatgggaatacatgccttaccgatttacgttctcattgcttgcaatcttgtctttctaatcattcatggattctactggaagaaccccattaacaatctcgtaagttttactttcgtttttttttttaccgttattaacgttttgtgttggagttcaaaaatgttattgttgtttgcagcttcatttaatcggaatcggaaagtaaagaagagaagagaagggaggtgaagaaataagtttcatcaaccaaaaccttaattgtttttgttagaaataaacaaatgccatcttcatcttcacatcccatatggaatccaatttatgctatacttttgtaaacatacggtatatcgtagaaaaattaaaacttcatggctatataagcaaagccttttgtcgaaaatacacatgttggcaagttgtgggagccaccaacataagcatattatattcaaacaaatgttcaatcgcacatgtgatggtttagcgatttagctaccgcacaactgaatcaaaagacttgttaaattgctctcttagtcttatcataccttcatctcatatccattataatcatctttagcaatactattttatttttaactacgaaaaataaaccttgttacgccgttattaacagtgatcatttttttcgttaaagaaatttaacattcaaaaaagataaagaatgatcaccaataagcgtcatgatcttccgtatggtgatgataaacatcgtttgcagttttgttgtatagtacaacgtatatgtagccgtaacgtgtgaatagtgtatggttagggtcattttatttgtgaactaccacaattttgatagcagtggagataagtcaaaggttcgtcttctaattaattaacagcgattattagactatctaacttttcttcttttcttattttgataataactatatatcttctttagccaccttactttctcatcgggttctatttaaatagggacaaagaaaacaaaccatcgatttgtactatgtgctcaattatatcatatgttttgtctccatctatgtatctatttctcttttccatttggtaaattatttaagacccttaaactgacttttctcgtgggcggcgtcgaagttttggttaacagacaaaacatctgttcatgatgcctgcataactctatgtttttatactactcatttgccctctatttcatgctactcttaaaaatagctaaataaaaatacttcaatattagaaaaaaaatcttcttgatgtcaaaaatacactttagatatcccctctagttcttgtgatgctaatatattacaaaattgtttatatatatagaaatattacctctagcaatacaaaaatcttgttatatcaattaaatataacactatccgactagtgtttactaaaataacacataatttttaattatgatctttgaattttagtttatgtattacgctttataattttgttatcaaaaactataaaagctcaaaagtgagcatctataccctaattccgtttttatgcatacacttaggtttatttttattacgagaatctgtgtttagtatatataaaatagagtttatgaatgactaagttaaatacttcaatactaattaaagtaagtcgtattgatgcagacaatataaactttagatatctccgctagtttgtataatgctaatagattcaaattgtctttatgtagaggaattacctcaaataacataaaattttcattttattaattaaatctcattttgtcatttcaaaagtcattttaattactgtgttatttgtctaaagtatactccaaacaagaaaccaaagtagaaggtcagtgcccaagagacaaataaacttaagcatgtccactctttttagcgatcggatcgcttatctgttcttatccattatggaacatgaacgatgttcctttaagactaccacattcaaacgaaaaataagtcatcgatgatagactggatagttatagtttgatgatctagctaattgactttcatatttacataaaacagaaatgtgtttttatcaaaaaagaaaaaagaaaaaacagaaaatgaacaatacatctcacatggagtttgtacaagaatccataataattttttgttcggtacagtaggttagatatacatttgaatacagtttacaagccaaatgttagaagcaacatatttatatagtatcatcaatatacgatccaaaatgaattatagattgacttatggaaaagttagatactatatgcatgattgccaaatacattgaaaaataacaatttaagttcttcaaacaaaagtttataaatgactcggtgtttgacataactcggggttgtttttctttgttaattcacacacggggttggtgtataaatgacttcggtgtttgaaatgtatgacacggtataaataaaaaaggtaaggaagaaatgaagaatagaagaagaacaaaaaaaaaaggaaattaaaaaaaagtcaaaataaatggtcagtaaaggattttgaccagaccggagcggtccatccatagtttcccactaccttccctgatttagcacagaagaatggcaatttgcatgccatttatttcatctattcctccttcactctataaatatattttaaacaaaatcaatttcttccatacacaaaaatcaaacaccttttgagagcggttattttttctctatcaactaatacagtaaccttacgggtgtttatttgtatagatctctgtggttttcttggccaaatctagtgagatctttttggtttctcgaattcgatgaaa

SEQ ID NO: 1679 - DNA, 3000 bp, Unknown
  misc_feature (1)..( 3000): cDNA_ID_2142421_gDNA_ID_1620434_Annot_ID_156945 3000 nt of promoter + ATG
aaacagactcccaacccgacaaagattggcttcttggggagtcatttcttctgccgattgttgtctctgttcctcattgcctgaaacccgtgaccaccttctgctggtgtgcgactactcatctcaaatttggtctctgatattcgcgaggttaactccctctcatcgcctcatatgtacttgggatgagcttctctcttggactagactttccaccaaccaagctccgtctttgctccgtaaagttgctgctcaagctgttgtgtaccacatttggcgtcaaagaaacaatgtgttacataatgatcacaggatccatccttctgctctctttaagatgattgatcgagaaatccgcaacaccatcacgggaagacgctctcggaagcgttggagaccactcatgcttctttggatcagataatttctatcatatttttcaaatattgtaaccttgtttttatttctttttgccaaggttactctagattaggtattgcttttgtaatacttccacttcatttttaatgatatttacaagtttagcaaaaaaaaaaaccccaacattttcttaacatttagatattctacgaaatgattccatataaaattgtatgggtttcttaaatttgtctttcacctcaagcatagaccttgtttcttctagcatgttctccagttgttcaacattggttaacagggttacaatctcgtggtgaggtgaacttgcgtcgctgacttgttcatgatgttgtggcattggttcattcccgacctcttggaattactgaacctctgcaaatggaattttataaagagtcacattaaacatcataatcattgttcatatgatgttattagttgattccaacatgataatgcaggcttataacaagaaataagtatgtaacatctgaaaaaataatgcaactttggatacaatccgcaacaaaaataataatcagaatatctacctttttcaagagcatcttgcaaggccaagaaaccgtcgatggcttctgttaatgaatccagttcctcggagtaacgattcgtcgtgtttatcgactctcctccttctcctctgattatcatttctctaaatccataccagctgaaaaaccaatccctgccacaaacctagaattataaccactactccctagtatatcaaatcatagaaatcaatctctcgtagatcagtgatcacatctccaaattggaacaaattttcacaaccaaattcttcggataatcaaaaacttaacatgttcactattcgcgaagattttttttttttttttaataagatttatcctttaaatcccactattaacaaaaaatctcattttttctttatttttgagattttctttaaggacctcatacctttagagaaccatgagagatataagatattgttagagttggacttagaatccgtccgtgtatattactggtttggattcggatttggttttgcttttttgattagtttctgttattttcttggatccgaacattagcctaagagtagggagttccttcccataaaagccgataaattgggacccatcgctaaagccacgtgaccacgattcctccgccagctcgcattgtctctccttgtggacctttctccaaaagtcgtccgtgttttttttctcttttttttttcttttctaattctgtgcaactgtgcattaagctttcagaaaaaaagaatgacactttttgtcaacgatcgtagccacaatttgcattcactgtttgttcactttcatatctaacatttctttaatttctcttttagtttttcactgcagtaattatttagttttttcatctgaatataaatataaatatacatatataaaaataagaaaataatatatatcatagccgtctttgcttcataattacgtcaacaacccatttttttggcggtgtctgttttcttacctaatcatatttaaataccaaactgacactataaacaattgtagtttagatgtaaacctttaaaccaatccgttggtcatagcttgtgagacataactccacaaaggtattgttagttgcaaatataaggaaaacgaattaaacttaaaacttacagttgtaatttaggtgaacacataattgctaaataaactctaaaaggaatgtattcaatcaaacattttaggtgatttgtatttaaataacaaattttatgttattcaattatggatttttgaaaatctcattagattagattctaaaatctatttaaaaatcattaaaaacattttaagaattaaatttttaatgactataagagacttaagtgaattttagtggatttccttagttaaaaatacagaatttgaaatttcatgagtttagatagaattttagaaaattttacaataaatcataacaacttcttaaaatttatccaaattcttgaaaattgtataaaaattcaaaataactcaaatcatttaaaatataagattgaatacgatctcctaaaactcttttatgtaataaattttacaatcatttggtatatgtgtacattacaacggcacatgcaataaagtaaagaatttgacctaattttctctctttgcttaaatattctcctccaccactttttgtcagaagtcacacttgaaagatagaaagagagaggagaggttagaaccgggaagagtgaaaggaaagtcacgtcggtccgttttataagaaaagaaagagatagtaaggactaaagagtgtagcctaagggaagttaaaacagagtgttattgtcgttgcggttaagctctctcctcgataaagttttttttttcttttacaaaattccatttctaccctttccttttttccaagtctctctctctgtccaaacacatcatcaaaccacatttgtctgtctgcctgcaacttcactgtctctctctctctctttctctcttcttcgattctagattacttcttcttcttcttcca

SEQ ID NO: 1680 - DNA, 3000 bp, Unknown
  misc_feature (1)..( 3000): cDNA_ID_2142393_gDNA_ID_1620434_Annot_ID_156940 3000 nt of promoter + ATG
aaaggagttccaataggcacgaccgatgttattattgcaacatatatatcaacaagaggaatgacaacgaaacaatgaaacaactacttttcgtattcctttttgtcgctgtttatgtaaagcaagtgacaattgacataggtctataggagactttagactttaatcaaatttgccaaagagcaatacaacataaatagtcaagccgattatcgaaccagagtagcatgaatattagcccagtgaagacgaaaagagattcgaatcggaattacgtgaatgtgatttcgaatgactctgacaatacgttttgacttgtgtagtttattgtatattcagtttaactctgtcacccgccgtgttcaaccttgctggttcagagttccacaggtaagtttttcataattttctcacgctgcagtccacttgagtagtactctaacacaatgttacaggttggtatggttgccatcaacgatgggattctacttcgtaatcacatccacaggattctcaaagcatttccgtgaaaagccttactatcttgacctagttgatttgttaggatatgaaattcactgatccataaaaaaaaacataggggtacgtttagaagaatacataaagtatagggactgaagctgcaaatttatgttctcagtagatgttcgatctttggacagaattgaagaaaggagaaaccctagactgagtctggttacttgaaggggatcatgtgaatacgtcgactggtaaagaaagaaagattgctgctttttagatttagattcgagaatgtatggaagatctggtcttgacaggtttaagaagtcccaaacttcggaacccttctctgtatcagcaaatcctcctccggtggtacaacaacatctgtctccggaggcattgtcggggcaaaaaactcagattggagctggtcaatcaaactggcatccccctgattgggcgattgagcctcgtgccggtgtctactctctggaagttgtgaaagacggccagatccttgatcggattcatctagatagacgaaggcatatcttcgggagacaacatcagacttgtgattttgtccttgatcatcagtctgtttcccgccagcatgccgcagttgttcctcacaagaatggcaggtttgtcatcgctactcaattctctcatcacagctttggccactgttgacatgagtcttttttattttttgtagcatctttgtgattgacttgggatcagctcatggtacgtttgttgcaaatgagaggttgactaaagatactcctgtagagcttgaagtgggtcaatccttacgatttgctgcctccacaagaatctaccttctgagaaagaacagtgaggctctcttttctcgccctccacctccagctgagattaagcttcctccacctcctgatgcttctgatgaggaagctgttgttgcttacaataccttgctgaatcgatatggtttaagcaatggagaatctggtggtatgttagggaaaaggaaagagaagaccggatcagaagcgggagtggctaagaggatgaagaaagtgagagtgagcttcagggatcaactaggaggagagctggctgagattgttggcatgtctgatggagcagacgtggaaacagagcctggtcctataaatgtcaaagaaggaagcctcgttgggaaatatgaatcactggtgcgagtgacactcatacccaaaggcaaagtgaaggaagagaaagcctttacaggaggaacaagaggaggtgtaacagatcgactccaggaagctatgaatatgttgaaacggggtccaaaaacagggatttacgatgacctttacggtggtgactcacttgccaaggctgttggtacgtcatgggcttctgtgagtcaaccagcagctgaaactgaatgtggaggggttggtgaagaagatgataacgacgatctgtttggtgactaactgattttgaacactgagattcctttaagtaactcttcttcttctctaatgcctacattccattccaaaggcattggtatgttgtttcctctttgtctatccaatggctgcagcaagaaaagagagcagctctaagcccaggcccattgtcttgtgttataagtaagaaccctgaaatttgatatgagcttgagcctggtcagtggtcattctagttgtgggtcttaacaggagatgcattacatagatagtcattacaaatagtgtggagagtagagagtagggccaatgcaaatggagtgcatttgattagaccactactgacttacagattctctcctcaaggcagaccaattccatcagaagaggacatttgtactcaaatacctctcctctcattctttttcacttttgcctttttgcattattaaaacagcacactaatgatgtgggttgacttccctctcccccacaaaaacagagattccatggggggaaatggacaacaagtaaaacacttgtaaaaatggtaatctgcctctgatgctttaagatatgatttggggatcaatgcatctttgctttgggatttgctttgtgacagttagtataaagaagagagaagctgaatgtgctgcaaccaaattaaaactctcttttgagttaagcctatatccaactcctactcttcctagtgtggtccattgtatttatcataagagtaaactcgcttgtaataaattatagtagggaaaggtggaagacccacttttgtttctcactttctttctgtttggtgagaagttgttttccttatgcaaaagatggaatgcatgaaggacacttgtgtctggctttttatttattttggttgtggatactttcatgatatactttacgacctcaaccctttaataccacacaatctacctccattcatcttttctcttctcttaattttcaccttatctcccaacgagaccatagaggagttactgactccaacttatagctactagct

SEQ ID NO: 1681 - DNA, 3000 bp, Unknown
  misc_feature (1)..( 3000): cDNA_ID_3063698_gDNA_ID_1620434_Annot_ID_156937 3000 nt of promoter + ATG
aaaaagtgagaaagaatagttaattcctgaatttcttagaaaagacaaatgttatgcaaatgatgatagattatgttttaatttcacggtgcagacaaactagacatctgtgttagtaaagcatcaatggctttgagaagaaagagagaacaaggcatgctaaaagcaaatattaggacaagtatttgatttgtactctcttccctcattatgttcctttgcaaagacacagcagaaacatccaaagtgaagatgagtttcatcatcacttgcaggggagcggaatattcgctgacaatcacatcacatgccgtttggattggaacctttttttattaacttaagtcgagagctctgtgttcctcgatttacatttttggtttctattatcaatacgcatcacatgtttctggactaagcagggctataaaggctaatactagtaataaacaatggaaccagcctgtgcttttggactttccccatgataatcttactatttgcttattaccattctttcaactcttcatcgacttctcaaatcctttattcagcaacataacaaaatgaaatcatgttttctgatgcttcatcagattactaaccaagacaaagaatcagaaaaatttcatcttgcaacaggacgtaaatcactgttccaaagtgtaaagcaagatgatgaatgatgatgcccttacttactagggggactccatcagttttatgatatcagagactgtgcttgtgtaatagtctggttctatcttgttgcccttatctagtagattagattcacttgtcacccctgttttgacatacccaatcactgtcagttcaccccaacactgtccagatatcgacttgtattggcttgcaaaaactcaaaagagtatcaaacagttaatgataatgacctgttaggacgaggagagttttgcagccagcattctgcccaaacaagatatcagtatctagcctatcacctaccatgcacattcttgacgtttccgtcccaaatctgcaacacaagaaatacacctctttatcactctatcctgtataatgcacactatgaactgagacaggctttcatgtgcacatacttttgtagcagaaagtccatcatgaaagtagatggtttcccaacaactattggttctctttcagtcgatccacacatggcagcaaccatacacccagcacctagaattacgagtaagaatttgatgctgtgacaaccaagctgctattctgggcaatgaggcctaagagtctagtgaccataccaggccactcttgcagatccgtcatatgtcctactgcatcacggttggtcgcaatgaagagacatcccggattctcgcgtacacagagagtcccgtacctgccatttccgttattgtgttagccaaaactctcagaaactcaattaaggcaaccgacttgcatgcaatagtaatccatcttactgaagcttatagtagttaatgttggggtctagtccaactacaactgctcccacctgtcacaggaagtcatgaagaaatatacaacattagaacctagagcaaaagagaataagaaaaacgcaagattggagaaggaatcaaagtcttatggcccattacacttttatcatgttcaaagagagagtttgatttccattgtgccttcttttcaccatcttcctgcatggaagcaaatactgcttcagatagacagaggaattcaaattatacaattttggttggtttaaaaacacaggagcagtaagtatcaaacatcttgtacaatgatatgagtcctcagagtgaccaaaacatgacctgatcaaaacatataacaaaaggaagactacttacaggaccaccaagacctgtaaaaccggcaatctgcagctcctcaagaacaccctctccaccaatcacataaacctacaaaagcaaacacgaaaggaaaaaaaagtgagaaaaagatgacgatagagagacataagccaatgtgtcagtcgaagtagaaccttcttgtccttaggaaagttattgactttgagatacatagctgccgcaaatgacgaagagaagatctcatccttccaaagtaatcacatttttttgttttagttttaatggtaatcacaagtaatacgaagaaggagaactcaaagtttacctgagtaatagaagtgacacccaaagatcggaacttttcagcgtattgcctcctcgattttacggaattgttggtcacaaagacaacatttttaccctgaaaatcgcaaaagatcagagagagagagactgaaaaggaatagagagtggggaaaagggaaagcaccttagaacggataaggtcgagagtttgggagacgccatcgatgagcgtttcacccttccatataacacctgaatcgaatcatcatccatcatcagagtagtaactaaagaggataacaatcgaatggaagaaagtagaatctaccatcgcagtcgaagaggaacgtatcgacagagtcaaagagagatttgaagttactggaggagagaagctgaggcgccattggaggagtgtcttcttcttcttcttctgggaattgatcactctggtaaagcacaattggcacgtccaaaacgacaccgttccatcgaaagaggccacattgtgattggtgagcccaattaggaaggcctattttactaatgttgaagcacatgttgtactataaaaaaacagagtttattatctgtttctttggcttgacatgacaaatgtacaactgggagagaaagtcagtccgattgtgttggggatgacgatggcaaaagtagtaaataaggaagaaacaggaggggcgttttcgggagaagaaggaggaatatgagtgtgagttgttgttgtaggaatctgggcaagacaataaaaaaggcaataccttcacatcatttgcatctgagaagtcttggtgggagtctctatcgtcgtcgtatccaaagctcttca

SEQ ID NO: 1682 - DNA, 3000 bp, Unknown
  misc_feature (1)..( 3000): cDNA_ID_2142367_gDNA_ID_1620434_Annot_ID_156932 3000 nt of promoter + ATG
tttgccgctgcactattggggacttagctgggctgctctccatcatcgtctgctccatatttatctctttcccttggcatatgactttaacctcacacacgtctgctgcggagctcctcattatcagttcagggacactgtttcctttcattgtggatgctttcctacaaaaagccataaagagagaacggtgtcttgtcatctgacaactgaaaaagttgtgtggttcatctttgtgtatatatatatacctagcattagacttgtcgatcccaagaacaagcttcctaatgttaagaatggtaatgaggtcttgtacagccttagcgaccgagtcactctcaaccagtattgtctccaccttcacctgttcctcactttctcatatgttagctaactatcttgatccactcttaaccatccaaacaacaccaaaagagagaaagagagagagatgggaccttagaagcagagcaggcatgaaggaacttgagcaacagagttcttctcttttccctttcctgagacataaagctttctacttgttcttgacttgctctctccctcgttatcctccccactacacgaatcatacatacacttgagtgcggacgcacatttaatcaaagttaacaaatggacgagaggatatatacagacaggggtaaggaatgaagcgagtctcagggaagacatggatgaggaaaagaagagtagaagaagaagtcattaggttgtcaatagcccaacgcaatgcctccatacttgagtctcctttcccaaccccaacatagacgttgtcctctccgttcatggacactgttccgctgcttctcccttccaactggctctctctcacgctctccagtcttctccttccatcttcttgttcctcctcctcctctatctcattgctcctccgttgcatttcaagttttcttctcgttgactttttttgctcttcttttgccctctctgcctcatcaaaccgtactcctttcttttaatatttatatgcaatgaacatgtgcttgtggaatgtatgacctgattttggtgttttttgcgtgtgaggtttatgaaagcctgaacttttcaagacattgaaccttttacatatcatgacgatttccataaacaaggtttatccacccacgtatgtgtcaacttataataaaataaattgcgtaaagtaaacaaaatttgattataaatgtgcatcatccaactttgcaaaaatatacatatagtttttgtggtcaagaatttgaaactattgatgggtcaacgtcctttgctctttgtgtattggcaactgtttaagcataaacaatcaaagatgcatatgtcatatgtgtacaaggtcgaatatccgaatctcaagcaggaatctttatatttaataatcaaaagtcaaacacacaaaaattgcaacaacaaagcctttgtacatcagcagctattgtgctttgtctcttacatttaagaatccttccatgtttagtttttgacatggtgggaaccggaaagattcaagcctttaatagatcgttttgacccaaagatgaaagctagcatctttaggttatgggcaaagtgttcggctagttttgtgtttgctcttagttttaggcccaaatgagaagtggcccacccagtctgtttctctgtccatgatttatactcacattcaatggccacaactagaacaaagatcgatcaaagaagcaaagcaaatagctaaaaaccaaagttgttgtgtctattgaatggcaaatcaaagagacttttttgtgtgatagcctgataggcctgttttgccatacaaagatgttgacttttgaataaccataaagcaactcatccatgtcatctccggcccctagattatctcttcggatgttgtgttatttgttaaaaaaaaagattagatgactttaatcaaatcattgaaagtaaacaaatgaaggatattgctagagagttttttacaatcttgttaattaattttttataatattgtaaagtttctaaacaaaatctctattttgataatacttttcatgattttattttgtaaagaaaagtgtagaatgtcatgaaccaataacataataatttaattcattaacaatcacaattttattgttttaattgaataacacaaaacttttactaactttataaaagtacaaaaccaataaccctaaatttatgaagattttaaattattttttataaattttaaataaataacaaaagactttaacaaatttttaaaaaatcttgattgaataacataacagattctagataacactttaaatcactaaatttattttgaaatcccaaactaataacaccctctaataaaccacttaaaaagtaattaaaacgtttctaaaaaaaaagacaactttgaatatttgacccaaaaagcagtaaagaaaaaacaaaaagagaccaactttgaataccattatttatcttttgacaaggctcaccaaatcagctaccaagttcatacatggtacaaagctttagcaagttgtcgaatttcatcctacaattgaattttctctttactatttcaaagtttgaatgctcctctgttttcttcgttggttcattgagaaaaaaggaacagactttttacttgtgccattgaccaagaaccacaaagaggaggaaatcaaatggtttttgggagtttgatggattgattgattattcagcaaatcccacagaagaaatcagaagctgcttcttattttttggtcacgaccagtcttaatcaaagtagttcgtctcctacttgttattaaaagtgtatatttctgttgggagtttctgttctcctaccacctcattgacctttaatgatggactcatagtttggtgccaagtgacccaaaaaaaaaaaaaaaaaagtcgatcttgaagatttcatactttttctggcaattctgtttggtttcagaggaaggagtcaaaacaatg

SEQ ID NO: 1683 - DNA, 3000 bp, Unknown
  misc_feature (1)..( 3000): cDNA_ID_3063702_gDNA_ID_1620434_Annot_ID_156936 3000 nt of promoter + ATG
caagagagagaccgagccattaaatctcccatctttctttttcttgtttctagtgtgtgagtgaaaaaccaattgctgctagctggatgatgatggtggtcgttgaggataagacgcttttacccttcacagccattatttataaataaactctagttgttgtattaaattaagcgacaaggtgacgtgtcgaggcctgcgcttgaagctttattttcttgcctttggaatggaatgtaggcattagagaagaagaagagttgcttaaatctcagtgttataaaatcaatgtatgtatcgagttatcttcttctgttggtcaatattatgtatgtagtcacaggcatcaaccaacaagaatctcaaattcatataactgatgaaagaagaagatcatagtcatgaaacaaatacaattgtaacacaagaataaaagtgaggcaggtttattattccccctgaaaatcagagcacttaacagaattacacaaatcaccaaccaagaatcaaagacataacaggaaatttttgagggctgagacttatgtttgtctgtctctactacttctgcctcttgtagatcttagccaagaaggattttagcactgcttggattgctttactttggtgtccctcaatcgctccagtcagcttctcgtagcttttgctctcatactccatgaaaactccctatcatgttcagatcaaaccatgtccaattagcaaaaatgttagttgtgtattacaacatcatatctctgaggttcgctacaaacctcaagatccagctctttgtagagatccttcactttagcaacgttcgatgggtcgggtttaccatagttctcctagtaaatcagaacaaaacatgtttcaggttccaaacaggatacaaacctttttgatcaagatgatatggttcttacatataatatcttagtttgttcttcgctgcagcgctctaatgccttaaccaccaaccacgagcatttgaaatcttctatatctgttcctatctgcattataaaaaaccaatatgctgaaccaagtgaatacattcacatcagcctgagaaaccaagtgttagcacgagtgaaaccttgccaagcgtctcgggatcagcaaaacaatccagataatcatcctacacaaaagaatggttatcaacatcccaacactacctatcatatagctctcatgaatacttaacagcaatctacctgcacttggaagtagattcccatgtcaacaagaacattcttcacatcaatatggttttccaaattttcgccggccataagcaacgcacaagcaacctgaatagaaaaacacagcttgtcacgggatctacaattgcaatgatggagacaaaaggaataacatgattgtttttgaccccaaatatgactagggaagaagagaatccatactcacagggagataaaatgagtaataagccgttttgtactggacaatacgacggtggctgcaagttgaaaaccattgcatcaggtcagaatactgcctttcatctaatcaaccatcagaagaaaccgtatctaaaatttagacaatgcccacagttgactcacattgacaatgagtacttggccaaatccttttctccttcaaaggtggtgatcaaatctatcatctggccacaagctgtttgcaactcaacctagacagcaaatggaataatagactgaggataaaatatcaaaagtggaaaagagaatagtagatctgccaaaacagattacctcattaaacaaatcaacaaggtcaacatagtaaggcttatcacggaaatgctttttgagaatcctgtggatgtgattgcgaagtagaatcccatcattgatggcaaccataccaacctgtaacattgtgttagaatagtctagtggactgcagcgtgacaaaaaatatgaaaactttacctgaggaactctgaaccagcaaggttgaccacggcgagtgacagagttatccataatatcatcaagcacaaggaaataagcttggagctgcaaagataatgaatatgatgagtgatagcgacataaagagagagagaggagagtatctattactaatagagattgaaaggataagtctttatcattggtatacccattcaatgcaccaaccgagagcacaagagaggaaaacctcttgctcagtcaaatcattgccttgcttcaaaagtttgaaactgtcaacaacagagagaccccgattgagtttccctggagaagaagaagtaagtgtgagaaaaaaaaaggagatcgatgaaaagcgagagagagagagagaaagaggctgttgtagacaagtctgacctccacgtacattgtagtccagcatctgcaaagaaagagagaatcagccagcattcgaaggatatatatgtgggatctgactgatgagagagagatacccgatcaacccagagacgagattcattggtgaattcgaaggaagggtcatgaagaaggtcagacttgagaacagaataaacgttgagaaaggttgacttgagatcggtctccattgaagagctttggatacgacgacgatagagactcccaccaagacttctcagatgcaaatgatgtgaaggtattgccttttttattgtcttgcccagattcctacaacaacaactcacactcatattcctccttcttctcccgaaaacgcccctcctgtttcttccttatttactacttttgccatcgtcatccccaacacaatcggactgactttctctcccagttgtacatttgtcatgtcaagccaaagaaacagataataaactctgtttttttatagtacaacatgtgcttcaacattagtaaaataggccttcctaattgggctcaccaatcacaatgtggcctctttcgatggaacggtgtcgttttggacgtgccaattgtgctttaccagagtgatcaattcccagaagaagaagaagaagacactcctccaatg

SEQ ID NO: 1684 - DNA, 3000 bp, Unknown
  misc_feature (1)..( 3000): cDNA_ID_2142375_gDNA_ID_1620434_Annot_ID_156935 3000 nt of promoter + ATG
agttactactctgatgatggatgatgattcgattcaggtgttatatggaagggtgaaacgctcatcgatggcgtctcccaaactctcgaccttatccgttctaaggtgctttcccttttccccactctctattccttttcagtctctctctctctgatcttttgcgattttcagggtaaaaatgttgtctttgtgaccaacaattccgtaaaatcgaggaggcaatacgctgaaaagttccgatctttgggtgtcacttctattactcaggtaaactttgagttctccttcttcgtattacttgtgattaccattaaaactaaaacaaaaaaatgtgattactttggaaggatgagatcttctcttcgtcatttgcggcagctatgtatctcaaagtcaataactttcctaaggacaagaaggttctacttcgactgacacattggcttatgtctctctatcgtcatctttttctcacttttttttcctttcgtgtttgcttttgtaggtttatgtgattggtggagagggtgttcttgaggagctgcagattgccggttttacaggtcttggtggtcctgtaagtagtcttccttttgttatatgttttgatcaggtcatgttttggtcactctgaggactcatatcattgtacaagatgtttgatacttactgctcctgtgtttttaaaccaaccaaaattgtataatttgaattcctctgtctatctgaagcagtatttgcttccatgcaggaagatggtgaaaagaaggcacaatggaaatcaaactctctctttgaacatgataaaagtgtaatgggccataagactttgattccttctccaatcttgcgtttttcttattctcttttgctctaggttctaatgttgtatatttcttcatgacttcctgtgacaggtgggagcagttgtagttggactagaccccaacattaactactataagcttcagtaagatggattactattgcatgcaagtcggttgccttaattgagtttctgagagttttggctaacacaataacggaaatggcaggtacgggactctctgtgtacgcgagaatccgggatgtctcttcattgcgaccaaccgtgatgcagtaggacatatgacggatctgcaagagtggcctggtatggtcactagactcttaggcctcattgcccagaatagcagcttggttgtcacagcatcaaattcttactcgtaattctaggtgctgggtgtatggttgctgccatgtgtggatcgactgaaagagaaccaatagttgttgggaaaccatctactttcatgatggactttctgctacaaaagtatgtgcacatgaaagcctgtctcagttcatagtgtgcattatacaggatagagtgataaagaggtgtatttcttgtgttgcagatttgggacggaaacgtcaagaatgtgcatggtaggtgataggctagatactgatatcttgtttgggcagaatgctggctgcaaaactctcctcgtcctaacaggtcattatcattaactgtttgatactcttttgagtttttgcaagccaatacaagtcgatatctggacagtgttggggtgaactgacagtgattgggtatgtcaaaacaggggtgacaagtgaatctaatctactagataagggcaacaagatagaaccagactattacacaagcacagtctctgatatcataaaactgatggagtccccctagtaagtaagggcatcatcattcatcatcttgctttacactttggaacagtgatttacgtcctgttgcaagatgaaatttttctgattctttgtcttggttagtaatctgatgaagcatcagaaaacatgatttcattttgttatgttgctgaataaaggatttgagaagtcgatgaagagttgaaagaatggtaataagcaaatagtaagattatcatggggaaagtccaaaagcacaggctggttccattgtttattactagtattagcctttatagccctgcttagtccagaaacatgtgatgcgtattgataatagaaaccaaaaatgtaaatcgaggaacacagagctctcgacttaagttaataaaaaaaggttccaatccaaacggcatgtgatgtgattgtcagcgaatattccgctcccctgcaagtgatgatgaaactcatcttcactttggatgtttctgctgtgtctttgcaaaggaacataatgagggaagagagtacaaatcaaatacttgtcctaatatttgcttttagcatgccttgttctctctttcttctcaaagccattgatgctttactaacacagatgtctagtttgtctgcaccgtgaaattaaaacataatctatcatcatttgcataacatttgtcttttctaagaaattcaggaattaactattctttctcacttttttttttttttttttgtttgaaatcgagatggcattaaagtccattattttttactattataaacaaaaacaaagcgaaaggtgttgttggctgtgactggatcctccccctttcttccgggttcttgtcgtgcgtatccggcgaaatgagaagtgtgtagagcaaacagaggtgaagctgagaagttgatcactcactcaatctaagagtgcatgtaattgaagcagcaaccatttctacttttcgaatcttctctgcttcaatccacacccaaggtatctatctccttcctcctctctcttcttttctagggtttctccctaaagttactgcctttaccttgtttccagatctctctctcctcttattcttctcattttagatcttcttccatctgaaatcacgtttctcccatttgggatctgcttttttacttcaacatcaaagacattagttttctgctgtttgatctctgtgccctgtgtgtatgatcttactagggtttcaaggaatatgggtctttcccgttagctaaagataattaattttgtgtccgatg

SEQ ID NO: 1685 - DNA, 3000 bp, Unknown
  misc_feature (1)..( 3000): cDNA_ID_2142244_gDNA_ID_1620435_Annot_ID_156981 3000 nt of promoter + ATG
cctgatagcttatcattctcagaataagcatagaagattccattgcatataatcccacaacttacaaccccaaaacccatcgggagtctctgcatttctgaccatgtgtttgttgctgagtcgtatatttcacctgaatccagtggctcatcgaataagccagtgcctcctatggcaatgagcacaaatctcttggagctgtttcggttaagccgatcaagcttttgtcttattaatctgtgggatttggttccattttgatcagccgagtttctgttctgtcgtcttaccgatagcctgtgagggtcttcataaacgtctgactctccgccaactcttgacaggtgaaagcgtctatcttggcgattctgtttggtctgcatggtcgaaaactctgaagtaacttcagtggcaccaacaatgggaagtgatctagcatgtctcatagacgcaattttacgccatgctttgatcgaagggctgaataccaagatccctctgtgggacttgaaagagtttctgtccatagaacgacctccaactatataaatctcctcatggatgctcgtcacagagtacataaaccggcctttaagtagatcagtttcaatcctatgccatttgtcctgagaaacatcatacccgtgaatatcaccagaggagcatccatctttaagagcagcaaacagaaacaaccacggtgtttgaaaggagccttctcgtctcatctggagaaaccgctgagtgttggccatggattgccatttcttgcaaacaaggtgtgcattcaataagctggtcaaaggaagcctcatcaaacacatttccagaatatcatcgggaagataaacgtgcttgcggtaatcctggcccgagtctgctagatattttctattattcttcttccagaacctctctctaaccccataagaaaaacaatctaacctagtttcttcagttccacaaattgtcatcaatcccttaccctcctcactagcactagaccatctcttattacttgaatcctcaaaatcctcacccgtatcagcaactctgcaaccaacactgatacttaaacaattcaccgctccccttgcaatctcttcatcttccaccacctcagttttatgaatctttttcttcaacttctggctaacacttttcacaagcctccttgacacggttaaaacctccagatcctgccgtatagactcctccactcccaatggtttctcagaaatcatcatccgtcatctaacaaacttcacgccaagagaagcaacctgcaaatgcagatcacaattacgattcacagaaatcaaatttgatagcaccaagaaaagagcaagtggacacaacaaaaacaataaatttgtccaaaatgtaaataactgaagctgatgatcaaaaagcatttgtgtgagatcatccacattatagcgagatccacttattctataaaccagttaatgagagattaaacatgtaaaagcaaactctaactccaatattccgacaaagtaacctgttcattaccagctccagaaactacaaatctgaatcgtagcaccaaactacaagtagtttttgaaatttcgcttctgaaagtaaccaaatcgaagaactcacttacattgagcaaactccggagattcgaaacgagattcatacatagacagagttgtttctccaaatccaaagcagattttagaaatcaccgaagaaaattgagaattcgaagacctaaaaggctaaaaaggaaggaacaatttcgctttcccttttcgttttattttaatttttaagtcatgtaggagacaggagagactgaattgttgtctttctcgcaaataaaagaagaagaaaaataaagaggtgctaagatgtaattttgctaagtaatttgtaattagcatatcacaaaaatagtataagataaaaaataatttgggcttgaaatttagtaatacagcaaatatttagaaattaatacttaataaattgatatattaataaacacaataaaataaatattgtaaatcagctattgacatatagttgaaatatgaaaattttacaatatatttagttatgaaaatcttggactgagataaatcctactaattgtgaaatttttgacagagaaatcctactagtaatcttggacagaacaatcctactattttgaaaatcttggactgagaaatttcatctttcaaatggatgttctcatttaggctactaagaatttcggagaagaattgggcagaagcagttttgatatttgtactagtttttattcactaaattaaaacaataatttatatgtctatatctaaaaagattaattttactattcttaacaaaaattgacaaaaaataataattaaaatgtcttattggtcaattaaatatagcatgtattaactttaagaaaaccatttagtatgattacaactaattaaaaagccattgaacgagtggttggattgaaattgaaccaaccaatacctcaatcttttgtctgtctccttattgctttattatttattaagcttccgcactatttcaatatctattatttctcaaaattctacactaactattagtaaatccatgttatataacagaacaaaaaacattctgaccaaaatttggttagtttatacaaaaacaaaaaaaatagtaaaatcataagagggtggtcgaatttgaggaagatgatgaaaatgaatttttatttattgattttttttttttgatatccataggagaagcactcttttaggatatatgtcctgtcccgcaaaaatctgatttgtgagaatcacatttcaaaaaaagttgggtgagaagaaaaacaaatcttttttttcttttgtctctaaaaatgaaacaagagaaaattaatcttacaatttccttaacgtttgctttttccttcaacatctttggaatcaattcaaacgcgatagagagtctctaatggtcgatgtgatg

SEQ ID NO: 1686 - DNA, 3000 bp, Unknown
  misc_feature (1)..( 3000): cDNA_ID_3063758_gDNA_ID_1620435_Annot_ID_156988 3000 nt of promoter + ATG
attctctttcaaattttaaactcgattttttacatttaccgaaaacctaatatttctttgttaaaaagataaatattggtcagttttttttaaaaaattgttttttgaaatctaaaaacccaacgatataatgctgaaattatcatttggatagatttgggactctaaacatttgtaaatatttttgatagcattaatataaaatctgtatcaaaatttaagagttaaaaaaaaaaaagacacgaagttggattcaaagtcgaagattcgtccccatttcttaacgaaaaataatgggagcttaagtgtttgaagatgtttgatagtgatacggaaatcaacgtggaattgcgtcctacgaggacaattcttttgtgaagctgaagaatattttaattactaggaaaataattgggatgtttcggtgatgttttcctcaccagatttgatgtttgtcggcggtgaaagttgatatcggtatattttgatgactcttcatcttgtgttgcagttgtaatatcatgtagacagttgtattggataaagtcaaaatgtcaaaacatctctatgcctaacttttatttctccacaaatcggtgtagattttaaagtcttgtttctcttttagtgggttagccaagcaaaatttttttttatttttggtgggttacttcataatacacttatcaactctagctaggtcgatgaggctttctgtgtggtagctcggcatcggcgatcagataattagagttgatagagacattatcggaggctgtggcacaagagcaaacaagggcaactggctgcaataccatttaaagagagtgacgggatccaggatggagaaggctagatggatcagggttaaccctttcgctgccatcttcgtcaccggttcgagccatgctgaaatctggtgaggttgttggtcgactaggatcacgaaacaactagattcatagatctggacgcatgtgtgagattaagctcaagttcacgcatttttacaaatttgactttgaggaatcttggcatggtggatcaagtttcatcgaaaacaactatcagtctagaggacccgcgcgaatataagattctggaaagtttgataaaaggatatccaaccactataaaccaaagcaaaggaagaacgtcgtggtggtcgggaaggtgacaaaaaagaacaaaaagtttgcgaaaagtggaatagagacaagagactaaaagatggatagatacatctttacgccggcgagcaaagactccaccagtattgaaaaactggttcatgcggctgtcctcgattattgaacctgcgtgagagagttttttttagctcaatacaaaagtagatggttaatattttattcgaccactaaattattaagctgaaaaataactcgagtgaaaaatatgacacatatcaattacttttataatgtattgataagaaagattaaaatatgaaaatcaaatatactcaattgctataaatcttttaccaactaacaaaggttgaagaatgaaaactaaaatctaatttgacatagttaaaagatataaaaacgataatatgaatattagattatttaaataccttataaaaataaaattttataaatgattggatcgagtctccccgtagtgattactatccaaaagtatctataaactttataaacttttcatattcaattagggacatttttgaaaatagacaactcaatggagcatttttgaataatgggacatcaaaagaggcatttcaataatttcaaaaaatattacttctaatttaaaatattaaaaatgatctcacatgttccttgttaaaaagaaattcaaatacacaatattaaatttattttagttttcatatattttattagaaaaataaaattaaaatgaataataggaaattttagattaaatcatgacacatgcatgttgcaatgtaaaattagaaacactatgatatatgaatcttatatagaatctaaaaaaatatgaaaataaaaataaaaattattagaattaattaaaataaaatagaaaattataaacacgattatatatgaatctacgataatgcaaaaataaaaaatggaaaaatgaaaaaagtaagaaatttaaaatatacaataatatattaagttaaatatttacaaaaggaagaagtatatattgatgccatataattctaattgtaaaaaaatcaaataaacaacatgcaaacttaattgaaatcttcacatattcttaactgaccaaaaattatagaagtatatcatataaaattttaaattcaatcatgatatatgacaaaattaaatcatgatacgtaccactatactattaattagtaactttttgaataataaaaaaataagtaagtaattgctaaaaacattgtagatcatcccacagcttttttcaacgaaccctaattgttattcttttcttatttcctttttcaatttgttgataagagaaacttcttcgtcttctatgtcttcttcttctatgtcttcttatcaatttcagttcaatttgatcacagtgtcatcgcttccttgagcttgcttcacttccctgaaaattttggtaggtgtgttcttttttcctaccgtactgtttctcccgaggtctgatgtttttcctttgtgtgtgttcacgtatctggttctctgttcgattcaatgttacagcttctgggtatcatgcatattgtcttctttaagaaattaggtttaagaaagactcgatttttttgctctgtagacaaacttggcgatcgtctttgctcccagatttcataaatgtgtagtctttcttagtgtttctctctgtaatgatttgggtactgtctcaaatttaatgacattgctttaaacccagtctaaaaattgaatatttgagaaagcttgtatttttattgaagtttaatgatcatgttttttcgtgtagagaagatatctcgagtttatctgtgtcatg

SEQ ID NO: 1687 - DNA, 3000 bp, Unknown
  misc_feature (1)..( 3000): cDNA_ID_2142320_gDNA_ID_1620435_Annot_ID_156998 3000 nt of promoter + ATG
aaaaccaaaattactaaaacagaaaaagtatatgaactattatttaaagttcaaatatcatcaataatatagagtgtataatttaacttcggcttactataaaaacatagatagttaaagtgtataagaaaataaaattataaattttgaaattcgattcaaaacatatttactaaattaaatattaaaaaataaaaattacaatttactattaaaaattcaaatatcatcaataaaaacttataatcagcatgcctcagtctcagataagaaccacaaaaatgaaatcgtttcttgctaaaaaagaaacatcgaaagcccacgaatggcccagtgggtttctatgtgtttcaatagcccacgaaagcacctctactacaattatattcaccagcctaatattcaacaatgacgataatgtcagatcttccacgggatttgttagcggagattctcagtagggttccgttgacatctctaagagcagtgcgattgacttgcaaaaagtggaacgatttatccaaagatcggagctttctcaagaagcaaatcgtcgaaacaaagaagaagcaattggaatcgaaggagattgaggtgatcatgatgaggaattttagggtttatctaacaagcatcgatatccacaacaatgttgatccatcatttacgcctaaaggtacacttattagcttaagcgatgatgcaaaccatcatcaagtcgataatgtatctagagtctttcactgcgatggtttactattatgcatcaccaaagacctccactataggcttgtggtttggaacccttattttggtcaaacaagatggatccaacccagaaattcttaccacagaaaggacaattacgctcttgggtacgatgagaagaagaaccacaaaatcctgagattgaaggataattattacgctccacgggaacggatttgtgagtttgaactctacagttttgagtctaattcatggaaggttgtacttgatgtcagtcctgactggtatataccttcttataaccgtggcttgtctctaaaggggaatacttactggtatgcaacagagaagcatgtcaatgttgatttcttgatttgtttcgatttcacaacagagaaatttggaccgcgtttgcctctgccttttaacgctaccgagtctcctacttatgaagatgttgttactctctctagtgttggagaagagcagcttgcggtgttgtttcagagtgagtatacattgatgatggagatttgggttacgagcaaggttgagtccacagaggttttgtggaacaaattgttcttagaggttgatttgatagcaatcagctctcactttcagtttctggcagaggctgggagtttcttcattgaccagaagaagaatgttgttgtggtttttgataaagatatggatgaggctaccgatcgcgacatggcttacgttgttgggaagaacggatacttcaaaaaagtggatattggggaagaagcatacacgagttgtttcccacttgtatgttcttatgttccaagctcagagcaaatcaggcagctaacctgattattacgaactactgttttctttttctgtcatcttcgattgtataaatctgaccattgttatcagttatctggaatctcagagacatggcctctctactatatgtaaactctcgtgtggctcttctagacatttctttgaaacagtcaaatgcatcttcaactttacgtttgagagctttttttaccattgctagtatatatatgtgaaaaataaaggttgtaagaaaataaaataataaaagattaattgtcaggtctcatatttcttcatcacgcacatactttttttatttcttttattgtaaagggtaaaatcacatgttcactattaacttaccactaaaatgcggtagttttggatagatattgtagaatgtagtagatttagaaagggttttccaaaatgtggtagattcaacaaaatttctttttttttaaaaaaaaaaatctaccacattcgagagttgatactttgttagctttgctttgtattgataattttttttttttttttaattgataaaaagaaaactagatattgacattcggatttcggatcggatttgaatcgaagtttttcggattcagataatttggatgggaaagtttattatccattcggattttatgactattcggtttggatgatgttggattcagatcggttttaggaaaaaaaattggttaaattttacaaaaatttggttaaattttacaaaaaattgtataattgtaacaaatatgactaaattgttttggatatctaggttatttcggatattttttggtataaaattataactaaatataactaatattttttaaaattataactaaatatcataatatttttagaggtataattttattttgggttatcgaatatccgtttggtttttggttcgaatcagattcggttcgaataattcggatagaagaagtcattacccatttggagttttgtgattattcgatttggtttcaaaaccggatttttggatctgtttcatattgatttttggatttcggattttatgtctactcctaaaaaaacccatgtagttttcgttttaagtgtagaatttatcttttggttgtaagttatatctagtctatcttttgggacgtttggtttcccatgtttggattgtttgttgtaagtcctatgtacaactccatcttctatcgagaatcttttagaaggaaaaaaaaaactcgtatttacgaaatttgacagtagaaaacaaaaacctaagtacaattcaaattgacaaaaaaaaaaaaaaagtaaaaattcttaaaaggggactacagtaaaaattcatgttaaatctaactgctcgaacgttccagtttccaccacccggcgcgtgagtagtaccaccgtcgtcactttcacaatctcccaacagagatccttccc

SEQ ID NO: 1688 - DNA, 3000 bp, Unknown
  misc_feature (1)..( 3000): cDNA_ID_2142328_gDNA_ID_1620435_Annot_ID_157000 3000 nt of promoter + ATG
taataaaaacttgaccaactaaaccaaacaattagttaatctttttaaaaaatggtgtgttttacgcatgggtggaatcatttgtaattgaataattggcgtggttccaaacagaagccgtctcaaaaagttgtagtgtctttgtaaagtggatggatcattcatggtgtaccaaaaggaaatataattaattagagaacagtagtattattgactttgtcttacattaatgtagacaagaatgtcttacatctttctttcaactactacatacctttattttatatatttatttacatcattatgtagcgcacaatgcagaattttatttttattcttatttgtgttaattatcaactacgtacttttatttatacctattttaaattactatcaaatacagtacttttctttttttttgttaaacgggagaatcccataccgaaacctagactaatcccatatcgcagtagagcattagaattcttctaaccattggacctttattaaaaaaactccgatataacgttaccatgattcatacaggtggaaatatctagttgtttatacctgtatgaatcatggtaatgtcatatctgaaaacgacatattcaaatgtaatataaaccaacaatagagtactgattttgctttgtgtatatataaatcatattttcatttccaacagtatcatatcactaacatggctaaacgttttctccttcttcttcctcttttgtcaactattctacttctttccgtatccgttacagaatccgaagcttactccacaacaaagccgtgtcaaggctacaagccggataaattcacccacctccacttttacttccatgacgtcatctccggtgacaaacctaccgccgtcaaagttgcggaagcccgccgaacaaactcctccaacgtcaattttggcgtgattatgatcgctgatgatccgttgaccgaaggaccagacccgagctcaaaggaagtgggaagagctcaagggatgtacgcattgacagccatgaagaacataagcttcacaatggtctttaacttggcttttacggcgggagagtttaatggaagcaccgtcgcgatgtatggacggaatgagatattttcgaaggtgagagagatgccaattattggaggaaccggtgctttcaggtttgctagaggctatgcacaggccaagacttataaggttgttggtctagatgccgtggtcgagtataatgtcttcatttggcattaatcatttgcatattgtctaatgtctttccgaaacaaattgtttcactttggttttcttatattgtgttctgtttttgttgtgtcgtttaaagtttaaaaggtgtagttgtttgaactttgaacctagggaattggatcaaaaataaagttgggttttaatattgattaaaccaatattgggttcacggttttagtatatgaaaccattaaaaacaacgccatagctaatcaatttttaatacatttaaataaaaaactgtaccaataattattaagaccagctttgattcccattattaattcatattaaaaaaaatgtgaatgtaaatgctaaatttgatggaccttcatgaaaaaaaaaattctctctttccactaattaattcttctactatatattaacaagttagaccattttcaatgattgtctctattttttcttgtaaatacagagaaaaaatagaaatctctatttttactccaatggttcctaaaaatagaaatctttatgttagagataaaaatagagatgagttaaagatgcccttaagattcttctgatctattaaaacttttgtagaagcatgagacagcacacgaaagtggaaccttatagcaaaacgatcccaaaatagaccaatttcgtctctttttctcaaacctctgctatttatcttgactaagaattaaaatatttattaaaatgaaattgtttaggttttacaaaatttgttaaaacatggaagcaaaaaccatactcagaatttcaaccatcgacagaagtaacttcaccttttaccaaaaacaaaaaagaccatcgagagaagcaattcagctcacgagtcagatgaagtgataatcccaaggaagaggataaaagagaagtaacttgaccagaagaggataatcctggatttggagatagagatacataaatcgacgagtacagagagttctaaaagagaaaactcatatatccacatacataatattgtgagatctatatgtttcttgtgtgagaagtaaacactcaaagccctaaatctcaataacatgttaatacaacttaggatatgcttgtgaaacaatttcaaacataaaagaaaaacaacgatatagagtaatagagaggtaaaataatgatgtgaatgatttcctttacttgtatttttcgactttatgaagtgtttgtgttaattttcatattcacttacgttcaccggttcatataatatgtcgctcatataatatgtaatattgttccatattaacaatgaatttatacgatcttttttatttgtaagatagaacataagggtagattcttggtaaatgccaccaatgctttcagttgtgtgtttgacaaggcaacgcattcatggttttcaaatttcaatatttgattggatacaattttctctaatatctgtattttgatcgttttgggccttttggccaatagtgtaaaaagcttagccaggtcataggttagctgaggatatatctgtctacattcttattttagggtttagagaatatatagatgtttgtttgaggaagaagaaaccccaataaagccttaattatcacccattattagaatttgccttctaattctatctttttcttaaatccattattcttctcaacctaaaccttttttctctctcccttcatcttcaagcaaggggttccaattccggtaggaatgtattgaagaaagagagggtatagaaaatg

SEQ ID NO: 1689 - DNA, 1671 bp, Unknown
  misc_feature (1)..( 1671): cDNA_ID_3063736_gDNA_ID_1620435_Annot_ID_157005 3000 nt of promoter + ATG
cttttagtatttctataagtatttttggagtcactttttatgggtgggttaaaaacttaaaatgcatttgggtacatttgttaccgacccgttaatctattttgtttattaaatcttatttgggttgttcatataaaactcgactatttaaaaatataaatatttagaagatttggttaagatttaaaactatgaattttttatcatctttattaagaaaaattgtgcatatattatgattcaaaattgtaaaaacggacatatattatctagttgatgaaaatgtgtaagtttaacgtcttacattggttaaaaaatttagacaataaagagttttttagcatgacgggtttggcaaaatgttagttaataacaattataaactatccaatataaatattttataaataaatacagtttgaaattttttatatatattaagtttaaaaaataaatcatattgcaattaaaatctagttaagagtaaaaaaaatatagttaagagtaaaataaatcaaatattgcaattcaatctttcttttggaagaagcgatttgcgcattaaacgtaactttatcagcaactgacaccgaacgacataatatattatggacgaccaatagaccaaaattcagaggtctagttttttcttataagaattaattaaataatcacacacgatcttcgtaaattagggagtgtatccaaacacacatttggaatgatatgttctaaagtatcatgtgttattcaatcatgtgtttaaaaactcttttaaattcaaaatcaaattattgaaaacaattattttaagaacaggtttgattgttaatgattttaatgtgttttagaagatttctcgaacttatatatataaataagtacagtatatatttatataaatcatatgatgcggtatggtaggaacatatcggattaatgaataaaaattatttgattgcattctacattttaagaaatttgaaaggattttaaagtcttttgtgatttaaattaattttgcatatatagttactataagaaaattcaggatattatacttagtgttggtcatagatcggataatcgaaatttaaagatatctgatctgtttttaaataatccgaatctagatctgaaatcaaggatatccggatgtaatccaaggtttaattatatatgtgatcggttattgtcgtctaaccttttaaaaaaaagcctatgaaatatgtaaataattgtttgggaaaattttgctcctttagttctaatctaaaaaatgctcccctaaactaattacagaatatgacgtagtaaatataggatactagaaatttataaaaagataaataatatgaagagaatccaatgcaatgcacttgtcccacaaaccaaaccatgcatggcgaattggtgattgaagacttttcactgaataatactaccaaaacttcgagactcataagtgatacacacaactaagtcgtcgatggctataagctttaagtctatcgctagactgtccacaggtttcctaatcttctttgtcttttagcctttctatattatccaacatatctttaaatttctttaattgacatctccctagcctatataaaggcataagcatgagtggcactgataagcaaaataagagggaatattaagatg

SEQ ID NO: 1690 - DNA, 3000 bp, Unknown
  misc_feature (1)..( 3000): cDNA_ID_3063740_gDNA_ID_1620435_Annot_ID_157004 3000 nt of promoter + ATG
caattatttttaatttatacgtttaatattcaattattttttgttgaaagattaatacataaagtaataaaactgtgtaatttaatatccaaaccattaactgttgttattttcattctcacgatcttacaacaaaaataaaatttcaattttacctttaccatctcaattttttctagaggtggatctatcagtccaaccgtctatgtctctccagggaattcacgaatcgatcgatccagaggtggatcgatcgatcccaccgtatatgtctgaaacgttgaagtacggaccgatcggtccaaccgtctatggccgatttgttgtagcctggaccaatcggtttaccccgtcttctctccgcttcagcttttctcgttctttctcgacccgaataaactcaaaactatctaatccattcacaagtacctaaaacctgcaaaagactcaagacttgatcaaaaagacgtaaaaacggactacgacatgataaatgactcaaaacgaaggttagacaagagatctaagacaccaaaaacgcaacatatcaatagtcttatcacttatgttaccatgaaataaacatataatgtagttacaaacttacaatgttttttagatgattactaatgtactggaatttgtatatcacaattcttttaagttattcaaggcactagtggagaaagattcaaggcactattggagaatgcttttctctcaaatttggctcattttatattgacaatggaggcaagtatctagcactggcaaacttccttgcatatcacggcatcaaccattacaaaacaccaccacacactccgaagcataatggtttttctgaaagaaagcatcgtcatatcctagagacatgcttgtctttacttattcacgcttccatgcccgtcaaagacgatgcttaaacaagttctgcaagcatgtatcgacgagctggggcagtttcttctcagtgttgggtttagtcttatctccgcaaggttcagatttaaagatgttcttaccaaggctttaccacggacgcagtttcatcttctctttgacaagattagactcacaaatggtggttcatcttgagggggcatataatgatatattatatatcttcatcttactattcctgtgtacattttcctttcctctagatataccctatgcacacctcaccaaaaaaattataaccacttatattatacgaatgccaaatctcgatataacaatttaattaaagtaataaatgttaatgaatttaggacatttcaaccatatatttactctatcaccaatatctacatcttacttgccccatactcacccttaattagtacgaacagaaatttcaagtaactacgagactctcacacatctgacatcttaattctcaaaatattcagacaaacaacaccttttgaactttaaacgatccacaacaaaaacagaacaattgttatatatatatatatatatatatatataaaagaaccaaaaacaatataagaaaaccaaagtgaaacaatttgtttcggaaagacattagacaatatgcaaatgattaatgccaaatgaagacattatactcgaccacggcatctagaccaacaatcttataagtcttgggcagtgcatagcctctagcaaacctgaaagcaccagttcctccaataatcggcaactctctcaccttcgaaaatatatcattccgtccatacaccgcgatggtgcttccattaaactctcctgccgtgaaaacatagttaaagaccattgtgaagactatgtccttcatggctgttgatgcgtacatcccctgagctcttcccacttcctttgagctcgggtctggtccttcggtcaacggatcatcagcgatcataatcacgccaaacttgacgttgagggtggttgttgggcgggcttcggcaactttgacggcggtaggtttgtcaccggagatgacgtcatggaagtagaagtggaggtgggtgaatttctccggcttgtagccttgatacggcgttgttgtggagtaagctgtgacggacacggcaagaagaagaatagatgacaaaagaggaagaagaagcagaaaacgtttagccatgttcgttgtttgtagctatggaaatgtgaaaatgtgatttatatatatacacaaaacatgatcgttacgcaattgttggctcataaaacatttgaatatgtcgtttctcgattggtgacaacaacatgtccgttgacgtggaagtaaactaggtggttcgatttataaacaactagatatttccacttgtacgaatcatgatataaactggcaaatatataaggatgcacgacgaaagaaaaacaaaacaaataagaataaaacaagattctgcattgtgatacactacatataaatatataaagaaagatatatagtagatgcatataattgaaattaagatcaaagatgtacatagacattgatgtttaaatttaggattgtcaatctgtatatatgtacctaagatatatattaatatatacatatggttccaaactcaataccagtgttctctaattaatgatcttatattttgtacactgaattaatcatccactgagtcccaaaagaggagggcataggtgcgacgggctagagttaaatcataaaatagattaaaaacaatacatgatatttgaaacaatgatcaatgacaagactttagttttcttgcaaaaagtatataacttattttagaaactccttgaattttgttataaaacaaaattggtagttgcataatttttttttttcaaaaaataaaacaacgatcaagaattttggtagttgcataattttgaagtacagttgtgctagttactcaattaaacttaaaatatattatatcaattgtttggaataacattcatctttcgtcttctcagtttacttggaatgcacgagagctttctcgttgtgagaataactcttgggtc

SEQ ID NO: 1691 - DNA, 3000 bp, Unknown
  misc_feature (1)..( 3000): cDNA_ID_2142267_gDNA_ID_1620435_Annot_ID_156987 3000 nt of promoter + ATG
aataatgtgaatcaatatcattgttctagcataataaaactgtagatttacaaacgtcaaacgatatgaaatgttttaccgacctctaccaaaaaatgagtgatgtgagaatatacgcgcgttatcggttgtttctcactcacctagtgacattggtcgagcggcaaatggtggtgatgactggcctcttttacgactcgcagttttagattttagtccccttaattgggtattctcagttatggggagacatataaacacattttgtatgttttgacaaattcagaatatcaaaacaagacacgtttattatgaagtgtgttaaataatacaaatagattagatgagacacaaatatacaaaggaataagaatctctcacaaaaataataattgaatgaataaaattttgaggagggaaggaagatgtcccaatcccatatatatcatctcaacgcatcatcaaaacaaactcgtcaaagctgagaactccatcgtcattctgatcaaacccacgaatcataaccttacaagcatcaaccgtacacgactcgccgagtcgactcaacgtcctccgtaaactcgccgccgtaataaactcttccccctccataacatacatcccaaacgcttctttcaactccttcctcctttcttcatcactaccatcttccccttccataagcttcaaaaactcctcaaaatctataaacccgtctccgtcaacgtctgatgtcttcaccacttcctccacctcacgtgacgataacgcgccgcctaagagactaacgcagctttgtagctcttcaccggagattttcccgtctgagtttgcatccatatagtcaaaaacggttcttagctcgttaacgtttaacgagctgcttccgctactattactgctcgttcttgattcgtcttcaaggtttcttgacgattctgatctcttcgaggaaactttcttgtatagtcgtgacaatgatgatttttggttcttagcgagagtcatttcttgatttgaatatgaatctagaagatttgggaaatggatttctgatgcaaattcttttcaagaagtggtagattatatatagatgagtatgtgaatgcgtgtaatggtggagagattcttgattgttcgacggttaaaacacgggtttgaatattttggtgttattatttaaagctagaggcggttgcgcggcggtggccgggaagtttcctccgcaatgagtgtttgtggggaaaggtcaagttgaccacgactaggggtgttttcgtaataatgtgatggtaagtttttctcacgtattgtgtgaaatgtgatgtcatatcgacgactagattaagaaaagtagcaaaccttctctttgactttgattgagtatacgatgtgcggacacgtggttttggtcttttaaattgttaaactgtcatgaagtttcatataaccgtccagatatgctccacgaaagtggtatgacttcctctgttcctagaaacttgaattaaaaataaaatatttcatgtgatgaagtttcatctaactgttacattcccggtcctgaattccctttccataagaaaatatatttctatatggaccaaaagagagttttatttttatctttttgcatctcaaatgccaacttcatgtaaaagcttttactgatgtatagttcggctttctaagctcgacggtttaactcggcccagcatatattgttcaaacaattcagttattctttgaaacttctccccgtaattatcgagctcaaagattatttaacaaaaacatctctgtttccccccataaaatctccttataaatacttaatttgatcctaatatcaacaaaatgttagactttaatctatatcttcaattcttgatgaaatgaatttccatgatgcggtgctggcatatcgtgaccttacttaattcacattaattaaactttctgagcaaatagtttaaattgttggtatcaaatctcacaaataaacttactatgaaaaactcatgatcgccaaagtgaaaatagtatagaaagcctagtttagagtgacaaacacttgaaatcctaaacaatcgatcttgtaaccactattgcacatcaccacaaaacacacattatctgacgaaagctaatcacattcaaatgattaaaccaaaataacagaatctaaacattaattaacttaatattcgagatacaacgagacctatacgagtttgaatgaaagacaattttcttgtctactatatgtacaagaaaaaatagagatcatacaaatagcttttcttctaactatcgaaatcaatattcttataattaggcatgaatcctttaaaaatttaggggtcatgtaacacttaacataagcaaatatatgaatgcataaaattattaacttttcgatcatttttttaaaaaattataattttcgcaacgtatttaaaccaaatttcacaaaattacatcaattttttttttagattgctatctaagcccttaaccgaaatacctaaacctaattgaaccgatcagttcaaagttgccagcagataaacaatgttttcatgtccgactcatactccatagtcgaacgattaacccaagaaacatatttccagtgaaggtttagtcttaaatctaccaatataaccagaaaaatccagaaaaaacttgccattaactaccgcatgatcaaccggttaaaacttctgggtgaaaatctttccaaaatattgagattttgacttcaaaccctttgctacaaatagaaggtttgattttggaattaaaatatatagtttgtattaaaaaagaaagaaacattaatatactcatataaaaagagtttaacaaaataaaaatcaggaaggagaagacaataaacgtagctaacctcatctccctcttcttttttttttgttctttaatagtttccgtctctctttttctcctccacctctcctttgtcctcaatagccgacg

SEQ ID NO: 1692 - DNA, 3000 bp, Unknown
  misc_feature (1)..( 3000): cDNA_ID_2142259_gDNA_ID_1620435_Annot_ID_156985 3000 nt of promoter + ATG
tgattagctttcgtcagataatgtgtgttttgtggtgatgtgcaatagtggttacaagatcgattgtttaggatttcaagtgtttgtcactctaaactaggctttctatactattttcactttggcgatcatgagtttttcatagtaagtttatttgtgagatttgataccaacaatttaaactatttgctcagaaagtttaattaatgtgaattaagtaaggtcacgatatgccagcaccgcatcatggaaattcatttcatcaagaattgaagatatagattaaagtctaacattttgttgatattaggatcaaattaagtatttataaggagattttatggggggaaacagagatgtttttgttaaataatctttgagctcgataattacggggagaagtttcaaagaataactgaattgtttgaacaatatatgctgggccgagttaaaccgtcgagcttagaaagccgaactatacatcagtaaaagcttttacatgaagttggcatttgagatgcaaaaagataaaaataaaactctcttttggtccatatagaaatatattttcttatggaaagggaattcaggaccgggaatgtaacagttagatgaaacttcatcacatgaaatattttatttttaattcaagtttctaggaacagaggaagtcataccactttcgtggagcatatctggacggttatatgaaacttcatgacagtttaacaatttaaaagaccaaaaccacgtgtccgcacatcgtatactcaatcaaagtcaaagagaaggtttgctacttttcttaatctagtcgtcgatatgacatcacatttcacacaatacgtgagaaaaacttaccatcacattattacgaaaacacccctagtcgtggtcaacttgacctttccccacaaacactcattgcggaggaaacttcccggccaccgccgcgcaaccgcctctagctttaaataataacaccaaaatattcaaacccgtgttttaaccgtcgaacaatcaagaatctctccaccattacacgcattcacatactcatctatatataatctaccacttcttgaaaagaatttgcatcagaaatccatttcccaaatcttctagattcatattcaaatcaagaaatgactctcgctaagaaccaaaaatcatcattgtcacgactatacaagaaagtttcctcgaagagatcagaatcgtcaagaaaccttgaagacgaatcaagaacgagcagtaatagtagcggaagcagctcgttaaacgttaacgagctaagaaccgtttttgactatatggatgcaaactcagacgggaaaatctccggtgaagagctacaaagctgcgttagtctcttaggcggcgcgttatcgtcacgtgaggtggaggaagtggtgaagacatcagacgttgacggagacgggtttatagattttgaggagtttttgaagcttatggaaggggaagatggtagtgatgaagaaaggaggaaggagttgaaagaagcgtttgggatgtatgttatggagggggaagagtttattacggcggcgagtttacggaggacgttgagtcgactcggcgagtcgtgtacggttgatgcttgtaaggttatgattcgtgggtttgatcagaatgacgatggagttctcagctttgacgagtttgttttgatgatgcgttgagatgatatatatgggattgggacatcttccttccctcctcaaaattttattcattcaattattatttttgtgagagattcttattcctttgtatatttgtgtctcatctaatctatttgtattatttaacacacttcataataaacgtgtcttgttttgatattctgaatttgtcaaaacatacaaaatgtgtttatatgtctccccataactgagaatacccaattaaggggactaaaatctaaaactgcgagtcgtaaaagaggccagtcatcaccaccatttgccgctcgaccaatgtcactaggtgagtgagaaacaaccgataacgcgcgtatattctcacatcactcattttttggtagaggtcggtaaaacatttcatatcgtttgacgtttgtaaatctacagttttattatgctagaacaatgatattgattcacattattggatgtttctataattacagttacaaacagatacataattattgcaccaattcactttttctattcaataagagataatattgtttgtaaaccttttaactaaaacgatccgcttcgaaacttgtttcttaatgtctaaaacaatattacacttcacaattttgccatccgtagaagtctctagtgtaaaaaattctgaatttgcatggttccggggaaattttatacaatctagaaaattggaataaaattttcataaaattatttttttggtcggataaagttttcatagaagaacacatattaaatggatttatcatcacatagtagtagataaacaatttaaattatgtaatacaaatcaaaatgaattaatctatttgccacatatagtgaatttgatttctattcaaaggggaaaatacaaattcatttttaatatgtagtagatatttgtttctcaagtaattaatattcatatttaaaaaatcattgcatatgttaaacaaatctacaaaaaaattcaatggtcattccataattataaataatacggatatttcacaaattcactttttgtttggaacccagaaaaaagattcataaaaccaggcaatagaaatttcatctgaagaaaagaaaaagtaaagctattaaaaatcaaagccacgagaagaaagtagaaaaagttacagtctctgtctatcaaaatcccaacggtaactgaaaatcgccggaaccgaatctgcggcgagccaaaacttgtggatcttttaatgaaaacttgaagattcctctttccacggttgcttctagggttttctcttcgattcaccacatcgtcatg

SEQ ID NO: 1693 - DNA, 3000 bp, Unknown
  misc_feature (1)..( 3000): cDNA_ID_3063794_gDNA_ID_1620436_Annot_ID_157021 3000 nt of promoter + ATG
agaagtaaagcctgtaaaacggtgtgttattgtctttattgtctctagaaatgtagacaaaactctctatttttataacatgattaaacctactcaacaaaagttagtggccactaacatgaattctttttcttactataatccttttctatctttcggttttaggtcaaccacttttcagtggattttagctttttgagaatctctgtcttatccaagattctcttcttcttcttcatttttcaattctttctttttaaaattcttatccgctggatgactacattggttgaatgaattaatggagactcagtatcgttttttgcgtttaaattagtctaaagctttgttgtattatattaaagcactagaatgaaaagactatgtgtactaactaactaatcaagtatatatataatgcaaaagtataactacatttttctttttagaagaatgtggaattttaacattgcattacacacgtatcttatgtacattcgatatttcgatccttaccaaaattcagtaaaacgaaacaacaacaaaaatctaactttaagtttaaacgacatattaaaaaggtttatatatttcaattcgtttaaatataagtaacctgctgttttaaaaaaaaaagtaacctaaaatgtgttttgatgtaaaattaaagtttttaaacaaaacacaaaaaatctgaatgacataaaaaaataatccaccaaaacagttatgagtaagttaaatgatataacaccattctttctgtcatttctattttatttgagttaccatgcaaagccttacattgagaaagagatatagaatgatcaagtacatttctcattgtcatttgattgaaaatataaaattcaaaaaaccttacatcaaaacaatagaaagtggaatgtatagctatctatgtggaaagtggaatgaaactttgaagattaaagaatgtaaaagaatcatagaaagaaataaaaaatagtttatcaaatgggatctcgatagatataatctaaacttcttctcccaactttttctctcgttgtttcccatgataaaaagctttaagacatttgcaccaaaaagatctcaaattcacgttcacatagaaaaattaacaagaggcagaaggaaaaaaaatgtggaggtcattcgcaaggtaaacacactcgcaagacatacgtctaatctcttctttattatctaattatagaattagtctccatctcaatttcttctccgtggcttttctctgcagaagcttcaaactcattaatgtaccaaatggtttgatatccaagccaattcgctctactctcctctattcaacttcttcaaggtcgatcctacatatataaatactataacgagattcgatcttttaatcttaattaaaactcacaaaaaccctcttaacattttttgcttcgactatatgtatagaaagttagaaggaaaagtagcggtcataaccggcggggcaagcggaatagggaaggccacagcggaggaatttgtgagccaaggtgcgcaagtgattatcgtagatatagatgaagaggctggtcatatggtcgcgaccgaacttggctcagccgcacatttcttaagatgtgatgtcactgaggaggaacaaatcgctaaggccgtggagaccgccgtgactcgtcatgggaagctcgacgtaatgctcaatagtgcgggaatatcatgtaagaacatattaaacaattataatgaatttattttaaactaaatatatgtatactaatacatcatatataagatttaaaaaataaaacattacttctataattctacatatacatatctttatataaataaattgcttatgtatacaatgcaggctccatatcaccaccaagcatagcggacctagacatggacacttacgacaaagtgatgcgtctcaacgtgcgaggtactgtcttagggataaagcacgcggctcgagccatgatccccgctggctcgggctccatcctctgcctctctagcatcagcggcttgatgggtggtctaggcccacacgcatactcaatctctaaattcacaatcccgggtgtggtcaagacggttgcgagcgagctgtgtaagcacggactaagaatcaattgtatatcgcccgcaggcatcccgacgcctctaactttgaggatgtttcgagaggcgtttgcgggtcatagcattcgggaggaacaacttttggcgattgtgaacgcgacgggagaactaaagggagagaagtgtgaggagatagatgtggctaaagcggctttgtatttggcatcggatgatgctaagtttgtgacggggcataaccttgttgttgatggtggatttacttgtttcaagtctcttaatctcccttctgcttaattaatttatcaagttagttaaagttttttttttttttttagttttctgatgtggttattacgagtgttttggccttttgggtcattgctgatgtgatcgtttgtaatctatgggacattatatggttggaatttggaattataaatttagcctctctgtggagtttcgacatttcactagtatagttgattatatcagtcaacttagtattagataatcattatgtgtattgtgtaattctaagtgattcattgtttctgatgatttacgtaaagcttatcagaggtttcaaaacatattgcaagcagagttatctatcgtggcctcaggtgttgtaagaatagcttgtccatcagataacatgtatgtagaaccgttagttgtggtctatttaaaactttttaaatactttctttgagatagatgtatttctcctaaatcacatatgtttcttagttatggtcaaatatagaatattaaaatattgtacctaatagtgacactagtcactagagttaggtgccactacaccaagctcttctgactttgtatccatcaatactagaaactcttttgatctcaacaagcagtctt

SEQ ID NO: 1694 - DNA, 2652 bp, Unknown
  misc_feature (1)..( 2652): cDNA_ID_2142601_gDNA_ID_1620436_Annot_ID_157039 3000 nt of promoter + ATG
catttgtgaaatagtaaaaaaaactcaagactcggcaccatcttccaaagaaacctccatcgtttagccaaaacactcactgcgaccacttcttttgttggaagtaaagataatatctgcagaagcaaagcttcaggtaactgactgatcctatcctcattgctcaaactctgaccacaacttttgctgtgaaacaaaaagccccaaaactcaataaacgaaataacactaacttagtttggagcttacagtgtaaaaaaccataaggacaattcatagacctaatcactcattgctcaaactttcaccacagcgtttactaacttagtttggaacttcagtgtaaaaaatcctaagaacagttcataagaaataagcacacatagaggaaacataccatcgtttcattgtcatcgaaagcaatcgaattgcaataagatctcctattgaattattattccttcccgagtactatcgcatttacaaacgctatttcaatccccttcaaaacgcagatgcatcgcaacactccaaacgctagctcttcgatagagaataaatcaattcctagtgatcttcaaatccagctgagttaagggaggacgaagtagttcgagggctgtgaaaatcgacggcggtggagacaaaaaaacacggctgaggttagggtttcagaaaataatgaagcggaggcggaatgtgaaaaatgaagacgatatcggccaaaattaatccacttgcgtctttaaaccggatttatatttccggttcgaaatcatactgtttacttgtgccgatttttggtctcattttggtaatttgtatttaattgcagtaacttactaagtagaaactaatgagcttgagtagttgtaaattaggagaattatcaagcatgagcgtaactgcgtaagtagattccaccaaacagacttggtcttaagtatatggattatcaaagctccatttttcaatgatcatattggggtatcgggcaaagtaaagaaatattcaatcaccattatccacatcacattatcctgaaactctcataagtttcatacatgtctacactctataacaacacggttaaaaacttgatttgcatacaaaaaggtcaggtaacactattgtggttataactaacacttgacaccattgttgttgtaaagctctttttcaatcatttagtcccattctgtaggcaaaaaattgtattagcaaagaactctcatattgattatgtacaagaacatctataaatgtaggtcttcttttacatttaaattatcaatatcactatcaacatctaaaaaaaactgtatcagttttgtttactatattttgcaccattaaatacgcatctaatcagagtttgttattgtgcctttagaagtttttctcaaataacaaatatggatccggtatcattaggctttgatggaaaactctcgtacatcatatagtgaaaaaacagtatttaatcatttaattatcatgatactgacaattttagagtaaaatatacttggttatttttaaatatttagtattttaatttttatgtaacttttattaattattagaatttttatgtatataaatttacatctcatacaattttagatatttaaaacataataagaatttattaaattaatcaagtattgtagtaaaaccattatttgtgtttaaatttcgtcaaatttgtatattcttatctccttagtttagttaatgagctcccaaaactccacgacatatgttttataaattttaattacctgtatcttttaaaaacgaaattcatggttaaccgtactaatatgttggcaaatgttttagagaaaaatgaaattttgtcttgatagtaatcagactatggtaaaaaaaagaaagaagaatgtactatagatgtaaacaaagttgttataggaacatgttcattgcatattacaaaccaaatattaaagagtgtagatttgaagcttaaactagcaataaacatactagtttgatattaatatctaaaatagatttgaagcttaaattttcttgaccaacgaacagattatttggactttaattaactcaggggatattaaatatctaatgcaattaaatacaacttttgttttgattcaaaagaaacaattaataacttgtcaaaaaaaaaagggaagagatgtttgaccctcccactggcggtcaaacccaaataatgataatcactttctttccctgtcatcaatctttgacttttgactcttccttatcatccgttacgatttcgccacgtgtattttcatctctcttcatataaatacttaacgccgttggatcatccttcgttgcttgctgttatctgggttccgtctccgtctctctctgtttcttcgatctgtttttttttgaccaaagaaactttttttttttggtcttccttattctttcttcaatgtcgttgaacatatctgacgatacttgaatctcactctttcttctcttctattctctgtttttagtcacaatttcatctatatctcctctcacttttgtttttgagaattttcgatcccaagcttttctcagagaattttgactggaaatttcgtaattagggtttttgatttgaggcattattctacgatg

SEQ ID NO: 1695 - DNA, 3000 bp, Unknown
  misc_feature (1)..( 3000): cDNA_ID_2142598_gDNA_ID_1620436_Annot_ID_157038 3000 nt of promoter + ATG
ggatatgaagcaacaatgcgacgggaagaggtttattacttttctaacactggagtttttattttatagtttagataaagtttccttcaacaacttctttacctgtaaactctcaggaatgtgtatgagatgtcgctagtgaaagagaaaggaaggcctaaaagcagtaaaggagagagacatattcctcctgagtctcgacctgcttacagtgagtttcatgatgaagccacaatgtgcatttttcgattgaaatcgcttaaagaaggacaagctcgtagtctcctaatacaagcagtccgtcaccacactgctcaggtaaagcttatgttcaaatttcgtctgtttgtttcatttctcatgaactttggtgatcgtctgttgtgtttctgacggttctttcttatgattctttatagatgcgtttgtttcacactggactgaaatcgctcgaggcagttgagcgtcatgtaaaagttgctgtagagaaacaacacattgactgtgatctatctgttcatgggaacgagatggaagctagcgaggatgatgatgatgatggccgatacatgaatagagaaggagaactcagttttgattacagaacaaatgagcagaaggtagaagcttcttctctctctacaccatgggccacaaaggtaagttgatttgacggtaaagcgataaatacacacattacctataaaacttgttcttatgctcttctctttttatctagatggatgatacagacctctcgtttcctcgcccttctacaacaagaccagcagcggtatgtttttttccaatatttgtgtaccaaatgctctcaactgcgattaatcgggttgatgagagtctagtgtgataagtattttacttctctcttgcacaggtaaatgctgatcatagagaagaatatccagtttcaacccgcgataagtatttgagcagccattcagctccgttgttcccagaaaagaaacctgatgtatcagagaggttgagacaggcgaatccatcttttaatgcctacgtattaccaacaccaaatgattcaaggtactcaaaaccggtttcccaagcattaaatccgaggccaacaaaccacagtgccggaaacatatggcattcatctccgttagagccgataaaaagcgggaaagatgggaaagacgccgaaagcaacagcttctacggccgcctccctcggccttctacaacagacacgcatcatcatcagcagcaagcagcaggaagacatgcattttctggacctctcagaccgtcctcaacaaaacccatcaccatggctgacagttattcaggcgctttttgtcctctgccgactcctccagtactccaatctcaccctcattcatcatcttctccaagagtctcccctaccgcttcacctcctcctgcttcttccccaaggctcaacgagcttcacgagcttccaagacccccaggccactttgcaccacctccaagacgagccaagtcccctggtctggttggtcactcagcgcctctaaccgcatggaaccaagaaagaagcactgtcactgttgctgttccgtccgccaccaacattgtggcctcgccgcttccggttcctccgttggttgtccctagaagctactctataccttcaagaaaccagagagttgtttctcaacggctggtcgaaaggagagatgatatagtagcatccccaccgttaacaccaatgagcctgtctaggccacttcctcaagccacaggagttgctcagaccagtcaaatcagaggtataatcgattctttcaaactcattttatgcgtttacgtgaaataatcttacagaaaaagaatgatatttttgaaacataaaagcatgttcagttttccataaaacacaaatgaaatgttcttgtttaacttttgtttgcgtttggcgtttagaatgacactttcaatctacacgcaaacgcaaacgactcgaaaatgtaactgcatgaagtatttttaaaatgtaattgcatgattcataaatggaatttgtttgctgtggatttattgaaacctccataggttattaatcatgcaggagtaggaaagctgatcgaacgatgaggcttccgcgtctgcgtcacgtttgaccaaaacgctgattgtacaaattcagagatcttcacaagtgaatatagaagtcagtatatgtattattctttagttggttaatctccttttttttttcccattgtaaatctgaagcctctgctctttattcccttttcattttcaatcccctcaatttttcttctttcatccccttctatatccgaaacctcaaaataaaattttcaaaaatgcaaaagtatataacgtatgaaactaagtctatgtctgtccatttccgttgtcgggatgggaaggcccccaaagtgcgtttaagatagcgtaaaaccgtctaatacaaaatgcatagttccaacgcgtaaaaaggtaacttctatagtttaaacgtcatctcgacatctaggatttgcggattagaccgcttttatttatcgttcacaaatttcagtctgtagcacgatcgagaaaaataaaagaaatctgccgcgatggattgatgttcaccttaagaataagatggcctaattcgttagctgtttagactacttttactataacattcattcaaatcccagtggttttaggcgatcacctacacctatttgaaaagaaacggatgtaaaacgagaaaatcaggatggataagcaatggagaggttttccctccctcttaaatttatttatgcagaataacaaaaattaagtctataaatttattttaattttttatttgatatatatatatatttttaaaatttatttcttaataaaatttccacaaacatatgataaaagaaattaatacgtggcggatatcttgggactagaggaaggagggagagaaggagcttaagagagcattcgtcgtcgtcaatg

SEQ ID NO: 1696 - DNA, 3000 bp, Unknown
  misc_feature (1)..( 3000): cDNA_ID_2142560_gDNA_ID_1620436_Annot_ID_157030 3000 nt of promoter + ATG
tctctcaatgatttttcttgtcatgtccatcttattttgaatgaaggtaaacgtctgagatgagagagaagaacatataaggatagccaaggagactgcctgatgtcttttgatgagtaaaatggtcattgcttgatataacttatagtcacttgtcaaacatgacactaacccattttactcaaagaaacaggcaagtcatccttggctaccaaatatgattcttctattcatctttgacttctccttctaaataatgtatacactcactttcatatactataacaaaaacttttgaaaccaactgcgaaaatttgacatttttgaaatttaacactttaacaaagaatgaaagtttctgaagtgtaaattttatagtgattttgaagacagaaagaaaagtaggtataacatggatggaaaaagcatgtcaagatagccaaagagactgcctgaaacctaacccgcaagattcaacatgatatttgacctattatactttaaaaggtataataatccaaaatgcatgaatttgaaattgaatcgtggaggcgaaaaagatcaggcaagtcatccttggctactaaacatgacgctttccgccatgttagacctctcttcttcatcatacacttcattactctctatatgtttttgccttattccatacatgcatgtgctctctttttataaccctcgagactcgagagttgagaaggaatatatgcctatcatatcgatttctaaaattatctcttttctttttgcatgggataaatgtagtcaactttatattctccatcacgggaatatgctccttcatatatcggacaatttttcgggtcactaacataatcttcttgtcggttcattcactaaattgtatcgtttttcattggtgggtttaagagttaatatatatatataacgttctcgatcatcttagatgttgtatattatatatacacacatatataaacaattaaatgcaactttagacgtgtttagttcattctgtctgaaagaattgtttaaattttatgaatccgaacatattttgaaatataataacgttaagttttgatataattatgaaatatctatatagatgcataggtagtttaaaagctcaatgatatactatagacttaatattaaaaacgacatttcaactaatatatacacacgtgactcattgtggttgataaaatgttccaatttatttagtggttattaacttattattctcactactttgcatacgttttctttgtactttttgtactacaattcaaattacacgtagctaatcgaatacatattcggtcccttttaccctagtgccatgtgtaaaattatgttccttaaattgatgcttccgccttatggtatgctcaagtgactcaagtggttctcgactatttctctaatttaaaatgaaagtttatttttccttaaaaatccaaattaggaaatttgtgtgatatgttacatttttatcatataaccactattgggtataaaaaggtttgaccattacattaaagaagagtcataatactttttggcatattttttttaggacattgtggaatctcatttgaaagtcttcgattctcttttctgtcatccgatccatatctttttcatttccaattgttgagatttgatttggttcgaatgtcatcatcttgtcgttgcaataaaagtttacacaaatattattcactggtacgactgaggatatattgtgggctaatttttgaattgggctaaagcctcacatgtgattaattttgagttgggctaaaacctatcacataattgttagttatttatgttaaaatagaggttgctctctctcactattcatacatttctcagcattttggctaagatcaagtatagtatctgattttatcaatttaatatctgatatatggactattggttcacatgatacgctatttttaagttagaaactcacattaaaatagcttatctgagttttcacaagtggtctaagcgttgcttatattattgcacggatatggctcattcccaccaccaaatatagtccaaatttttatgtaaatgcaaagacatgggatttggtggtcttagacaacttgtctccaatctccctccatctgagttttgtttttgaattttctctaactatgttagaaagatttgtagtgatgaaactctatcatatatccaacacttcccctaaaattcctttgtttccgtttctgcataattccagttacacacaaagtgcatgcttccatcaagtaattctaagaaaaaaaacatttgttcacaaactatgtcctttcatttttggatggtatagtatatatgggacaacaagtaactagcttttttggagtgtcttgttcaaatttttgacatatagatttgtttgtatactactatatttcatttaactgcatgttttaataaagaaacggatctttgatacatataggtagttttctaaaatcatttggatcttgtgtcatatcgatttatttgtacgtgagatttggctcaccttgccgattaaagttcaactaacgttttgtaaattttattttgtttatagaaattcagaagaggaaacttgcacgtctaaatttgtatataaattataaaaagagccaaaatgtcactgttgttggtgtttataacctctcttacatacaagtcgcaagacaagaggtggtaaatgtggacttttattctaactaattaaatacagaaagatggaaagacaactttctcaattactctctcaaacacaaatttgattctaactaaattaaagttcaactaaagttagtttgtaaattgtattttaggttatacttaattgtactactttttcaaaaaataaaaaacaactatgtttttattttccgcgcatctttgcttggacgagtttgtcgtgttcttattataaacaaatagaaaaacggcaaaagtctcacacaa

SEQ ID NO: 1697 - DNA, 3000 bp, Unknown
  misc_feature (1)..( 3000): cDNA_ID_2142564_gDNA_ID_1620436_Annot_ID_157031 3000 nt of promoter + ATG
tacagacaattgttgccaaggatgatgtatcaagcctcacatggttggtcttgtgaaatcccaacgtttgatctctaacttatactgtggctatatatgttatagacatctaatcatatgatgtttagaggttctaagattctttagagatctaaagatcttttatttgttcatcgaaaataagacaagattatttaactgaatgtacatgacatgaatctatctattactttcgtaagattacaagtttttatttatgttttgaatgtaatgttaaactagactcaaataaatattaccacaaatctgacattcttttgaaaaatctggcatgctttggaaaatatggcattcttatatcaagtgtgagatattcttttgaaaaatctgacatcttttgaaaaatatgacatgattacatcaagtgtgactgtgacattctttagaaatatatgtgacataactcttttgaaaaatctgacattcttttgaaaaatatgtatcataagtttttttagtacaccaagtgtgacatatattcttttgaaaagtctgaaaatattctaagaatttgagactttagtttccagagtcaaaccaaacttggaggcctttacatgcatctcttatcaccagtcgctcggatttatgaaagttataatgaatgcagtcgtatgtaatctttctttaggatcaaacaacaatttcaattactctgtctaaaattcttgatttacatgcgatcaaggtatactgtatataggtaatttgttaaaaatgcaaaactcacaaccgaagaagatttatgttattttggttcttaaagtacgtagatagttttctaaaatcaaattaaaaatctaagaaaatatacaacgttaagaaagaaaaaacaaagacacacacacacatacatgtgaacaccctcccgattggagttaaaactaatttaagtttcgaaattaaaacaagatccaaaaggtcactgttgttgcggtctttacatccaaaaaatgtatttatttgtgctctactcttttaaatacaacaggaggtgtgcaatatggactttctcaattatgttgtatcctacctatataatgaaataaaatccaacggaagaaggccattaattctcctccacgtgcgttatgtcttttatttgttttctatggggctctattatgtttggtcagcgcaacctaattattatttttttgtatcatcaaacagttgtgtttttattcttccacgatagttcaatcttgttttgtgtttttattcatcaaagattcaattatcttttaaacacctaattttcatacaaaatataacttttttttttataagatgataagacttttggtattccttctattataattgtgattccactcttgtgtattgtaatttaaaaacttaaaattttatattttagactaatatatcgtcaatattaaccacttcaaatatttattataaaatctacttcggcattttcaaacgtacccacttccgattctatgcagtttaacttattacactaatttttattttgatgtgtttttatttattatgaaattattacaataatctagtaaagttaaattataattcaccaaaagtttgcggttgccaaatattcttcattattattatttttcatatctcaaacaaagtagttatgcaaccttgcttaaaatatatgatcccataaattttcaaaaccggttttatatgcaaagtacatgtcaaaacgttatcttatttacatccatttactaatcaaatatctattttaccacaaaaggtgtgttttataccctatcatgttttactcttgagatatgttctttgacaccacccacaaaatatctctacgaaatacgaagccactatatgtctctttaatttcactttttatagtttttttcaccgctaaaattgttgactaaaaaatatattgcataaaaataattgataatatatttataagaaaaactatgataagaaaaaatataatcggttgaaatgagtcatgactaacaataattaaaggttaggaaattaaaagaaaataaattctgaaataactaaaaaaaaaaaaatagaagatgatgatatatggatccctatactaatattttggaagtacattgaaaaactaactttcaaagacccaattaattaagctcattaaggataaacatgttaaatactaacttatggacattaattaaattaaaaattataaaacgaaaataaattgatgacaaaaaaaaaactatgaattttcttattaggatttgtaatctactttcttgaaaaaaattgaagtttactgacggcttcctttttttggaaactccaaaataacaaaacatatgaagaagttttggaatagcctttgactcaacaactttaacaatagaaagaaaacatgtttaattaatgttcatgcacttcgtctcggctgccccttgtggcctgtggggttgccgggttggcttagcttgagacgacccaatactgaatttgttagctcggtcagtgaagtctacatgcatgatacaaaaagattgactagtgtttaagttttttttttttttttttttttttttcataaatggtagtgtctcatattagaaatggtagtttgaaaagtattcagtttgtttgttcactttggattatttgattttggttttgttaattgaatcagttttgtttgaaaagtattcacttttgaaaagtgttcactttaaaaagttttgtttgaaaagtgttcactttgaaaagtattctttgagaagtgctcagttttggtttgtccacttacgattattattcacaagctacagcggatagtagtgactagtgacttatgactttgaataaagaatttccctctaaaggaatgaatacattataaatagattattaacctaagcttgatagagaagacagaacaaaaaaaaacacaagaacagggcaaggaaa

SEQ ID NO: 1698 - DNA, 3000 bp, Unknown
  misc_feature (1)..( 3000): cDNA_ID_2142568_gDNA_ID_1620436_Annot_ID_157032 3000 nt of promoter + ATG
tatagtagagagaattatttgtaaagttgtttagatatggatataagaaatggcattaattgtaattcttttgaaaatgaagatttatttcaaattttcacttcaaaaatactaatatagattaaaattgtgctacaaaaatggtcattatatcacataatacacactatgatatgtgaatatataataccatatttaaacaatgttatcatggtcaccctattatagctccaacaaatacatcctatactattatttggaaagtacataataaaaaataaccttattttttgtaagtaattacataggtatgccattagaaataaaattttaaagagttaattaatttaatttaattagaaaaacgaaaaacattattaatttccaaaaaagtaaccaatcaatatcaacatataagatttgatatctaaattttaattaatttaatttagttagaaaaataaaatacattattaatttccaaaaaagtaaccaactaaaatcaacaaattagatttgatatctaaattaacatgttaattttttattaattattatacttcacctctcatctttatatgattctatttttgcgaaagaaataatatcatcatatcatcagtataaaaaaataattagagttttttcgcatattccatgatttgaatttttaaaaacgaatagaaactgttcaatacatgaaaatatattataacgggtcaaaaatagatttaagaaaacttttgactgagtaacgggtcataatttgaatatttatatttaatttcatacatattattttgaaaatttataatcttatatactataataattaataacatattagatttttttttatgtgtatgatgtaatttaatttttagtacaagctggaaaatcctacaattgacgggtttagatcgatatgaatacaagatggtatactacaggtgaaacgctaaaattaacaatcaaaatacaagtgtataatcttaaaacactaaacaatataaataatatcaacaaaacatatacaactcgcagtgtactatacatttaaaatcaaataaaataatatcatatatttataaatcatctttacaaaaaatgtttttagtttagctaaaatataagtctacctgcggtataccgcgggttaatatctagttgtttatgaaaacggtatcacaacaattttttataaggcatcatatttagatgttctaagattctttagagatttaagatctttatttgtccatggaaaataagacgagattatttagttgaatgttcatgagcctatctattattccggaaggtgtcaagtttaactaacttgagtataaaggttttatgattctagtcatatgtgatgtggctctagcagcacaagtatttcaactatactgtttgaaataatggattcttcaggtacatgttgaaggtagagaggtaaaattttcattgtaaaactcacaaccgaagaagagcaaattacaccttcaaaatacacaacgttaaaaaaaaaatgacatgtacgtaagtttgtaaattttgttttgttttgtagaaatttcagaagacgaatcttgcacgtctaaatttgtatctaaaattataacaagatccaaaaggtcactattgttggtgtttataaatgctttcttttcatttttgctctaaactctctaaaatacatgaggtggtaaatatggacttttagtctaaactagatacacacagatgcgaacaaaactatctcaattatgctggagttttgcctttcctaaactttgttatagattttctagatgttagacacaaataagataatatcctctaatagtatatgtcttctgtttccattagcattattattaccaaaccttcatttattccctgttgagttttgatccaatttttcctgtttctttttaatctataatagtcctttttatttatctatctaaagagaattctcatagtggcagcaagtaaggattatttagtttattgttatacttaaaagtgtaaagtataataatttaagtcgatcgaaccagggcttagattgatgtcggctggtagattatagtgtcccacgtcagttgtcatttgtaaggttgcaattcatttaaaatttgaaaaattgatattaccatacacacattctatgcataatgtgcattatcattttttggacaacgatgttattactttgctagtatattgttctaattaatcaatcagtttacaactttgactagccatacaagaatattgacttatcattaacttgacgatttcttacttcataaaaattaattagtcaaacgaatatctatttcttaatttgtaaattgtttggtaaattctctaatatttatactgttttctaagattacaaacaactctcttattttcatgcatgatttacacgtgaataagtaacaacaacataggtccgcaatgatacccaaagcatttcctgaccattcacaccattcaggtctagtacttgtgctcttattcaatcatatatgttatcactagatttgtttctttatttatcccttttaatcaaattgttcaccagtttctacggctcaaaaaccaaaaaaaatcataacacatgacacatgtgacatgtcaaatatatatatttttatccaaaaaacgacatgctaaagttttattttccaacagaaaattcctttttttgtctttttattttttatataactaagaaattttccaacataagttttttttctttcaataataactactattactatatttatttcatatattgtctatttttaaccaataattaccacatgtgacatgtccaatatcgtaattgtatttttttcaaaaaggaaatactaaagttttaatttccgcgcactttcttggctctttctcggaatagtttgtcgtattccgactataaacaaaaaaacaaaaactcttttcttttagagcttctcacaa

SEQ ID NO: 1699 - DNA, 3000 bp, Unknown
  misc_feature (1)..( 3000): cDNA_ID_3063762_gDNA_ID_1620436_Annot_ID_157037 3000 nt of promoter + ATG
taagctttaagctctaagctctctcttttggacctttacctccataacatagggttgtccgttgccaccataatgtttctcctcgtcttgaaataaattcacattgaatgtttgtaagtactttcacattactctaactttagtttactttgattgggtagtgataatttgatcacagaggcggctggtggaaatgtgtctgctcaagctttgaaggaagctgatgagaaggcttttcaagaatcagaggtaaactatatatcgtttgatctgcatttttatcgtacaaatgcatctctggtccagttcctgaaagagtattgatcgcacttacaaaaatggtttttgacgatgactttctaacatgtttctgcagactgaagtgctgaagcagctatcatctatgggtcggcttgtagtttgcgctggagatggtgcggtccaaagcttgagaaatctgtatgttctatataagtttcactagtttctctctagcagttcattcttttagaagacatacacacgctgcttatatctgtttaatatctctcccgtctgttctcatttgatcgtaaatatttgaacagtgcacttcttagacacgggatctccatatggatcgatgttcctctggatatcactgctaaaggggatgatgattcattccactcagaaccttcccctgaggtttttcttccttctttcctctgagctgcataaatttcctatttggccttattacagagaaactgactttcatgatggatgaatccagttgtttgacacactaaaagcgagttacgagaaatcaagaaagggttacgaaacagcagatgtatccatttcccttgaaagtaaggatctatcacaagtcaaataatattcatgacaatttttattatgtgactgattctgctttgttacacggaaacagaaatagctacaaagctagaatttgaagacttggaagcagtaacttctgaagacattgctttggaggtaaagtcttgagctctttttggttatcattttaacttatggttacaaatgttaaaattttatgaacaatgttcttcagattctgaaagaaatagagaagttgacaagagtgaagaaaatgatggaagaagcttctcgacctttctaggtcgattttacactctcattcatagtatgatttatgttgtatatcatctcgacattaatatagctttttttgcataaaatcactcatatgatttttaatttcatagtcgacatgtgttatacaaagaggctcagctttgggtggtggaggagaaggatcatcaatctgtcgccttctctcacgtgagatcgataacgtgctgggcttaatatattgatccactagtatgtgggccttgattatggcccactaatggataagagtgagaaatagtgaaagggcacaaaatagctcatcccaattcccaacagctttcttgtctctcccgtcttttaaaaacaaaacataattaattctccattttttctctgttcgtttgagttgtttttttcttacggtaaaaagacaataaaaacggtaaggtttatttttgtttatagattaattaaagatctaatgtaataaaaagtatgagaaattcttgtttctatgctttgaaatttgaaatttgagctttcattgtataaaaaaaagaatcaaagaatgtttttaatctgggaaaaacaaactttaacgtattttgataaaggttaaaaaatggtaattagaagaaaaaagaaaaagagagcgatgttaatggcgatgagcttattgggatttgttatataaaaaaaacagattgaaagataagagaagaagagagagaggtacctcttgcttcttctttctctcacgcacctctttgaagattcttcttctcttaccttttggattcgtctcttcttcttgattttgagtttgattctaattttggatccagagggtttatttatgtgaatgattccgattttggggaacttgttcgtctgaaatgttttgttgaaccggttgcgtcatcggtgcgtcttttcatggtcgttaagagtttcatgattgcatcggtgttgtgagttttacgatgctgttgttgttgatgagctgattttttttttttttttttctggtgattatttgtctcctatgtgaaacattcttaagtatttttgatcagattgatttgatcacaagtttatcccgttgcaatctctctgtttcattttgtgaacgctcatgtggatcattgatttgtttgatcacttgtggaagatttttttcccagtgttcgattatttgtattttgcttaacttttttattatagtgatgtttgcttgaaacttataacacttgagaatttgtgatgatcatttttgttggaatggctgttattgtatgaactcttcttcttgcttagtagtgttattaataatttgggttttatggcgtatgtttccggatcatgatttgtttgatcgtttcttattcttgtagctggaattagtcataacttcttttgaccattcctgattaacttctgcactttgtgttctattgatgattaaggttaacagtctagcagaacaaatttggttgtatttacttactgtgtcattgattcgctttctccgttttatttgtttcaggaaagggtaactgcaatgaactctgtatctgtcacccttgcatttcatgtaacttcagactgttctgccgtaaaccaatgtcggataaatgttaagtgtttggtttcttgtatgcgggtcagtaagcaagcaatgcacgagttgtggatgcctgtgactgatacataattctagatttttatttattgttctgttagagatagagttagtcagtattgtttattttcaaggatttggtagtttctagggagtttttagataattagggatttggaaactcacatctcagaagtgaccataaacccttttacttgataagagcattagttatg

SEQ ID NO: 1700 - DNA, 3000 bp, Unknown
  misc_feature (1)..( 3000): cDNA_ID_2142584_gDNA_ID_1620436_Annot_ID_157036 3000 nt of promoter + ATG
aataatggtatattcaattggaaaaatagaaatgtcttagattttaaaataagtgatattgctactttagattttgtgttaacgtttagaagaaaaaggatttgtgagtagacccataaattgactttataactcgtaaattaaatcggtcgttataattttttttctaaagcattgtaacgttatatcttacaaaactaatatgattttatttaggttcttctgtaatattagtatagatatgttattcatagtacccaaaaaaaaactactactttatttattagagaaaaaaagggcaagctctagaattaaaatttcataatttttagtagatgttacaataagtataaaggtgggctctgaaatcttgttttgctcaaaagtactcgtaaaagaaattttttactgtattaagatatagtttcaaaagtgtttcatattgctcaagttatttataaaacaagctgagacgaaaaatgggtaattctagtgtatttaaagccatgatacatgaaaatgaagcataagagtgactgacgtggaggttttcttaagaactgattggtgggaatatgagtagtgacttggcaaacgatgattgggtgaatctgaaattgagagaagaaagttgatcaagttgtgaagctataaacagagctgaagatcatttgtggattcataaccaagaaaagtttgttagtttcttcttcaaatttgtttctgttgttagggtctctcatctcgagagctggatgatgattgaagctgcgttacaaaaacatattactcaaaatactacaaactatactaaagacttatttgtcaactataagtataagtataaacaataacatgtttataagcgaaaagacttatatctataattaattacacaaaagtccaatacgcagatcatttgtcaactatcaatcattagtttgtattgagttgctacctcaactattaatagaaaatttaaaataataaagagaaatgtaattgctaaaataccagcatgtgtatatataacacttcaaagagaaaactaactagtttacctaaacaaaagtattctatataacaatgaaaaatctctcaatctttctatttctttttgggctttgcatattggtgatgtatacatgaaaaaatctatgtttacggtcatgaccgaattcagtcgcaaaagcaagaaaatcgtcaaggtgcattgtatatatataaaaacaatataggtataaaatatatcaaaaatggaaaagttatgtcattcagctttaaaccaacgtttggggaacgacgggattttggtgcgacatatataaaggacctgattataagaattttataggttttactacatatcatgcgaaaggtttgtttgttaagggtagatcatcatataattagttagctagagatgataaaatctattttcttgaggatttgttgcctagttactagctataagttttattggaaacaataaaagaaaaaaaaaactactacttatttattagagaaaaaagggcaagctttagaattaaaatttcataatttttagtagatgtcataagtagtgaggcgttgtatacaaaaagtgaactctataatctataggattgccctgaagtacttgtaaaaaaatagtttattaagatatagttgatcgattaattcggcatttgcactttttgtttatgccaaaataaaagacattataagtacatagattatgaaggttaatattaacaacttatctgagattccattttggtggacatatcatttgctgcaaatgatgtaatgcaagtggcgatacaatatccgggtgagataacctctgctaggctggtacttagaagttcatacatttatttttgtccaacatatattgaaagtctccgatttgttatattaactattaatagaaaactttttctgttggacaaaatttaatagaaaatttatgttaacagaaaacaagaaactgtaaattcaaaaatagcaacatagatgttgttataaatacacacaaaaaaacaagtcaacacgacaaaaaaaatcaaaatttctctacagaaaaaatgaaatatttcacaattttctttattttttttagtctttgcatgtttggccatgtatctggcgccggaatcagaatcgtcaacgaactcaaaaataagaagaccctttggatgaggtgttattccaaaaatgatgtacttggtccaacaataataccaaatggaggacaatttacagattatttctttcataatttatttggtacaacgcgttttatgtgtaccttaaaacaagggcctggatttagtcacagtcagagctttagagcatttaaaaattctggcttatgggattggagagctagagaagatgggatctatttaagaagaatctataagaccaaatttgatgatgacacagacaatctgcataaagagcaaagttggatatagtaaatatttacaagctacctaatttatatataagattcaatactcttcattaagacaaattatgtatacaaaaatagtcttattttaattttaatttgtctactaagcaattttttttttttaaataagctgtaaaactattaacactaatttatgtgtgatgtgccaccaaaaaactatgagtaatggcttctaagaaaataatataatttcattcatgtgtataataatttatctataattaacttgcctttaaactcatatgtaacaaccacaaaattcgtgtgtaactactaatgtaaaatcaaaactagtatctttagctaaagaatgatatctattgtaacccacaatcaataatcatgattcatgcatgcatagacccttcttcgaattttcatcttggatttgttttctactcccagttaatctttgtcaaattccgttgcgttaggatatatagttaacagattgattcgccatgtgcgcttttttgtttatatatgcaaaaacgatg

SEQ ID NO: 1701 - DNA, 3000 bp, Unknown
  misc_feature (1)..( 3000): cDNA_ID_2142556_gDNA_ID_1620436_Annot_ID_157029 3000 nt of promoter + ATG
tatgcttaatttggggtaataatgaaaaatttgacataggattatataaagggaatagagagagaaattaagtggtggtcttcacatggcagccatttttagaatatgatgagatgcaagagatgagtggacctatccacaaaaacaacaatgccaatccaccactcttcccatttatatccatacattcttagtttcttacattagcatatctttaaagagttggaaaaacatgtcttgacaaaattagacatgaattatttgcccaaatagatcttcatcattcatcaaacgatttatgttttgatgtaaacaaattttaccaattaatactatttttctgatctccaagtgctatttttttattttattttgcacaaatagtaacccaaggtctctaaatacttagatttctatatttatgaatgtaaggaatgaatgattgcaaggatccatctaacaaacgatataagtcatttggaggataatataatattatgcatagaagaacattcaataatatgtattttttataaatacttatgaatgtttctatgccattgatgttctctaaaaacaatacactgcaattgctaatccattctaatttaattattgctagctaattaattagtcttataccaaatattttctctaaaaacaaatgaacaaaagtttggtggtaagaggcaatgaagtgagtcttctctttcatccaataataatacttttgttttgtgtgttcccttttgcaattatatgcaagtgggtctataattgagtttgattatgaaggctacacacccatctttgtttttttcattattttttacatatatacattttcttttgtattttcactttaaagttctatcggccaaggatggttgatgtgtttagtgtgttattcatctttttttgtcaccattgagaaaatatggttaacagctccaaagttttttaagaattgtttttgtaattattggtgcgaacaatgaataatttgtatatgtaaatatgattgtcttgaataattgtttcatccatatttctcaatagtaaataatgtatcgtttgctttcttaatcggacaaaattaacaacaattgtcgtagattccttcacatttttatcatgaatcatttaatatttcagccgaccgtttcaagtttcaaccatgtgtacactgttttttcacatttacctagcatattcatttcaattgttgccaccattttgaatgaaacctaaattaattattttgtattttatagaaaaataattatttgagtagcgtttggatttatatgatatggaaaaaaaggaatttaataataaatttgctaatgtcatcacctactgactacgtatctccacggatggtgtatgtcctcataaccagacaaattcagccagccttgcttttctttttttcctcctttaacaacccacaaaattaataaaattaaaaactcaaactttgatttgtgtaattaaactacattctctctgaaattcaaaacttgaaaacaaattattgtcgtcaaaaaaactgtattaacaataagaagtgccaaaaaaatataatagtgtatggaagagcttaatcctatcttattgtgagccaaaaaaatatatattctatttcatttcggatatatttaaagataattaaccaaatagtgttttaaaatgtcaaatgtcaaaatatgaaatttatccttgcttcactcggaaataaaactttgttatgaatataacaaacatcttcgtttaaataatcaattaacaataattttagatggactgcgtagaatttgttcctgctttggccaatttttagatgaatttagtttgctctatgatatgttttacaacattaatttagcatatctaagatcaatgtatgctaatgttatttttataaacttttttttggattggacaatgaattttttttttgtaaataaaatttttaattttgtggtttaagaaaacattaccaatagccaatacgtaggtaagtgaatggttaacattctttaaataataactaatcaatctttaatcacataaattagttgaataattgataattattaacgaactactacttaatgactttatttctgcgagtacataaatctctcttactcgcccacaagacaacaatggcataattccgtaattaaaccataaaaccaaggtcaattacaaaatctctctcaagtctgacactactacatcaccttctcttttttctctctttggcgagaatggcctcgtaaccagtgattaggacacatgcatgccatttcccatcaacggtcaagatccatctcctcttcttctccttcaaaccattccccaccgttagatcatctccaaacctaaccacggttcattctttaaccacggtttgtttcggtcagccaggtaggggcctctctgatgtccttcaagactttttatttttctccattaccaaagtcaccaagaagccagaagaaagagaatagagagagagagagagttttgttcttcttctttctggttcctttgctttgctttggttgcgtgatctcctctctcatcaatcttcttcatcatcattctcatcatcattagcttcttgatttttttttccttctttttttcgtttcaagaaactaaacaaagtttctatttatggttttctgattcttcttctacagatctattatttgattctccttcgatcattgtcaacgttttcttcttttgtaatcatcacagttttttttgagaatttgttcatttttttttctcatatattgattcgagttctttcttcttgaatcttgttcttcatagatctagtttttgttttttactctctagatctatagatctgttgaattcacttctttaatccatctctgtgttcttgagttcctatggtctaagtcaaactcaagttcaagatctgttgaatttggaatcttgctggtgaagttagag

SEQ ID NO: 1702 - DNA, 3000 bp, Unknown
  misc_feature (1)..( 3000): cDNA_ID_3063788_gDNA_ID_1620436_Annot_ID_157023 3000 nt of promoter + ATG
cttagtatcacatttaaatgaaaaagaacctattgctaatttttttttttaactcgatgagtcttgatctaatttttatgtattgatcgtaacacgttagtcaacttaactagatagattatatgtgttttttcactctggacttgaatgagttatggcatggtcaggacactaatacaaatcactagataatttccttatacatgtatgcactaatacaaatcactaaattctacagtaaaaagctagaaggcaaagtagctctcataactggtggtgctagcgggctcggtaaggccacggccagcgagtttctccgccatggtgcccgagtcgtgatcgccgacttagacgcggaaaccgggacaaaaaccgctaaagaactaggctcggaggcagagtttgtgcggtgtgatgtcacggtggaggctgatatcgctggagccgtggaaatgacggtggagcggtatgggaagctagacgtgatgtacaataacgctgggattgttggacctatgactccagcgagcatatcgcagcttgatatgacagaattcgagagagtaatgaggattaatgtttttggtgttgtctccggcatcaaacacgccgctaagtttatgattccggctaggtctggatgcattttgtgcacatcaagcgttgcaggtattaacataaaatcaaagtcttagattagatagaaaccttactatatcaaaccaaaagatggttacttagtagttagtacttagtacttagtacttagttaagaatgtataatatcatatcgtattaatcaaagcttggttagtacttagtacttagttaataatgtataatatcatatcgtattaatcaaagcttggttaaacaaaaacttaaatgaagcttaatagttttcaatttgtggtcaacactcaaatttgacttttggtatggacaaaacaatgtaggcgtgactggagggttggctccacattcatacacaatctcaaagttcacaactcccggaatagtcaagtcggcagcaagcgagctctgcgaacacggcgtgcgtataaactgtatctcaccgggtacggtggctacaccgctcactctcagttaccttcagaaagtgtttccgaaggtatcggaggagaagctacgcgaaacagtgaaaggaatgggtgagttaaaaggagctgagtgtgaagaagctgacgtggctaaggctgctttgtatttggcttccaacgacggtaaatacgttactggccataacttggtcgtggatggtggcatgactgctttcaaaatagctggttttccttttccttcggattcatgatcaatcattttgtatcgtctataaataactttgtactgtattcaagattttatatcaaagttggatcttaaaacatttaataaattttcaaagcaaccaactaaatataaaagtttctatagtaagagttaactttgataacatatgactttcatttgaatacaagctggcatgaacttgaagctttgatcacagtttccaactcctcgaccatctcaactctctctttcgaggtaaggcgttttgtgaggaaagttgctttatccaaacgacttgcgttactaaggatatatttcgtcacctctttttcatcttctcgccattcgtagtcttcccatacaaatgtctccagatggagtaacatacatttaggaatattctttggctgaatccatttccacaagggtacgccatctaaacttttctgccatggctgtggttatgagatcaatggcgagttaacacaaagtaaattacatgtatattagatcatcaaaccctaagttgaggtggaaatttgctaaaagatgaattttcaatgcttacaccgatgagcttgaggacttgtaaattaggagaatgatcgagcatgagcattagtagattccaacaatcagctctatatatacacagctccaaatataccaactgataaaatataggaaatggaatctatacatgaaggcaatattattagtagagtaacaatgcaataataaggaaactaactaattacaagaaaaccttaccttcaaggctgatatctccaaggagagacgtttgactgaagtcagtgatctcaagatgaaacttttattattgttgacaatatttgcctccaacagcataggtgcattctcaataagacaagatccacgaccaccaatccatatacttcaagtattttaaagaaggagcatttatcacaaagcccacatgttctttatcatttctattacaaatcgatagtctttgtaaggaaggaactgcaatagttaaaggcttcacattggagtatagagttccatgcacatccaagttttcaagattaggacaaccagataaaaggttaagaactgatgtattgtttatgaagttcacatagtgaaggtgcagagttctaagagatttcagacaaactgaagaagggacaaccatacgaaccaaaaacttgacttccaaggtatctagtgtttcacaattgcacaagctttcaggaaatatgaaccgtcctctaggtgcaatctgatccagtatgaaaattaatggaagatatctaaagttatttaatccaaatctatttttctaaataattttgataatatatatatatatatatgtatctatttttattaatagtttttattttacaatttaatttaataagtttatgcaattatttttgtatttttgtttagctacattggtggatatagcggcgttggtgaataaaattccagcgtatacaaggccagacgttttatcctataacgggccgggcccaatatttaaaccttctagctcacacagaggtcaaagtttttgctctcgtctctagatctgtagaagtagaatggtggagccatcgagccatgtgatgtgatcgaaacaaaaagctctttgcttcttcttcgtccatttctcgtagcacacttttcacaaagaag

SEQ ID NO: 1703 - DNA, 3000 bp, Unknown
  misc_feature (1)..( 3000): cDNA_ID_2046681_gDNA_ID_1620437_Annot_ID_157045 3000 nt of promoter + ATG
ctcttcagatctgttgaaaggatgaaacttttctctccaaggaacactctttgaattatgaaattttttcagggaattgaggaaatgtcagaggttattgaatgttcttatttcttacttataaatacgtttatacgtatgaagatgatggtcgtattgtataactggcttttcaagttgatacggaaaataaaacgacgccgcattaaagaaaatgacaaaagggggctgaggtggcaggtaaatggtaggcagctgacaaaaagtaagtggctgtttcaagggtattatgggaaataatgacttaagttattatcggatacggtaatgactctcatgttaacattgtaaccagccaattataaagagccaagtcatcaaataattatgtgttggtgatgatctgttttctgttggttgattgatcattatacatttatactagtagactaaagatttcaacgtcacttttttggtgataagtttgaaaaagagtaactcaaaccttattaagtttttggtttatgtgtaactgattgggattagagaaaaatagtaaaatacatatctctcgttttacttgtgatcaaaaagattttgtatgattcctaggtgaatcacatctttcgccaacccgtaaagctctggttatgattttgataaatgttccaaggtttctttcgtctttaagtttgttttctataactttgaaaatgtcagaatttggttcttttgaattatcaaaaatttcataatttatactgaaccgcattatttacaaattagtcatttctcaaaatagttcttttgaatttcaattaaaaacggataaaaaaaaggattggaataaatttcagctaaaaaggaccgaatagggtgattttagtgggctaataacaagattatgtagacatcataattcataatgggcctcgtttgaaattgagcccataatagtttgggatcaaccaataacttagtcggtctttgcgagttaagaaaccacgccgcggtagagagaaagagaggaaagcttaagccgacgacgacgacgaagatgagagagacggtgaagttgataagcatggaaggtttcgagttcgtcatcgacagagaagccgctatggtttctcagactatccgaagcatgctcacttctccaggtttcttctcctcttttgttgtagagttggtgatcgtaatcaagattctgatctagtcatcttacttggatttgatggattctgtgatacttaatctgatttagttgtgaattggcctcaatttgagagaaatttagcgagagattatgctcaatcggaaattcaattacgtaatttgaataaagaagcaagtccaaattcataagatcattctcaatttcattatgtagatgctaaatttagtaattctgttgttatttggtatggtaggtggtttctcggaatcgaaagatggcgtagtgactttccctgatataagcaccacaatactagagaagatttgccagtacttctactggtctcttcaatactccaggttccattatctaactcgcttttcacctcttgctctacattgatctctagaacatggcattgtagtagtctctgttagttttcttcagaatcgcatcgctgtttgtaactatccaagtttcactttagtggatcagtcgataagaatgaacgcatacgcatcctttggggatatagttacattgcaactctttacctcattgcactgtcctgcgtttagtctcattagtttatctctatgaaccaatgtattgaaagtgttactgttttctagaattggattcttcttttaccgctcctccactcctatctttctctctttttatagttgtatagtctttaactactgttatgcatatgttccatcttttgacagaggcaaagagacagagtttcatattgagcctgaactgactctagagctgatgatggctgctaactatcttcacacttgaagaatgaaaaggataacgctgttgaatcttattcgacttgtgtgaatcaaaaggataaatctgcattgggttcaagaagaactattgaatagctctaaggaaaagtcatgtacttctttactagctgttagtttttaactgcaacatcaaagttcttgtggcgtccgcgttactagttacttatatgcaaagaacttatcaaagctttgtaacattctattctaataatgatttggtttggtgccgaatcccttgaaaatttctctactttattagacagaatacaaaagtgtgtgactattcatctcaataattggtggaagcaaatcggaaatacacttatctaaaacggcataatacacaaaagaaagtgctattttcgcaatgaaatcagcacacatgtgctggttcgttgtctttgtcttttcctatgatatctcgtgtaaaggctctgcagagatgggccaggcttgcttcatcattaactgcccgaaacagaacacttgcatcactctcaaatatcaatcacattctctaaaccaagatcgtctaggcacattatccaagacgaagctgttggttgcttctgcctccaaattgttccaaaagtcgtaagcacgtttaggccccaaactattggaccactcctctctcaatcctgacgacccttcccatgccacaaataccaatcctaagtcacacattagtgtcggtttgttgtactctttgagatattttttattggaactgacaacatgttactatcgttatagattccaaaaatatggtgacttaccacatcgaaaaaaaataaaattctcccgttgtatatgattatgagtacataaaaacaacttttttgaaaaccgtttgggcaaaagaaacaacattaagcggagaaacagaaaattagattattttctttacttggtccatgtactatctaatatataaacagcctttccatcttgatccccacagaaattataaaccaatcaattgagatg

SEQ ID NO: 1704 - DNA, 3000 bp, Unknown
  misc_feature (1)..( 3000): cDNA_ID_2025310_gDNA_ID_1620437_Annot_ID_157050 3000 nt of promoter + ATG
gatgaatgtaaacgtcgattcagtgtgagactctggaaagtgtttacagattcttttaactgtctccctgttgctgctgttatagacgataagatattatgtatgcacggtggcctttctcccgatttgaccaacgtggaacagattaagaacattaagcgacctactgatgttcctgactctggtttgctctgtgatctgctttggtctgatccaagcaaagatgtcaaaggttgggggatgaatgaccgtggagtctcttacacgtttggccctgacaaagtcgcggagtttctaataaagaatgatatggatctcatctgccgtgcccaccaggttcgtcgtctacacactgttcgtttctattttactaaagatgtcacggaacttctataaaaatataactgttgtgtttttctttttctaaaaggttgtagaggatggatatgagtttttcgccgatagacagcttgttacgatattttctgctcccaactactgtggtgaatttgacaatgctggtgctatgatgagtgttgatgaaagtttaatgtgctctttccaaattcttaagcctgctgatcgaaagccccggttcttatgaagtaaagaggtagttcaagtcttttatactaacttgtgatgagtgtttcaattcctgtttcagtctttcagatttccagattgctataaaaagttcatcatgcatttcttctcaaattacttagattatgacatttgttcatcttttgcttacacaacttgtttaagatttgattgagtaaaacagaaggggtttcgttttgaactttgtgaatatgagctcagagcttggatctcagattcaatcacttacaggaaaacttgtttcatttttgcatgttgcagttgaaacctcgcgggaaagaagaggaaaaaggcgatacgaaagcgggagagacatttgaagctccctgagactttgtccggaggccttgcaaaggcaaaaaaacataatttacatgttatattatcttatttgaactcttgccatttcttttctcaaaacactttatgttcttatgatcttctcctctgactctatatagacagtaaaaaaagtctgcaaattttcattctttttcaacaaccaatttcctcagtgtacatactaaattgttctgtatccatacacacatatacttgggaaatcttcggtttcatggattcttcacaactcgaagcctctttaaaaacagattctttgcttagttgttgtcgtcgctgcaaattatttgacaagtggagagtttttgcagagctaaaaagcgaatacaagttgaccaaaaaaggtcaaatccctggttccatatgaaactgtcaaactttggacgtgcatggatacaaaagcttctgtcagtttactttcctggatttagggttttaaaaccagctgtgaggtttgctgcaatgtggcaatgtcactgcaatgtgttgtatagagtcttaagtcctctgtttactttaaaacccgtattttaacttgctgctattcacaacaagaaaaatgaagtcttgtctagctacttttgctctcgcagtgttagtaacacaaggaagcatttttagtttgtgtttggcctcctctgcttctacaaactctgttcctaattggtttcatcattggccgccgtttaaatggggaccaaaatttccatattctccacctaaaccgccgccaatcgagaaatatcctccaccggtgcagtatccaccaccgatcaagaagtatccaccgccaccatacgagcatccaccggtgaagtatccaccaccgatcaagacttaccctcatccgccggtgaagtatcctccaccagaacagtatccaccgccgattaagaagtatcctccaccagaacagtatccaccgccgattaagaagtatcctccaccagaacagtattcaccgcctttcaagaagtatcctccgccagaacagtatccaccaccgatcaagaagtatcctccgccagaacattatccaccgccgataaaaaagtatcctccgcaagaacagtatccaccaccgattaaaaagtatcctccgccagaaaagtatccacccccgatcaagaagtatcctccgccagaacagtatccaccgccgatcaagaagtatcctccgccaattaagaagtatcctccgccagaagagtatccaccaccgatcaagacttatcctcatccccctgtgaagtatccaccgcctccgtacaagacttaccctcatccgccgatcaaaacttatcctcctccgaaagaatgtcctcctccgcctgaacattacccttggcctccgaaaaagaaatatcctccaccggttgagtatccgtcgccgccatataagaaatatcctccggctgatccatagtaactcaaaaccaaacaaggacgtgtttgtctataagtatatgtctagttaaaaaactgttctgttctttctgttatgttctttctttttcttatgactttctgttatgatgcatcaaataaagaataaactgttctgttttgaatttgttaaataggagagtgcaagctcaagaacaagctgtttcataaataaataaaatatattttctaaaatcaagtaaagtaaaaaaaaaatagatattgtactaaatgaataaacttgattcaacaaagttttgtacgttgttataatttcacttaaataatttagtgcgtcaaaaaaacaaaattaaaacgtaattggtcaaggaaaaaaaaacaagtctcaagggaaaaggaaaacaaaaaaaaaggaaaatttaataagcaatctggaccgttcatactttttagatctgacggctgacagagaactaccattgggcatcttttataaacagagagatttgtttgattccggtcgaactcaaaacataatttgctctcaataagacattaacaaagtcccagaggcagagagagagaatcagagagagagaagtcgag

SEQ ID NO: 1705 - DNA, 3000 bp, Unknown
  misc_feature (1)..( 3000): cDNA_ID_3063842_gDNA_ID_1620437_Annot_ID_157058 3000 nt of promoter + ATG
acgacgtagttagagattcctcatttgagcccaaaacaataatacaatttcgtacactcaaatattggcccaaattccaagttttgttacataacatttgactgggccagtcattattaatctcagcccaaaacataaaaaatatttgtaccctatataataagatcgaaacggacggctgagattgcatcctatgttttgcagttttttgagtcggtcatcgaatccgaaaagcggaaaaggctttctcacgtaataaattaagcttgtagagggtagattcgtaactaagcagcgtgttttccttttttcgggttgagaatcggacccagaacagccaattttaattccgggtcgggttataaacctctatatatatggtaaagcccgcttctttgtcacccgcttcacgatttcttcttcttcgtcgtcttctctcccaatcgtccaattaagctctgctttcaatttctcctgcgaacggtaattatataactctcaatcaattagggtttcaaggaaaacccccaaactcacatcacctttgagtgaattgtatttatactctcaattaggttttctttgaatcgtatcaagatggtgttatcaacgagcgatacgagtagctcttacaactatgttatcgatgacgttatcaacaagtctcgatgcgatcttgtctacaatggagaacttgatgagagtgttcttagccaaattcaatcggttagtttgttaactcctttgtaagttagggttttaggatgattcagaggattttctgaaactgattgaaaaaactttatgtctatagatgtggaaaacgaagatgatacaagcaggagccatgagcggaacaatcgaaacatcttctgcttcgattcccaccacacctgtgatagtgcagacgactcttcagactccggatgcaattcctttacctgagaagaagatgtctccaaagaaagagagtgatggattttattatattcctcagcaagatggagcgagagatgaagctattgtcgatgtagatgagaatgaagagcctttgaacgaggatgatgatgatgaggaagatgatatcgatgatgatgatatgaacattcaacatttggtcatgtgtcaatttgataaggtaatgatgatggctatatagttttctagtggtacatatttactaacaatgatggacttgaaagttgaaacttatacttcaacctacggtgttgcaggtgaagcgttccaagaacaagtgggagtgcaaattcaatgcgggtgttatgcaaataaacggcaaaaatgttcttttctcacaggttagagactaacttctacacaataacaaaaattgtgaagatttcactttggctaattgtatcctctaaatttatgcaggcaacaggagatttcaacttctagaagatgcactgaagatttaacctcttcagaaattgcagaacgtattttggatttgttccaacaataatacttcttttgtaagggatttattgaatggaaattgagaaattttgactataaatgatcaaaatccataaacatgaagatctctcaatgcaaactctaactcaacaaaagaatgaataaagcttttcaaattttcaagatcaaaaacgtaagtaaaatcccaatcgaaagttttgtatcttatgcagcaccagcattcttgcccttcttcttttgaagtttcttcatgtagaattcgagctctttaccttctaatatgtacctgtttcaaattacacaatacaccaagatcagccttcttaactcagagaaaacactgattaaagatgtgatgatttcaatccaaaagatttttttgtttacccatcagcacgaccacattgtccgggtcttgatgcgatacatgcaagtaaccttccactgctaaactgctcttcaaggtgcgagtcaagtgctctgccttcttgtcgcatctccagcttcctttgaacatgattgctcttcttcacttcctcagtggtaacggcctctcctttcttcttgcgaccaatatcaactccatagtgttggagatacccttgcttgaatggagcagcatcaacttgaacaatagcactcttcacaagagtttgtgtacgaacaagctcattgtttgatgcattgtacgccacatccaagatcctagtcttgcgggtcacagcttcacttccccacgagaagtttccagtatcgagcctcaaagctcgccactttacattcccaccacgcacacggatcctcctcaccgtcttgttacttgacagcttagtgttagctggttgtcttccaagctcatacctttataagagataaccaaagttagtttatgtgatcatcaattttgcttcaaccagaagttatacaaagttatcaagcatgtagaaacaaccaaaattaaagaacaagacaagctcatgattcattttgattccaatctactctatgattcaatatttaagcaggggaagattaaaaagcttactttcgcttcttcctccacattttttgcttaccaccagtggcacgtctcttgtgaattgaatcacgagagatacctgcaaaacagagaatcaacaagtcatcaatacaccactattgaagaagaatttctcgacattgatgctagaaaggttatatctttgccagaaatcgaacgagaaagaaacggaattgaaaatgtacccatgatttcaaaagcgtttgattcaagcttttggttctcacgagctttagaggtttaacaaatggcggaagagtaagtggtgtctcgctataaatagtttactctgccaaacacaaacaaaaaaccctaaaacgtcaatttacaatcgtgtccttgctttaaacacaaccacacattaatggaaagaatcgattttttaaaaataatatcaggagtcaaaatctcgaagatgagagataagcgaccaaaattagcgggagaatcctcacttgtctcactccgatccgatc

SEQ ID NO: 1706 - DNA, 3000 bp, Unknown
  misc_feature (1)..( 3000): cDNA_ID_3063827_gDNA_ID_1620437_Annot_ID_157064 3000 nt of promoter + ATG
atctctgttgcggaaaaagcgctatgatagtattcgtcaaatgtttaccaaagttatttcacttcatctctagttttactttcagtgcctcatgtttggagattagcattctgaagttgtgcgtttattaggttttttttttttcgtttcttaggtcgcaagacacaatctgtatgagaaattaacagaaaatttgtgaaattgaaaatggaaaaagcgactgcaatataaactgattaataagaaacttatcctgaataagaataaacaagtcaactagttatttttcagatgttttgctctgttttgataacaactcttacattgtaattatttcatcgaatgacatagtttatcagagtacatatgttaaacaaacattggatctgtaacttttaagtactctccatctcatagactgcttcactccttattattacatcatttaaaagatatatcatgcattgtcttgtaagattcttttggttgcagcagttacgctgttatcgactcagtgtttgaccggtgggtgacgatttcctgttgggttaggtcccgaggggtgcttatgccactttttttcttcgccctaattccagaaaaaatatcttatagctagtaatgctctctttgttattatgtttatgcaaaattggatctccttacccatgttggcatcactcttgcgttgttcggttttgcgatgatctttgcaggtccaatcttgaaatggactattacaagcaaaagacagggaaacgtatgtaagagggcaaagaaccatgccctcaattttttcaacacattttttgtattatctctaagttgtaattcaagcaagctaaacacatacacacatgagtaacgagattaccttcttgacattcccgagtcacgaatctgctgagaagaagacacatgagaaggagaagcttgatgatgatatcatgtcttctcatatttcttatgtagagaattagctaattaattgttttcatataggatgctgcatcatatatatattggatgtgtaacacgcacaatacaacaattttgtcacatctagttggtactcccttggagaatcgtaatgattacctagcttgaagaaaccaggtaagattctctggttaaaatgtcatttcttggaatcctatgccatgacatttccacttcgaaattagactgtctgtagaaatagagtaaagcattacaacttcattcatatttcttatattttccattctgtgcagatttttctgtttttcggcctacatgacaatccgatattcggttccggtatgtttccaaaccgaaataccaaaatttagtgatcatatacagtagctgatctttgttaattaccttattggtactttcttggtatctagaacctattatcttttgaattgtttgcctattaccaccgattgagttcatatgtggaccaataaaaaccggaccaaaccgagcaattaaacctgatttaagtttaatgtcatttatagcaacttcgtgtagctactactataacttgagaacatactatacgtcggcaaaattttgctgccttcatttcaatttcagttaagctttttctttgtcataatcatttaggtgtcattataaccaccacgaaatcttttttaaaaatccaccacgatttatcatatttttatttgtatgtctcttgtgatattgttttttcaccagcaaagtttgtcggtctcgttttcctggtcagggaattaccgttatgtatgtttgtaattatactgctcgcattaccaaaccatttctttaaaatgtatcctctcggaactttcgatatcgatctataaaaataaagttattagttttataccacttggtttataatgatgatacataatacttttgggattatatgtaaagactatgatcaatcgtgttgtggatcttgtgagttgtgattggtttgcagtttgcactatgtcgacaagactatccttataacttggattaaatttttttttttaatatattaaaatgaaagtttttggttcattatatatttgtattttgtaatttacgggtcacgacaatataatgaacatgattaacgtgctttagttatggccctttatacagaaactctggatcactcatgatggcaacttgatttgatctcaatatttatcaaaagaatccaaacttatgtatagatatagacatatagtttctaaatgacttctattaataaaaatgtaattctttgatgaaaatgatcccgatctatgtaaaaagtagatgtaccggtttgatataattttcaactccggtttagtagatcttattcaatttttttattattttaaatattgtgtttatgtagtatagttaaaacaattttcttatatgtatgttactaacaaggtaaagtagttgaaccggttccacgaaatgaatgttttgaaaagtaaaaataaaaaaccatcaggtatccttttatcgacataacattggcaacacctagacaaataggtccaaactatttggcaacacctacacaaatagaaaaaaataggtgctcaacataattggttatcatttcaaaaaaaaaatataagtatgcgcattttgattttgtcttgcatgtgatatatgaaccttctagtcacataacagtgaattttgatatctttgatttggtacctgttttttcttgcaatctgactaaaccgaaactgaaccgaaaatctgtaaaaaccaaatcaaaaccggttaaactacaatcgttgttagaattttcggaagttaacggaaagtggaaaagtcacaaaaccctattggttagaatagtaaagtagaaaataggtatgcccgtagcagatcccagctctttccatgtgttctcataatgaaaacatcgattcccgaaaattcacaaaatcagaaccttgtcatattaaaaaaatctcaatttcaattctctcgatttctctatcatcatcatccatg

SEQ ID NO: 1707 - DNA, 3000 bp, Unknown
  misc_feature (1)..( 3000): cDNA_ID_3434798_gDNA_ID_1620437_Annot_ID_157068 3000 nt of promoter + ATG
agtcatatgtaattatgtaaacaatagtatcagttttcagaatgtacaaagaccaatacgtcaatatatatacagctatactgttaaaaaatatatattcatttatctgcagttaattaaacttgtttttttaattagcatgtttagagcgatgttatactgtagtagacaagagaaaatcgtttaaaaatttgtatcttcgttgtagatgaaatgtcagctattatgtgtactatatatgtaataccgtccaattaaatgcgatgtgcagctgatagacacgtgtatccaacactaaacatcacaattctcccatcacgtttactaattatggccattataattagcaaagttcacattttatgacttactacataattgaatgatagaggtgctatatggagtttttctcgatatttcgtataatcattaacataaatgcgtttgtcaacaacaaaaaagatttaataaataatctgaataataacaaaatttattataatcgtacgccaaaaatacgttttatagccctgcaggaagatttttacgtgaatgccacatcaattcaatgcataattttgtatacgaaccataataggacgaaaaaaacagtctttttctaactatacttgaaaccaattctagactcaagcgggaataaatacacgaaaccgaattcgtcttatgcagtacatagcatgaatgcaatataatctccataacactatcgctctataagccatatataactcatagtcacatgcagtctcatatatgtctcatagttacacatattacaaaatgtctttaacttttgtgtttcctttctacgtacgcatgtgatgatgcttctccgatgtcttagagagcttgggacgtgaaaggttgatgtatggtgttggatactatcagccaaaaaccgtcaagcaacatcgtacaagattgataaatgtctcacatgtgtagtacttaatagtcacaatttgactacacaaacctctaccgacactaatgtagcaattatatcatgttatatgctcttaaggtatagtatgtataacaacatttcattctgtaaaatatcatcatttatatcaaatttatgatatataaaatatcattatcattttaaaataacactaaaataatcagtgcaattccgtataatcttcatatgaaactgcaagaatccttggtgttccaaagattatgatgattattgtgagctttgatttatggtttccatcttgtcaaaaaatggcttttataaatggtagagctttcttagttttccttaagatatacacaacaggttacaaatataatttatttttgctaaaagaaatagttatagtaaacttgtaaaaactactacaactattttatggaaaatgtcttaaagctgtttcaacttttatacacattactgcatttactattctgaaatcaatttttaattaaggtccttgtactataaggaatcctttaaataaatataaatattaacaataaaaaaatccaaaatttcagaatgcaatggtcttacaattacaataataatgtatttgattgtactaaaaatataccttaaatactcaccaattatcttttataatataatccacaaatttctggaagaggaaaaacaagtaaatgcaagtcacatttcacatttcaaattaccaactaccaactacaaactacttccgcgtctcaaattgaaccactaattaatcactactttatatgctcatcattctttttctttcattacaattctagaataatgacttaaccaaaattcatacaaataaaacaatattttggcttccttcaccaggctaagaattttggtattgaaaatctaagtacttcataagaaactgttggaatcatttaaaatttgtgatcatatataaaaaaatttattcatctttatatttaagagtttaaaaactgcaacttttgtttttctttcactaagtcttatggccacagttaattaaaagcagatgaaaggtggtccaatggaaaaggagaatgtgattgggctagttgggagagttctgatgtctagtgttgggtacacgtgtccgtcagttacacatagcattaaatcagacggcatgtcattattcaaatctagttcacatagtacgactaatagctgataaattaatgattatacagcatatgaattatgaattcaaaaaaaaaaaaaaattgaaaatgttaaggagatgctatattttacaaaattcatcgcaatgctttctactaatttgctaagtggtcttctccagttagtcttgtcgattccaagcgatattattaaatcttgaagcatcgctcaaagcattatagcttaagataaccaaattgttattaaaaacacctagtgaaatttttaaattaaaacaattttgatatctttgtaatatctaatactactctttctgtgtctaaaaggattaattttcaaaaatttcacacatattaaaaaaaaaaaaaaattactagctaaacaattttcaataatcataaaacaatagtaacttaataatttttttttattttcaaaatagtccttcaagtttacaattcattttagtattataatcaacaaaatttgtattaaaaagttggaaaattaatctttgtggaacaaaaaaatctagaaatcattttttagaattagagagaggtttgataaaaaaaaataaaaaaaaatagagagaggtagtacatactaaacgatgtgatactactattgacaaaatcttaattctcagtttagtagaataaactagaaggaatgaatgaagtaaatgcgaatccaactactaacaaaccctacttagtcatcatattttcccatatgaaatccctatataaacccatcatcatctcccacttttttcatatccaacaacaaaaacataagctaagaaaacgaaactcaactaattttgttatcacccaaaaagaagttcaaacaca

SEQ ID NO: 1708 - DNA, 3000 bp, Unknown
  misc_feature (1)..( 3000): cDNA_ID_3063824_gDNA_ID_1620437_Annot_ID_157066 3000 nt of promoter + ATG
ttttttttatcaaacctctctctaattctaaaaaatgatttctagatttttttgttccacaaagattaattttccaactttttaatacaaattttgttgattataatactaaaatgaattgtaaacttgaaggactattttgaaaataaaaaaaaattattaagttactattgttttatgattattgaaaattgtttagctagtaatttttttttttttttaatatgtgtgaaatttttgaaaattaatccttttagacacagaaagagtagtattagatattacaaagatatcaaaattgttttaatttaaaaatttcactaggtgtttttaataacaatttggttatcttaagctataatgctttgagcgatgcttcaagatttaataatatcgcttggaatcgacaagactaactggagaagaccacttagcaaattagtagaaagcattgcgatgaattttgtaaaatatagcatctccttaacattttcaatttttttttttttttgaattcataattcatatgctgtataatcattaatttatcagctattagtcgtactatgtgaactagatttgaataatgacatgccgtctgatttaatgctatgtgtaactgacggacacgtgtacccaacactagacatcagaactctcccaactagcccaatcacattctccttttccattggaccacctttcatctgcttttaattaactgtggccataagacttagtgaaagaaaaacaaaagttgcagtttttaaactcttaaatataaagatgaataaatttttttatatatgatcacaaattttaaatgattccaacagtttcttatgaagtacttagattttcaataccaaaattcttagcctggtgaaggaagccaaaatattgttttatttgtatgaattttggttaagtcattattctagaattgtaatgaaagaaaaagaatgatgagcatataaagtagtgattaattagtggttcaatttgagacgcggaagtagtttgtagttggtagttggtaatttgaaatgtgaaatgtgacttgcatttacttgtttttcctcttccagaaatttgtggattatattataaaagataattggtgagtatttaaggtatatttttagtacaatcaaatacattattattgtaattgtaagaccattgcattctgaaattttggatttttttattgttaatatttatatttatttaaaggattccttatagtacaaggaccttaattaaaaattgatttcagaatagtaaatgcagtaatgtgtataaaagttgaaacagctttaagacattttccataaaatagttgtagtagtttttacaagtttactataactatttcttttagcaaaaataaattatatttgtaacctgttgtgtatatcttaaggaaaactaagaaagctctaccatttataaaagccattttttgacaagatggaaaccataaatcaaagctcacaataatcatcataatctttggaacaccaaggattcttgcagtttcatatgaagattatacggaattgcactgattattttagtgttattttaaaatgataatgatattttatatatcataaatttgatataaatgatgatattttacagaatgaaatgttgttatacatactataccttaagagcatataacatgatataattgctacattagtgtcggtagaggtttgtgtagtcaaattgtgactattaagtactacacatgtgagacatttatcaatcttgtacgatgttgcttgacggtttttggctgatagtatccaacaccatacatcaacctttcacgtcccaagctctctaagacatcggagaagcatcatcacatgcgtacgtagaaaggaaacacaaaagttaaagacattttgtaatatgtgtaactatgagacatatatgagactgcatgtgactatgagttatatatggcttatagagcgatagtgttatggagattatattgcattcatgctatgtactgcataagacgaattcggtttcgtgtatttattcccgcttgagtctagaattggtttcaagtatagttagaaaaagactgtttttttcgtcctattatggttcgtatacaaaattatgcattgaattgatgtggcattcacgtaaaaatcttcctgcagggctataaaacgtatttttggcgtacgattataataaattttgttattattcagattatttattaaatcttttttgttgttgacaaacgcatttatgttaatgattatacgaaatatcgagaaaaactccatatagcacctctatcattcaattatgtagtaagtcataaaatgtgaactttgctaattataatggccataattagtaaacgtgatgggagaattgtgatgtttagtgttggatacacgtgtctatcagctgcacatcgcatttaattggacggtattacatatatagtacacataatagctgacatttcatctacaacgaagatacaaatttttaaacgattttctcttgtctactacagtataacatcgctctaaacatgctaattaaaaaaacaagtttaattaactgcagataaatgaatatatattttttaacagtatagctgtatatatattgacgtattggtctttgtacattctgaaaactgatactattgtttacataattacatatgactggagaaactaattattttggttagtagaagaaacataactacatatgactggagaaactaattattttcgttagtagaagaaactagaaagaatgcatgaagtaaatgcaaaaccaactactaacaaaccctacttagtcatcatttttcccccatacgaaatccctatataaacccatcatcatctcccacttttctcacatccaacaacaaaacacaagcgtagaaaacaaaactcaactaattgtgttatcacccaaaagagaagagcaaacacaatg

SEQ ID NO: 1709 - DNA, 3000 bp, Unknown
  misc_feature (1)..( 3000): cDNA_ID_1008901_gDNA_ID_1620437_Annot_ID_157062 3000 nt of promoter + ATG
cgttaccattatcggacctcctgatactctctagtaaacaactctcttccttttttgctttctttagatttttagctacttttttttttctgattcttgattcttgtggaacagttttttttttttttttcttcattgatttcggattcgttgattcatatgtaattgttgttacttgagattgaacattgtagatcacataattgtgtggttttcgtattctctctttgtttgtatcggaatttttttttattcttgatttaggtttgttcttatatatagttcagatagtgagatatcgaattgatgtcaatgggattgtattgggaaagatgaaattacccttatctgcaatgctctttatatgatagttaccaaagattttgcttgttgtgcatatggtttaaaacttggtgtaaaaatgcagtgaaggaggattctttaacgcgattatgacatttccgcaaaactatccgaatagtccgccaaccgtgaggtttacttcggatatgtggcatcctaacggttagttttctctctatcggttttgatcggggaaggattcaaaggaatatgaatagaagacagacgtttgaatggtttacttatatttgtcctgcagtttattctgatggtcgtgtttgcatatctattcttcatcctcccggtgatgatcctagcggttatgagcttgcaagcgagcgttggactcctgttcatacagtatgttcaaattgatttgagtttgttcatttttgttcgcttcatagtagtagattctatgattagagttactatagttcagacactataaagggatctctaggtgatttatttcatgtctcagatgttcatgccgtagtgaaacaaattatggtgctttcaggttgagagtattatgttgagtatcatatcaatgctttctggtcctaacgatgagtctccagcaaatgttgaagctgccgtgagtatttcaatcgatttatcgcacatagcttgcaattaagagcagaacatgcttatggattttgtgtgttttctcttgcgcagaaagaatggcgagataagagagatgagttcaagaagaaagtgagccgttgtgtcagaaagtctcaagaaatgttttgatcaacgtcaaacttcacacctttgagatctctggagtttcaatcaaaagttcttcatattcctatctgaaaccctttgaaacgcaacttgttataactcggtttacatctctttttgtcgcgttcgagaaccagagcgttttgaaaggtgtttggttgagaaaagtgctgttcttgagaaactggtattaaaattataaatttcatttgttaagaatcttctttgcttataaagttataaacctataatatcagcaatagtttgctctctgattttgcgctgcttacacttcacagtttgtttgttttgaactggaacttctgccattgcgcttggaatgacattgtttccctctctatagcttcataagtacttgcacagtcattgtcatcacaacccatgccggtttatccaataaaaaccggcatgcagtttatattgaaagtatggaaactgcgtgatgtctacttcaatgtgagtgggtttaagccaaattcattggaaaggaaaatgggagattcttatttagcgaaagggtgatgtccacttcaatgtcatttgaatgtgtttgagccaaatttcctttccaatgtttgattcgcaaacttgagagaacctttgggttatattagcttgatgacttatccggaggtcttcattttcttggtagaagaagtaactaagaacttacacaatcttactatctaaagatgtgaattcaattattcattttacaaaagaagtgtagcttctgctttttattctgtcaatagagccaatatatagttaacaatgatccgacgactaaagatgtcaaattgaaatcatgtgcttagtgttgataaaacgtaagtcatacttctagtttggttggtgttaaccaaaagtaagtcttactcaattgaacaaatgagtttgttgatagatatctcttaaaaaaaattatgtcttcacaaatcttgtagatctttaatacgttttttccccggatgtttattattgtccattttgttaatttaatattccaaaaaataatttaattaatttattataactactcacatttcaaagtattttctctaggatatgtatatgaaaactaaatatggtggatggatggtagatgatgagtttggagacaatggtggatgatacatggtaggagggttgatggtgaatgattgattgttaaacaaagtgattgagaagttgttgacttgtttactattatgtaaatcgtagtatcgatcgttatatagcaattattaatagatactaaaataatagatgtaaaatacaaggaagagtatactataattttcaaaaaatttttaaaaaaacaaacaaaattcgattacagatttacagataaaaaaagtataaagataaatatgtctagcttaatccacgtcatttagctgtaaatggaaaataaaaagctgtatgtgaaaaaaaaaaaaaaaaaaaatctgcaaaaagtaaacaaattgccacgtaagatatctgttaggtcaaacgttgacgtgatttagtagctaacgtcaattagttaatttccgcatttcgtgtatttgaagtctcttctttaacttaaaattatttctgtaattcctttctttaaacaaaacagaacgaaataaataaaaaattcttcgattttgttatttgttagattgaagttcagacacctaggactataagtagacgatctcttattgtcttgtcttctcatcagacagacatcagatcagaagattttggtttcaagctcttcttctacgattccccgaagcttctggtaaaaatctaaacgaaattcccaatcttgtccttagcaaagtttcggtttttacctcttgacaattttcaatg

SEQ ID NO: 1710 - DNA, 3000 bp, Unknown
  misc_feature (1)..( 3000): cDNA_ID_3063847_gDNA_ID_1620437_Annot_ID_157053 3000 nt of promoter + ATG
tggtgacacctcattggttcctcgtaattgccgaactttctttcaaacaacttacgtttagattggaacattaagcttttacagactagtggttaggaataggaaaaatatttgtgttttgagtttaaagtttgtgtttttcaaactagatgttgagtttggcgcatggttttgaaataaatttaaacaggagaatccattaaacacataactcaacatcgagtttgaaaaatgtatgagatcgggcattgttcattatcaagaaaagcattttgtattaatgtatataactaatcatgtgtgatgtggaaattccaacgacaaattggtaagatttcaattcaaagttacaaaacaaagacgagataattaatcaaactagctaggacaatatattgtctccttaccgaaagctctccaaccacctactaaagtaactaaccatgtttcagttataattttattttttcgtattcctatcaagtatcaaatgatatagttaaccaacatttatatatatatattgaaatcactaaacaaacaacaaaagtaacatagattttaatggaactaattttcaccttatatttttacataagatttgaaagtgatggttagtgacttgttggtcgatgacgaatttgttttcaggttaaattttaataataataatatttgaaagaaagatgaagctttcacgtggcacaatgtatttgcctactgtcaacttcaaaaacctggcaactgctatgcagcttcagaggacacgtgtcatgtgttacacacgcgcttcgttttttttcaaccttttgattttgttttgttctgtgatgtgggactcacataattcaaatcatcatcctattgcttgccgccacgtcccagagaattttccgcgaaaagctgagcttctctctttctttccttaattttagttaggttatgaattatttttgtattaatactaactaactaaaatatcatcatcacattacataaacataagattcatcggcgtaacgtaagtaacagttaaagcccaaattacaactctcgatcctacttaatgcatagtaaacgaatgttgacacagaaaaaatcttggtcaagacataaaagtagagaatgtaaacacgtgtcgaacatcgaggaagaaaacaggtcagagaggggtcaacgttgttaaatgttagtaatagagaagtggtccccagtttccaccaaaacccatctacgtacttgtatctcattggatgtcattcctgattgatttagaattgaaaacgttatattttgtttatttctaattgttgattgaatatcttataatttttgcccacaaaagaaaattataagtgtataatatatagttcactcgaatttaacatgtccattgtccaatgtagaacgtatgatcatttctgtttttcagttgcttttattttaaattcccaaaaacccaatattgtgtcaaacattggagaatgatgttcacttttattgtattcacaaaatgctacttatcaactaagaaaattgtaatgtcaaacataagatggtgatattttaaaaatagatgtaaaattagtttagaactgtctgataagtcataagattgcacgattataaatcattgaatattccggacacttgtcaagattaaaaccatgaataagttttcaaattcattttcatcatctcaattgtaaaactaggtaagatatcctttaaaatctttgaatattagttccccggcccatataaaatctcttaaatatatttatttgaaaactctgactgtttgcacttgcagcataaaaaaagggatgaaacaaatggaacaaatgcagaacaaaactaatagaccagacaagtaaaacaaacgaaacaaaacaagtgttgaaatgataactcacaaatttgaacttacttttctagcaaataagaaattgttctaattaaaaaaaaaagcatatgcagtctcaaattgtttctaagaagtattcacgcaccaaggttatatttgtagtgacatattctacaattatcacatttttctcttatgtttcgtagtcgcagatggtcaattttttctataataatttgtccttgaacacaccaaactttagaaacgatgatatataccgtattgtcacgctcacaatgaaacaaacgcgatgaatcgtcatcaccagctaaaagcctaaaacaccatcttagttttcactcagataaaaagattatttgtttccaacctttctattgaattgattagcagtgatgacgtaattagtgatagtttatagtaaaacaaatggaagtggtaataaatttacacaacaaaatatggtaagaatctataaaataagaggttaagagatctcatgttatattaaatgattgaaagaaaaacaaactattggttgatttccatatgtaatagtaagttgtgatgaaagtgatgacgtaattagttgtatttatagtaaaacaaattaaaatggtaaggtaaatttccacaacaaaacttggtaaaaatcttaaaaaaaaaaaaagaggtttagagatcgcatgcgtgtcatcaaaggttctttttcactttaggtctgagtagtgttagactttgattggtgcacgtaagtgtttcgtatcgcgatttaggagaagtacgttttacacgtggacacaatcaacggtcaagatttcgtcgtccagatagaggagcgatacgtcacgccattcaacaatctcctcttcttcattccttcattttgattttgagttttgatctgcccgttcaaaagtctcggtcatctgcccgtaaatataaagatgattatatttatttatatcttctggtgaaagaagctaatataaagcttccatggctaatcttgtttaagcttctcttcttcttctctctcctgtgtctcgttcactagttttttttcgggggagagtgatggagtgtgtttgttgaatagttttgacgatcacatg

SEQ ID NO: 1711 - DNA, 3000 bp, Unknown
  misc_feature (1)..( 3000): cDNA_ID_1976766_gDNA_ID_1620437_Annot_ID_157046 3000 nt of promoter + ATG
caacaacgtaatcaattactagagattttggggcaaaaatagaaagagttattccccttcataaaactgtgagtattcgttaagacttaagaggcacatcaacttaaatcggagttgaaaaagagaaagaacagttgtaaacgagaactaaacggaacataccaattcaagagagatacaccaataagagaagtttaataacaaactttttcttcatttttctttctttctgaacacaaacccatcaaagatggtacgacaagagtaaatgaagagatatatattctacatggtcttgcatcgttgttacatttcatcacccaaaacttgaagagaaaaaaagacagtgaataagcaatagaaaacgaaagtttaaactttcaattaagtagagcagcaacctcttttgccagctccagatgtgtcttcaacgttaatcgttgttccttgccccggaatggcagaattagcagccgctgcttcttgagcagccaaagcttttttgctgatgatgtggtaaatctctgctaacacggtttgaaatgctttctccacattggtggcttcaagagctgatgtctccaagaaagagagaccttctgtctcagctagagtctgtccatcttcctccgcaactgatctcaagtggtttagatcagctttgttcccagccatcatgatcacaatgttggaatccgcatggtctcttagttcacgtagccacctcagaacattgtcaaaggtttgtcttttagtgatgtcatagacaagaagtgcacctaccgctcctctgtaataagcacttgtgatagctctgtaccgctcttgacctgcagtgtcccatatctgggccttaacagtctttccttcaacctgtataaacataaaacacacaaaaagtaatagttaagccatcaacatttttcaatacatcagctgattatgttaatgttttgatgcgttgacttctccagggatggagagttgactttaatgataaggaaaaaaaatcataattagggacaagttgtgggaagctttttgtccattgggtttctccaccatctatacaaaagcaattcctcatgactcatggccagcacattctaagattctctcttgatattaaaatctctaagcaataaaaaaccaaattcaaaaagatgagagaacaatgcacggaatagtttaaaaagttaaaactattcaatgcgcaagacaccacaggatcatttcacttacatggtacctaacataagcatgttccttagactgaccaaaaaggatatgtaaaggatgcaactttacaagtaagaagagtaaaaataagaacacaactgcatcaaatgaactatcgttgacctaaatatgagatcatgaagcagctagccaaccaaaaggcacaaatcttagatcctaagatagagatcacgttaaaaatgaagaaatagcttgaaattgacatatgtcaagatcacagacgcattcagaaaacaagatacttgttcaaatttctctgaatattaccacttgtgaatttaagactatcttttctgctcattctcccaaagtaaaggaaaaaaaaagctacaaaattagaaatcacctgaagagttctggtggcgaattcaacaccaatagtggacttagattccaaacaaaactcattccttgtgaatctagacaagatgtttgttttcccgacaccagaatcaccaatcaacacgatcttgaacaaataatcataatcctgttctaccctatgcgccatttttcctctttgatctcacctataaacacacatatcccccagaaatcaacaagcgatcttcataaagtagacagatccaaagaaattagccccagtcccaaagtacataccttttgttttttccccggaaaaatggcggatgaatcgtgaaaacgaatttcaattgaccctcttcagatctgttgaaaggatgaaacttttctctccaaggaacactctttgaattatgaaattttttcagggaattgaggaaatgtcagaggttattgaatgttcttatttcttacttataaatacgtttatacgtatgaagatgatggtcgtattgtataactggcttttcaagttgatacggaaaataaaacgacgccgcattaaagaaaatgacaaaagggggctgaggtggcaggtaaatggtaggcagctgacaaaaagtaagtggctgtttcaagggtattatgggaaataatgacttaagttattatcggatacggtaatgactctcatgttaacattgtaaccagccaattataaagagccaagtcatcaaataattatgtgttggtgatgatctgttttctgttggttgattgatcattatacatttatactagtagactaaagatttcaacgtcacttttttggtgataagtttgaaaaagagtaactcaaaccttattaagtttttggtttatgtgtaactgattgggattagagaaaaatagtaaaatacatatctctcgttttacttgtgatcaaaaagattttgtatgattcctaggtgaatcacatctttcgccaacccgtaaagctctggttatgattttgataaatgttccaaggtttctttcgtctttaagtttgttttctataactttgaaaatgtcagaatttggttcttttgaattatcaaaaatttcataatttatactgaaccgcattatttacaaattagtcatttctcaaaatagttcttttgaatttcaattaaaaacggataaaaaaaaggattggaataaatttcagctaaaaaggaccgaatagggtgattttagtgggctaataacaagattatgtagacatcataattcataatgggcctcgtttgaaattgagcccataatagtttgggatcaaccaataacttagtcggtctttgcgagttaagaaaccacgccgcggtagagagaaagagaggaaagcttaagccgacgacgacgacgaagatg

SEQ ID NO: 1712 - DNA, 3000 bp, Unknown
  misc_feature (1)..( 3000): cDNA_ID_3063859_gDNA_ID_1620437_Annot_ID_157047 3000 nt of promoter + ATG
ataatcatatacaacgggagaattttattttttttcgatgtggtaagtcaccatatttttggaatctataacgatagtaacatgttgtcagttccaataaaaaatatctcaaagagtacaacaaaccgacactaatgtgtgacttaggattggtatttgtggcatgggaagggtcgtcaggattgagagaggagtggtccaatagtttggggcctaaacgtgcttacgacttttggaacaatttggaggcagaagcaaccaacagcttcgtcttggataatgtgcctagacgatcttggtttagagaatgtgattgatatttgagagtgatgcaagtgttctgtttcgggcagttaatgatgaagcaagcctggcccatctctgcagagcctttacacgagatatcataggaaaagacaaagacaacgaaccagcacatgtgtgctgatttcattgcgaaaatagcactttcttttgtgtattatgccgttttagataagtgtatttccgatttgcttccaccaattattgagatgaatagtcacacacttttgtattctgtctaataaagtagagaaattttcaagggattcggcaccaaaccaaatcattattagaatagaatgttacaaagctttgataagttctttgcatataagtaactagtaacgcggacgccacaagaactttgatgttgcagttaaaaactaacagctagtaaagaagtacatgacttttccttagagctattcaatagttcttcttgaacccaatgcagatttatccttttgattcacacaagtcgaataagattcaacagcgttatccttttcattcttcaagtgtgaagatagttagcagccatcatcagctctagagtcagttcaggctcaatatgaaactctgtctctttgcctctgtcaaaagatggaacatatgcataacagtagttaaagactatacaactataaaaagagagaaagataggagtggaggagcggtaaaagaagaatccaattctagaaaacagtaacactttcaatacattggttcatagagataaactaatgagactaaacgcaggacagtgcaatgaggtaaagagttgcaatgtaactatatccccaaaggatgcgtatgcgttcattcttatcgactgatccactaaagtgaaacttggatagttacaaacagcgatgcgattctgaagaaaactaacagagactactacaatgccatgttctagagatcaatgtagagcaagaggtgaaaagcgagttagataatggaacctggagtattgaagagaccagtagaagtactggcaaatcttctctagtattgtggtgcttatatcagggaaagtcactacgccatctttcgattccgagaaaccacctaccataccaaataacaacagaattactaaatttagcatctacataatgaaattgagaatgatcttatgaatttggacttgcttctttattcaaattacgtaattgaatttccgattgagcataatctctcgctaaatttctctcaaattgaggccaattcacaactaaatcagattaagtatcacagaatccatcaaatccaagtaagatgactagatcagaatcttgattacgatcaccaactctacaacaaaagaggagaagaaacctggagaagtgagcatgcttcggatagtctgagaaaccatagcggcttctctgtcgatgacgaactcgaaaccttccatgcttatcaacttcaccgtctctctcatcttcgtcgtcgtcgtcggcttaagctttcctctctttctctctaccgcggcgtggtttcttaactcgcaaagaccgactaagttattggttgatcccaaactattatgggctcaatttcaaacgaggcccattatgaattatgatgtctacataatcttgttattagcccactaaaatcaccctattcggtcctttttagctgaaatttattccaatccttttttttatccgtttttaattgaaattcaaaagaactattttgagaaatgactaatttgtaaataatgcggttcagtataaattatgaaatttttgataattcaaaagaaccaaattctgacattttcaaagttatagaaaacaaacttaaagacgaaagaaaccttggaacatttatcaaaatcataaccagagctttacgggttggcgaaagatgtgattcacctaggaatcatacaaaatctttttgatcacaagtaaaacgagagatatgtattttactatttttctctaatcccaatcagttacacataaaccaaaaacttaataaggtttgagttactctttttcaaacttatcaccaaaaaagtgacgttgaaatctttagtctactagtataaatgtataatgatcaatcaaccaacagaaaacagatcatcaccaacacataattatttgatgacttggctctttataattggctggttacaatgttaacatgagagtcattaccgtatccgataataacttaagtcattatttcccataatacccttgaaacagccacttactttttgtcagctgcctaccatttacctgccacctcagcccccttttgtcattttctttaatgcggcgtcgttttattttccgtatcaacttgaaaagccagttatacaatacgaccatcatcttcatacgtataaacgtatttataagtaagaaataagaacattcaataacctctgacatttcctcaattccctgaaaaaatttcataattcaaagagtgttccttggagagaaaagtttcatcctttcaacagatctgaagagggtcaattgaaattcgttttcacgattcatccgccatttttccggggaaaaaacaaaaggtatgtactttgggactggggctaatttctttggatctgtctactttatgaagatcgcttgttgatttctgggggatatgtgtgtttataggtgagatcaaagaggaaaa

SEQ ID NO: 1713 - DNA, 3000 bp, Unknown
  misc_feature (1)..( 3000): cDNA_ID_3063882_gDNA_ID_1620438_Annot_ID_157088 3000 nt of promoter + ATG
gtaaacacactcaaaagtgttgaaattataatattacatattttgctcaaaaagagctaaggctttttaaatgtacaaacaaattctcttttgttatatatttctagatttgtctactttaaacgtatgatgtgtttaacacttctttcaacaatatacgtgtatgaataaacatgttttcgacattccacttatgtcaatatcaacacataattttatggctaagcagtaaccaccagctgctgtgtaaaatcacactttaaaaaagtttctttagcctacatctctacgatcatgatgcattggcaataacaagatgacaacaaattttacaaaacaattctcataccatgtggcttaagagaaaaggccagcgaatttattcgaacccaacatatatagtgaagatgtctttttcaatctctttttttaacaagtatactttttttttttggtaaatttcttttagtgaatttactttcatcttgaatcattctttttattttcaattcagttttgttgataatagattttcatgaacgaacaaggttctaagagataataataataaagggggaaacaaaacacatgataataagaatctaataaacaagagaaaaaagagaggtgatgaataaatgtagaagtcgaatcatacaagaggtgcttgttggaaggtcgttggaccaacgcttattgtgatattcatgttcgtattctctatgtaggtttttctttatatcttcccagcatatacgtagttatttaagtttcttagaaaattactatacattgaatatctgaaacaattaatcatgatattatggaattttttttctttcaaaatttgtataaagaaaaaggaattttatagtgggggcattttagcatctcgtcgaagatatgaatgaatagagaattttgcaaagtgtaaagaaaacaaccgaccaaacccacttgttctctcacgtcctttttatgtgttaaattgtcatacacaaaaaaaatatttacaattataatttttctaaagtctttaatgtcaaaattatatgatctatttatatcagtaatacaaatgtaaatcgctatattttatatttttgttaaaaactaaataccataatttaaaagaaatattttctttttctttttatttgcgaagatattgtttagtcgtatggcattgtattagttacttacttagtagttttacagaacgaggtgaagaatgtcggaaaaaagaaagaggtgacgaagaattttgaccaatttgctactttgtaagggaaatataatacaaaaaaattgtatttagcatcattacaaacaatttctccattttgttttaacttttactatcaattttattatttttatacgaaacttataattaataacacgaggtaagcctgttttgttaaattgagtatgtcaattcatttcatgagataataaccttcaaataaagttcataagatagttgccccatatcggtaacttaggcttataaaacagtcttattattggtgatataaaacagtacttaactacttatatataagtacttacaacttattcttattattgttgatataaaacactaaagttgggttaaatcttaattccaattcagctgtttgatgttggtttaaaagtctgtttgcacctatgattctatgatataccgaaccgattcgattaaccagtagttacgagaagttatttgtttcaactaactatctattgatttgatgtaactagtttggtcctctgcgtataaaaggaacattacagaagagattaaatgataggcaattgataattgagacggttcaagaaaagatttagcaaccaacaaccttaacaaattttcatttacgtaactataattatagatcttgctatttttccattttatggcgtcttcttattacgaaactcatactattcagtcacataatctcatttactggactataatgggctttattgtaatgggctttattgtaagacatgagcccacaaatttggaaagtaataagcttcagctcagctaaagagagtctaaaaaccaaagggaaaaatgtcattaaaatccccaacttattgaaaaagttgatttaaatcctcaacttccaacgaaacgaaataaatatcaaacttttgttgattttccaaataaataccaaattttggttgactttccaaataaatatcaaacttttgttcgagtagccatattaagtatgacattaacagaccctgttattagagtccattttttgttaacagactcgttaattgaaaacgacaatattccctataacaataaaacaacgtcgttatgtcataaatgctcaattaaatcccaatttcaaatcatatgaagatttagggttagaattttgcttgatttggagatttaagattggatttgggaatttaattcggtcgttataataaaacgaggtcgctttcttgttataggaaacaataacgttttaaattaacggatctgttaacagaaaattaactccgtgaacgcaatatgttaatctacttaatattatacctaatatgaccatatatacgaaagtttggtatttatttggaaagtcaacaaaaatttgatatttatttcgtttagttggaagttgataatttaaatcaactttttcaataagttggagattttaatgacatttttcccaaaaatcaaggggagttttatggttttatctacttgacccgacagagaaatccggacccggataaaatccgacccgttcgaatgaactcatacggccgagatttttccaccaaactcgacggttaccactcgtttctttgtccaccatcttctctctctctctctctcaacccccgaaaatctccttttcccaaaattttccgattatctcacgccggattgtttttcaatcgccgtcttcataatctccggcgactgaaatcagtctggtaactatttgaattttc

SEQ ID NO: 1714 - DNA, 1418 bp, Unknown
  misc_feature (1)..( 1418): cDNA_ID_3063866_gDNA_ID_1620438_Annot_ID_157099 3000 nt of promoter + ATG
atttatccatgtaacatcacatacacacacatgaatacgtttaacgtttgatctcatacttctcggatttaactcggtttgacgaaagtaaaacaaagtattagaccttggtccaaaatgtagacatcacccctctaataataatgaaaactcatgttatttgggaggagttgtttagagtgattagatccaagaaaatatgtgaacttaattagaaatttcttagatcaaaaaagagggaaaaaaagaagaattgcactctaaactcatacaatataatccaaagtcttttcggttatagattttggtgtacggaacttatctgaaaataaataaataacaagtttgttcgagctacctaaaattagttgattccaattcaagtcattttaaaacattatacacgattttaaaatcgcaaataattaagttgagtgaccaaatgtataggtaaatcatgtatgagtcaaataactgtgcctaaaattgtaattttatgctaaaatgttgattttcatatggactattaaatgaaaaattaacggtggatccaacaagcaataggtgaataagctaaagcaaacccaagaagacataaaacgaagcacaagaagcatattttcttaagtttgaagcaaacaataatttactctatacatttaaatttcaactcgggattcgaattagaagactcgaagatccgacatggaggcatggaaatatttaaaacttacctcggtttcatagatctcaatttaggactatagtttaacacattactacgtctacatgttatatttaatcatctaattaatttgtctcgatttttgttttttttcgattctacagacatacgttaatgtttgcttattccactccccgataataatcaaaatttaaataacaatcaaacacttacccgctgttttggtctgtttctaaccaaacaatgataatcattttgtcatgctcatccaacattagcacaagtctaaacaggccttacacatcagctcaataaagccttaataggcccaattaaaacagtatgggcccacattcttccttctcttaaagcctaaacagttggcgcgtcaaaatcacgtggaggagcactgaagccagtaggtgtctcttcacaggatcatttccttaaagctcattatcacaaaaacaaatccttttgattattattactgaaataaaaagcaaagtgaaaaaggttttaaaaacttttattttcgctcttctccagaaacattccgtttcagatatttttgatttttgaatttgttttcgctctctctctctctctgcttagattagatctgttcctgtgaattgattctctgtttcatcgtttgctcacgccgccgttttcgccggaggtggaagctctcatcgccgtttcgaaaatg

SEQ ID NO: 1715 - DNA, 3000 bp, Unknown
  misc_feature (1)..( 3000): cDNA_ID_2142757_gDNA_ID_1620439_Annot_ID_157106 3000 nt of promoter + ATG
ttatactgtgattgcgggttcgggaagtggtcggagacatgatctaaggcttgatttgcatcctttggtgagcattaatccgaaatattatgatgctattctgaatggtgtggagattctcaagatgaatgatcccgatggtaatcttgcaggacctaatccagatcctctagtatcaccagacttaataccaaaccgtgcaacgccgcggattcgaaaaaataagtcacatattttgccgatcacacttgcagtggttggttctttagttgtgctagcaatgtttgttgttggtgttcttgttatcatgaagaagaagaagaagagcaagccatctacaaactcgtcatggtgtcctcttccgcacgggacagattctacgaatacaaaaccagcgaaatctctgcccgcggatctctgtcgtcgattctccattttcgaaatcaaatccgccacaaatgatttcgaggacaagctaatcatcggagtaggcgggtttggttctgtctacaaaggacaaatagacggtggagccacacttgttgcggttaaacggctggaaattacatcgaaccaaggtgctaaagagttcgaaacagagctcgagatgctctcaaagcttcgacatgtacatctcgtctctctaatcggctactgcgacgaggacaacgagatggtactagtctatgagtatatgccacatggtacacttaaagatcatcttttcaggagggacaaaacctctgatcctccattgtcatggaaacgaaggctagagatttgcattggagcagctcgtggattacagtatcttcatactggagccaagtacacgatcatacatagagacatcaaaaccacaaacatacttctcgatgagaacttcgtcactaaagtatctgactttggtttatcaagagttggtcctactagtgcttctcaaacgcatgtctccaccgtcgttaaaggaacgtttggttacttggaccccgagtactatcgccgtcaagtcttgaccgaaaaatctgacgtgtactcctttggagttgttctgttggaggttttgtgttgtagaccgattagaatgcaaagtgttccaccggaacaagcagatttgatccgatgggtgaagtcaaattacagaagaggaaccgttgatcagatcattgactcagatttatcggctgatatcacttcgacatcgttggaaaagttttgtgagatagccgttagatgcgttcaggaccgtggtatggaacggccaccgatgaacgacgttgtttgggcgcttgagtttgctcttcagcttcacgagactgctaagaagaagaatgacaacgtggagtctctggatctaatgccaagtggtgaggttggtacgaccacggacggagaagatgacttgtttagtaggactacaggacacgtggggaaatcgaccacgaccgatgactctgttctagttgttggtgatgagaggagtggttcgagttggggagtattttcggagatcaatgaacctaaagcacggtagatgatggcttggtaaacaagtattacattcttgctagggttaatatatttgtgtatgtataattgtggaattaaaaaattaatgtatatatatatattattatgagttacatgcgtagcaggttaagttaatcaaaaaacaaaaatctttgtaattattatgtctctctcttccttgactcatgtgataagatattatcttatcaagtttccagttatcatgagtcatgatccttgtagatgattaggctaagcaaaatgacattaagaactaagacgtttgtctaatctagagtggtgttaacatttttcgcctaatgtatgtgacaatataggattcgccaaatcctttatgacaatttttaatctgtacaaatctgatcatcatcgatcccgatacacaaaaactaaactaaataaccaaggactcggcacaaagaacacaagtcctgaagtccaatatcgattagctcaacattgaccttgatggggataaggaaaaattaattcaaatcttggagaataaccgagaaaaaggagaaaattttcatatccccattcgaggaataaggaagttaaacatatctcgaagtgaagactccctcgtataaaagtgaagttcgacagccagccaatagatccacaacttcacgcttaggaaccctacatttagttattgctaagaaccttaacttgctcttcaagataggggaaaatccttttgtaacaatctaatttaaacttgatttttgtactcttttctattttcagtttacttgtgtgttttactcgaacagtcacaactacaaatgtttttaacagattataacatttgcttatgtataaatattctttctttgggtagtcggtacacataatcttttgtttaactactacggttctcgagtaaataaagattgtttatgataataagattttatcaaagacgataattttttattttttaatgagaaatttaattttcctttttctctattttaaaaatatttagtgttaaggctaagttgtagtagatagatgtttatttagagaatagcataaacctaaatttaattatgacgtatatgtatattttacatgaagataattactaacgccaaatcgataaataactgttttaattattatttttcttaaaacatgatattgataacaatctcatcaattaatatctttcaaaaacaaataaaatataatattcgtggaaatttatcaaagaaatctagttacgttctatatatataaagaggcaaaataaataatagtctcgttcgaattaagttatatttattttttaaaggattaaacgccgccttcatataaaaaaaaggaaagtactaattatcaaaaaataaaaagaagtacacactatatatatctaagactttcaaaaccctaacacaccaaatcttaaaggaatcccaatctcatattacttttttctcg

SEQ ID NO: 1716 - DNA, 3000 bp, Unknown
  misc_feature (1)..( 3000): cDNA_ID_2105352_gDNA_ID_1620439_Annot_ID_157109 3000 nt of promoter + ATG
aaaaaaaaaattcacaaatgcaaataagatcttaactaaaattcataaatagataataaaataattaagtcgagaaaaagttgcagtgcgtaaattttattcacggtcatactctcaaattttatttattttctgattataactctttgtttcttcggtcggggtttccgtcgatttggatgatgatgaggatttaaagactcatagttcttcaactgtaatatgttgtattagtggagaaaagaagctttagtctcacaccgacgataagagttctaccggcagtgtagtaatacatagtagaagacggagatctaagatgaaaataacagagacaagaatttgatcaagggaccgaagattcataagatttcatggaatctttgtcgataggggaggtagactccggttcggcgagctgagccaccatcgaaggtctattttttactccttagtatttctctctctcacgatcgaacaagtatctcctcgacaatgacaatatcatatatcttcttccttctcaaaacggctatatagtggtgggatgacagcggatcttggaaaatcatcatcattcagctcacgtcgcccaggttcattggatgtcctgttccgacgagaatctgctcacattggacggcgtcttcaattgtgttctatgatcagatattagaatttcaatatgtaaccggtttagttcagttttgtcatggacatatatctggaaatattctattgcacatttatttataaaaattgaaaatttttaacaaaaaaaaaaactaaaattcataaatgcatgcataatacatactctaacgcatgtttatatgcaattatgtacagtatattattattagtatataccaaactttgatttgtcttttcaaagtccaaaatttaataatactttgataagtcaagtcggcatgtgatgttcttttctttcacaaaacaaaaagttgggtgggttatgcaagtagacaacgatgtggggaagatgatggtttacaatttgtcttagtgctatcaacaaaaacaaaaatcctttttttgtcattatattacccaaaaaatccaatgatccttattattactaagaaaattatattactaactggtcgttttaactatattttctttttatcatctacaacttacataaacaaatcaaaattaattttgagagaagaataatacaaacaagtactattcatatgtcttgatcaaattattttgtcatcactctattatacactccattaagctatttctttcaacaaagtatgattccatctatttctttagatcattaattttgttggtcaaaataagtaaatatagaatttccacttaacatatgcatgggcagtgtaaattaggtcgattaaactgtaaagagagggattaaatttataattacaacttaagaccaaaattatgtggaacataatagataaagtgatagtgagtagacaatttttgacattctgtttgatagaaatcacaaatttgatgtacaataacttaagtatgaaaagaaaattaaaactcaataggatccatagaaaacatatgtatacaaaagactttattaagcatatgttttcatgatattcgacaaacaaagcaagcaaatcaaatgacaaatttcatgtatattaggcagatagctaaaaaaaacaacaaatataacacactaattatcagtatcatactttagccgaatatgagataattcagatgtatatcatcatataaatggtcaaaaaaatatgtggtatatgaattgttcaatgttagattttatgaaaactatgggtaaagtggggtttggcatgttagctttccctaatatgtcactggaatagaaagctagcacgtcattagaagaaaccaaatgttaaatgatccttgacctaaaccaacagaacaatttatctaaaactgttattatttaaatccattaaaacctggtaaataaactatttactattatggttacatttatcctaaaaatcaattggatgatataaacgcgcggatcatcttctaattaaaagaaaccacgtcactagaatatttgcatgaataggttagtgtaattatgcttcttggaagatgcgtttgctattctcaccaccacctggtatatagaaaatgatctgattcgttatgcagttgattaattgtataccctttaccaatattctaagctaacaccaatgcgggaggacatttattctgatgatgtcctttcaacggatcggatttgagtaccatgtgtcacattatggtacattttgattcttgaaatttctctattacattaatattttaagtgtatacataccacacaaacataatttgttttaattaaattaatttcataaagaatagctttaatggattaaaagtatataatgtaaaaaggccaatccaatcaaatttgaagtatctacccgaaaaatggatcatatgataatttgttttaatggatttaccttttatttatctaaaaaccaaatctgaatttgaacctaaccctaaaatataaaaagttattcaaaaattaaattattaaaaaggtatatattaataaaaaaggaaacaaataaatttaattctcattttgaaaaatcaatactattgaccagcttgcaaattcatagtaccatatttttctacaattttttgtcgacacaatacatgactctcttttatcatcctttcaaaaattattttttcaaaatatattactattatccttcttctctttattatccgagtcaaacgccgaattctcatattctacataagacatggctctctttattatccttcctgtatattttttccttcataatatattactatccttctcgtttattaatacaaacttgaattcttcttcttcttaactttgtctgtcaattcacatatatatagtaccaccatcacataagtatctcataacacatcatggtgaacgaagaa

SEQ ID NO: 1717 - DNA, 3000 bp, Unknown
  misc_feature (1)..( 3000): cDNA_ID_2142769_gDNA_ID_1620439_Annot_ID_157110 3000 nt of promoter + ATG
atctaaaacggcatgatgtgcacttacgccgatgcaaaatccttggtttggaaataacgtgacttggaacgacacaatggaggccgagtcgtcggagctttgtaacgcggggactaacgggtacaactcggtggaggggaatggttcattgccggataaactagagaaatcagcgtttgtttcggcgacgctgaatgaaacgtcgtcgttttgggagtagacaatggttggtttgtgatcaagtggttcccatataagtttgccagcgagtgggagatagtgagagaggcatgaggatagagaggttttgagatttgggacgatgactgagtcaaagaaagggcgagttacgttggtgattcggtagaagatgactcgttcgacggcgcgaagtttataatagataaggtcgaaataagtgagtgggagactgagtgactcggccgagtcagagtttgaaggggtgactcgtgccacttcgatgatgttaagtgatgaaaccatttctccaacaatcttgtggtaagagatgtacttaaccggtgatgatcctataaatagatagtatacgatgtattaaaaaaaacaagtaaaatgaaaaataaatctaattactagaaaggataaggaaaaggataacataaatttaatgtggttgatatcacatgatattcgtagattttccaacattgtttgtcgagtagcattaattaagacacatgcattcgattaattaagacttttctgtttacatggttctgtttagtaaattagaggatcatatatcgagtttttcatagttcatttattttacaatttttcatataactctacgtctgaaattatagctcgaaaacgttttatggcatagtatttagcataatttagaaggtcagcaaatgcccatttcgagctaataaaaaatcatatcaacatgttgccaagagatcagaggatggtccccctccgaatgctttcgacaagttgcactacaatatcaaatcagaagaccgactaagcatttaatatccattaattgtttcaccggtggctacgcatgacatcccatactcgtggctagccgcacacgactctaaactctattttttttatggtgacattctcttgtgagtttcagacaatattagggatgttaatgataggtaaaagtctagtgggtatccaaaacccgcttaaaatttaaagcttaaagattcatgttttgtattaaaattaaagtaggtttaaaacggacgaattttatttaaatagagtgttatgtgggttttactctgttgggtttatgggtacccatggacttttttctaactaaacctaatttactaaaacgatctcctccttctctcttctctctctctcctcttctctcctctcttccttcgcggatctcttcttccacaagatgcatttgcagcatgtgttgagagtgtagggattaggagtggtgctggattgtatttagacgtccctacacgttggaattcaacttatgacatgtttgctagagccttaaagtttcgtatgacatttgctagtttgaaagagtgtgacagaaactacaagtcattgccttctgaggatgagtgggatcgtggagagaggatttgtgacattttaaagccgtttgcaaactacaagatgtgtttgagcttgagaggagcatacaacctggttctgacaacacaaagtccaatttgcaaaattatttggatgatccaaggctagatttgaggtcttttacagacatggaggttttgagctattggaaaggtgatggacaacgctttggtgatttagcttctctagtttctgctatacttagcattccaatcactacagtggcagttgagtcatcattcagtattggaggtcgggctttaaaccctttcagaaaccgccttcttcctagaaatgttcaagccttgttatgtactaaaaactggttgcatggttttgtagagttggaaggtaaaaaaaagaatagtctatttttttatacttaatattttttatttgttgatttatatcttcaaattgtaggtgacattgaagaatactttaatgatggaattgaagatactacatcgatagcaagtagctttggagtatgagaagaagttgtttagattttttttcactacttttgtatttctgttttaaattagaaactttgatgaaactttcttttgtataatcttttaaattattaatgtttgagtggattttgagtttataaatttgttagaaactttgatgaaagtaaagaattaaaatcaattaagggtaacaaattaagttgtttttacaaaatataaaatacatgattaaatttaaatacatatcagacataataaaagtatgggtatccactggtagttctgaattacatgggtttttctggattttacccacaagtactaaatcttattcgggtttcttttaatctaggttttttatgggcaggtttgttggtttgggttgggctgaggttttttacccaccacaacatccctagacaatatggttgggaagtctctagaagaaaacgatttattcttttgataactctctagtaccagactactaggccggacctctcttaagagcccacattggttattttcttgtgggtgtctttaaatataaaaccaattaaaaaaatataaaataaattgaagggtgtctttaattttagatttgtgtctttagaaaaacattttagacaccgaaaagagagggtatctttgattttattactaaagacacacatcaagagttgtccaatgaggatgctctaatactcaagtaagatgagagcaatacaccaacatgatggtggtctagtagtagttaaaaagggttggtttctttgtgcccaagtttagtcctttttttgagacaagagatattatttaaatcggaatggagacttgtacaagtatcgaaggagctaatggaccaaattaacaaataaagatg

SEQ ID NO: 1718 - DNA, 3000 bp, Unknown
  misc_feature (1)..( 3000): cDNA_ID_2142800_gDNA_ID_1620439_Annot_ID_157121 3000 nt of promoter + ATG
ttgaaacgggtgtgatttctgtctctcgtgacgttgttttccgggaaacagaattcccttttccagcctctgtttttgactccacgccagactcgcagctctcaccctccaacgcagatcagtcattttttttaccatcagaattacaagctcctacaccggtcagtattactacaactctggaattaacacagtcatcgtcctctaccaatctcaacgatgataattttcgtattccctccgacgaatcaagctctgttaatgagatgtctgacaatgaggatttgaattctccaactaccaatgaatcatctccgttcttgtcaccggcatcaccgtctctgcctttatcaccggcatcactgtctctacctctatcaccggcagcaccctctccgtctctgccaaaaatagcagaaccagaacctgaacctgaactacttggaaaaggaaaacgcaagaaaacacaacctgtgaggcttgcggattatgccactacattacttcaccaaccacacccgtcagtgactccatacccactggacaactatgtatcaagctctcaattctctgctgcttatcaagcttatgtttttgccatatctttgggtattgaaccaaagagctacaaggaagcgattcttgatgagaattggcgttgtgcagtgtctgatgagattgtctctcttgaaaatcttggtacatggacagtagaagacctacctcctggtaagaaagcattgggctgcaaatgggtgtttagactaaaatacaaatcggatggtacgcttgaaagacataaagcacgtttggtggttctcggtaataaacaaaccgaaggcattgactactccgaaacgttcgctcctgtcgcaaaaatggtcaccgttcgtgcttttcttcaacaagtagcatcattagactgggaagttcaccaaatggacgttcacaacgcatttctacacggtgatcttgatgaagaagtttacatcaaatttcctccgggttttggtagtgatgataatcgtaaagtgtgtcgcctgcgcaaagctttgtatggattaaaacaagctcctcgatgttggttcgccaaacttactactgctttgaatgattacgggttcatacaagacatctctgattattcgttatttaccatggagagaaacggcatccgtttacatattcttgtctatgttgatgacttgatcatcacaggctcttctctcgatgtcatcactaagtttaaagggtatttaagctcatgtttctacatgaaggatcttggtattttgcgatacttcttgggaatcgaggttgctaggagtcccgccgggatttacttgtgtcagcgtaagtacgccattgatattatcacagaaacgggtttgcttggagtctggcctgcatcacatcctttggaacagaaccataagcttgctttagcttttggtgacacgatctcggatccttctcggtatcgtcgtcttgttggcagacttatatacctcggcaccacacgtcctgagttgtcttatgcaattcacatgctttcccaattcatgagtgatcctaaagccgatcatatggaagctgctctcagggtcgttcgttatctaaaatcaagtccaggtcaaggtattcttttacgctccaatacacctttggtactcactggttggtgtgactcaggttttgattcttgtccgattacacaaaggtctctaacgggttggtttattcaactgggaggctctccgatctcttggaaaaccaagaaacatgatgtggtttctagatcctcagctgaagcagagtatcgtgctatggccgacaccgttagcgagcttctttggctgcgggctcttcttccagctttaggtatctcgtgtaatgaacccatcatgttgtattctgatagtctttcggctattagtctagctgccaatcctgtttatcatgcacgtacaaagcatgttggtcgcgacgtacacttcgttcgtgatgaaattatacgaggtaccattgccaccaaacacgtctccacgacatctcaactagcagacattatgactaaagcattgggtcgtcgtgagtttgacgcttttcttctcaagctgggtatttgtaatctccatactccagtttgcgggggggtattgggctatgaggcctctcccgagcccacttagattgtatagctacactaggttaaatcatgttgttgtatataaggcattgcctctcttacgtatcaacatgaaacgtctttttacatcttcatctcctttttgacaagatatatcaagcaaacatgaaataaattcgtaatattgctatgctatatgctctactcatcgcttgatattgctatgctaaatctgtcagaaatatgtcaaaatatctcatatatatgcttgactttattattagttagaaacattattttttgtaattaaaggttgctatctttgaaaataaatgaagttattaattgttcattaacaagtaaataataactttatttagtgataaacaactaataaaaaatgttatgaatagtgaggtgcatttacaatacgtaggatggaatttacgtatttaccattaaactgctacactactctaattttttttcttaagaaaaagatagtactagaaattattaccacacacatatattctaccagacttgaaactagaaggtgcatgatacaaagaaaacaatattacaaatcaataaactgcaagctctggtcattgaattgtgtaaaatccaattttaataaaagattgattatcgatagactggttaaacgtttttgaactgccactttgaaacatgtgagttacaaaatgtatatgaataacttggaccacgtcaaatatgacaccggcctttttcctataaatactgagctcgaatgcttcctcattcacaaacaacacactacatatctagaaagcattagaacaaaaaaaaacctttgtttgaaaatg

SEQ ID NO: 1719 - DNA, 3000 bp, Unknown
  misc_feature (1)..( 3000): cDNA_ID_2142793_gDNA_ID_1620439_Annot_ID_157119 3000 nt of promoter + ATG
agaataagatttaccaactatattcccttaatttgatattttagtgttagcattagttttactcaatgttcaaaaaagtttataggtgctaagcaagcggtgatccaatgcctagtacctaaaacgcttaatcgggatttatacaatttttaggcggttaaagcgtttataacataaatactataaatataatattacatataataaacatataaaaatatctattagaaaaataaataaatatgttaatacataaacaaaacatttatttgatttatatcataccttatatgaacatttataactatatgtatagaaacaaaacttagttgaaaattgataaaatacactaaaaacaaaatctatatgattttaggtggtcaaagtgcatggttgtctagacgttttccgagaacctagcgcctaatggaggtttacgcgaccgcctaaatcggtttttaaagcacttcttttactacattgaattactctctttttctaataaacaacattgaattagtctttgcatactatatgctaaaactattccaaaagtaaataatcaacacaatgcacgtaaactttttaatattattctagcagtagcagtccatctaaaataaaagcagacgtttacatagaagatttgttcgtgttagttgtaaatatgcttgtcaatgcagattaagcaagtcttccggtaaacgtaaacttgacgtagtcatagataacttatataaagtatgctctagttttacctacgtcaaagcaaatttgcaaaaaattgtaattctatctatgatatatctagaagacaaagatataaatatgtcataaatctgctcatttcaacagtcttgcatggtctataacgtgggcagttgagttgtctaaatctgctaaaatatatttgtttggcttcttgtatataatttttgtatggcggttttgtagttactgacaagttgactaatgataatttatttgttttcaaaacaaaatgttattagacaaaacaagtgtttttaaaagcagtctatacactatacagttgcctaggtcccgattagacgtttagacgatgcatagatgaccgctttaatcgtctaaaattacataaattttgttttagacgatgcatagattggactacgttagtaatatacaactacaaataatttatttaagacctaaaataattgaaagaaaaaaccaaaaatgaggtaccacttgtaggagtatgtaatcttaactagtatgaacaatgagaagtcagacactcagaccttaaataattgaaagacaaagccaataatgaggtatcacttgtgggagtatgtcatctttactagtatgaacaatgagatatatatataatcgcagaaaaacatattggtgttattttcgttagcgactgctccgatctactaagatggtgtatgtgaatgtcggattcgcacactcaagtatttatttattttgtgagaaagattatttttgaagacaaaaattaaatgtaaaagctagagattaacactcaaatgactatagtatgatttagaaaaattgtgtgtgtgttagatagtcccaaacctctactacttatactaaaacatcgtatttacatgggagaccatagtttctccaagatgtataaatctggagaactcaccaatttcgaatatactgcttcgccctatattagctactataacaataacattgataacaaaattgctccgactgacgctggaaccaaagaagtcaatataaccatggtggaaaccggaccaaaaaccggtaatcgagatggcttaaccaatgttcctaaaccggatccacgacaacagattcctatttctccaaccaagtcttgtcactccgaaacaagtaataacagtacaacttctttcgcatttcccacgtaagtcgttctctaatcttccatgccaatttgctcggttaaaaccagactggttggactgaaaactcggttttaattaattgagttgtgcttatgaggtctattggtttatttttaaaatcctttgtagattaggagagtaccaacaagagcgaaagacatcactaaacacgaagagtgaaagtggaaaaagagaactatcaagacttgactcgaagaccggattgtacccggatgattcgaaacagggcggtgctggtgctggtgctggtggttggctttcttgttgtctctgtttttcggtaaaaaattgaggttattactctttgtcatgtcaattatttaggtcatagctgtccaagagacgcgagacattagacaaggtaattaccgattgtatcctatatattcctatgtaacgaaattcagatactacgtaatcttaatgtgtcgatggaatgaaaaaataaagtattctgtaaatattttctatatattatttagcatatatacgctttataaattataaatttggtccctcccaaatacatgaaaacaatgtagtgataaaaaaaaaaacaaattctgtatatatgctatttttataacataacaagcatttttcttagtcggttaaaatttcaagtgtttaatacttttatataattatgaacgtaagttataatctatgttttttttggtcagtccattattgattattccattcacactatatgcaacctatattcttcctatgaaacttttgatcgtgtgttaaataataatacaaatttgatttcatctaataggtgggtggggactctctaattacgttctttgacatctactcatcaacatttggctaatctttctaaaggaattccatctaccggtcatttttgtttaaatgctctcttgtaactaaaagtccgtaccaaacttgtgtaatttcattaaacattaattatttagtccattccatgtcaaatatgacttatgctcttgtcctataaattttaaagcactgaggattcaccaagtatacatgcataacaaatttagagcgagcaataatg

SEQ ID NO: 1720 - DNA, 3000 bp, Unknown
  misc_feature (1)..( 3000): cDNA_ID_2142765_gDNA_ID_1620439_Annot_ID_157108 3000 nt of promoter + ATG
cccaatttcttagtacattaatctttgaacaagatcttgcatctatgaatttccgtggatagagcattttcaacacaacactcgaaaccttcacatacttatagaactaagaaaataattaaaaagagttaatgtttgactcaaacatgtatattagattgtgttttgctctgaatagatactattattcatatatatatatatatataaacaaaaacctttgcccaaaaataaaataaaaacagaaaacctaaattaaaaatctagattggactacgttagtaatatacaactacaaataatttatttaagacctaaaataattgaaagaaaaaaccaaaaatgaggtaccacttgtaggagtatgtaatcttaactagtatgaacaatgagaagtcagacactcagaccttaaataattgaaagacaaagccaataatgaggtatcacttgtgggagtatgtcatctttactagtatgaacaatgagatatatataatcgcagaaaaacatattggtgttattttcgttagtgactgctccgatctactaagatggtgtatgtgaatgtcggattcgcacactcaagtatttatttattttgtgagaaagattatttttgagggcaaaaatcaaatgtaaaagctagagattaacactcaaatgactatagtatgatttagaaaaattgtgtgtgtgttagatagtcccaaacctctactacttatactaaaacatcgtatttactctcaattatactccataattcttcttttaatgcttccgtttcagtcctcgggtttaatgcctcaatgttcgaatttgaattaatttcgattctcatgggcttctcagttcggcccaacaccccaggccaaactatccccaattcggctttgtcaccatctcgtagtgtcgacacctcgctacatctctgaccatcattccgggtttttttttgggccatacctctcgtgggcttcctccctgcttacgtgacaatctttggttggttccggactacaggtgtgggatccgacaccaacagcgtctacccccacataatgattagtcttttaagatttatctaaaaaaagtagagaagagtaagaaagtgttctcgtcttttactattcccctgtttttcgtaacactagtgttaaaacggatcttttaacacggaacgtccgtgttgtattatgtatgcaaacaatatatttttcaattaggtttccaaatcctctatatgtatattaaaatagagtatatttgatgtttatatatcaagctcacaattattctcaatacagtatttttatttttctttatttaattataatatctttcttatcaaacattctcatttcctagtaatacatattttgattattctaacactaattgccaaacattcaagaatcctaaatttaccaaaattaattattttagatatttttatacgtacaccggagtttaatgttctaaactattctctctctttcacaaagagtgttattcttgttttttttttttcacaaagagtggcattctacattttcaatgtgatacactaagtttcttgatttacctttacccaaagctattttattgaacttcaatcactaatcatgtattaattagggcatacatatatagttcaaaatttcttaatttgtgtaaaatatatcaaaatgacactagttgtgaaacggaaagattacaaaaaatatttttctaaaattaaggaagtgtactggtttaaagattttagagaatttggtgaattttacatattttgagagattttgataggtatacggatgatttgctagatttcatatttaaaaataacaaaataattggtcatttggtgaaatttactaactttcattttcaaatcaattgttaatgtgaagatcgatcttgtatcgatccaatgactctaagcatttcctatttcacaattaaatctctgattctgatcagcttaactacgggtatctgtagaagagagctaaaccattcacgatgttaatcacttttaaattgcaatcatctttgagttgaagttgggttagatgttgatcaattagactcgtcaccgtaagctctctgactacattcaccattgttttttatagactttttttttttcaatcctttcaaatactattttagaggcgtgattgtttactcttatttttcaactaaaaaatattcaaagtctctcaaaatcatttttcattattttttaaaaaagttgttaagcttgaataatagtggattggatatggttttaataaatctattgaataacaagtgattgtgaagaattttgaatgattttccacaaattttagtttcaataacatgaaatttgtgaggacattttaaaatcacaaattgaataaccagtgatttaaaaaaaaaaaaaaaaccaaaaccttcaaaatcctagttccaaagtctatataacaaattttaatacttttctactaaataaacataagaagaaatagtattgttaattagtcacaatccaaatttacagaaccaaatacaacaactttgtaatttcttaatgtattaaaaattttaaaaatttccattagagatagattctgatatataaaacttggataaaataaatatcataaaattcacaagtgcataacacgaacacttgcctagttttcagttaatatacatatgttgaccaaaaaattaagtcttaaaaaaaagaaaaagtaatagtttatacctttattggcttaccaaataacgtctgacgtgtaatcttgactcttgaccttaacttaaatttagatttcatttgatactaattaaactattccctaaattaccaggaagtaaccaaattgtggagagaacaaaaacaccaattcgatattttcattcatggcttagaaataagaatcctctaagttctcctctctattgaaaacccaaaacaaaagttgagaacttttcatatttcag

SEQ ID NO: 1721 - DNA, 2509 bp, Unknown
  misc_feature (1)..( 2509): cDNA_ID_3063951_gDNA_ID_1620440_Annot_ID_157127 3000 nt of promoter + ATG
gatcaagaaaatatcaactcacgagaacaattcctattcttgttcttcttcttgtccttttgagttgctgcaatggagcaagaaccacgaacgtcttcaacacaagctcgccacccaaacaaaaggacgtcgtttcgccacctcatgatcatgtccatcatcaagtacaagatcacaaaagtgtacagttcttggggtccctgccacgtcagtttccggttccaacttctggtccttccagaaaacataacgaaatcggtttaagtagtactaagacttaatcttcaccttgtagttcaaaggtttgattaatgaatcatcctttttacttctgtaagttttttttgttttagtttttgccccttttgaatttggttcaaactgatgtaaatagatttcagtttgatttatttatgggcaatgctgtggatacgatcaaattttttagtttaatattggaacttgtttgatccattgaaatattgcaagtacgtaagagcatccacattggtggttatttatacatgtctttaaatataaaactataaaaaataataataataaaataatgaatgtctttaatttgagatttgtgtcttcctaaagacactttatacacaacaaaagtgaaatgtctttaattttattatttatttatactaaaaacatatataaaaagttgtctactctaagtgtacaagagccgaggatagaagggtcggtttctaattaaacaattattgttctttttattttccgtcttctaatttgatatatatgaaattatatatcatatgttcactgtatcctaatcgtggattattacggacataatgataattgttgagatatatacaagtcccgatcaatttaggctacatctgtttggtagaatattgatggatataagccgagtagtgatttcaatattttatatccactctcttcttataagttatggtaataacaaatagaaggttattctacatatactagtatttgagttggtgtttaaatacctcgggttattcggacatgcatagagaaaatatatggtattttaagataaacattatcccataatatatggacattgacaaatacaaataatgtgtgttcgtgcgtaaaagaattgtcatttctttaaaataagaaggaatgaaagattgaaaggtatatgttctaactaaaacgtgtgattaagattggacttatatacatagttgattactttggatgtatctttttgtttaatttttgtttcaataatgtcattgagtagtcgttgtgaatacgattgaccaacggttgcagagatatattggaggatttgatgtgatatctcctaagaatttcagaagttcattgaacgtttttttggggttagtgaaatagtatcatttgtatctttttgcataatttttgaaaaatcattcatatccacttgattctcattcaaactttgaatacctttattcgaattccatgtgatgatttatacttttcaagaacactatggtcccttgactccattgtctcgcttacaactttagtttacgtcattaacaagtaattaggcttgagctatagcctatagcctatagataagctagttaaaaggtcaaacaaggagattccataaactgtaaaataaaacttccaaaaatgggttgtatatagggaattgtatcttttacatacgttagttctgactgtattattttttttagtactgtccttttttgttcttatataaaaatggatcggatacacatttaaacattagtacttacgggtacatgtctatcctcatatgtattatccaatacatacacttacggacatatgaaagtgaacgatcgactctaattcaagtgaagtaattctgctaactgcaataatctacattttataaagtttgcactttttttttgttttagctacgtttgaattcttaacttactatatatatattatttaaaaaagcttactatattaaaacatcttatatttattgatcaaccactcatgaatcgaattaaaagtacttccacatatatgtattcaaattgtttagataacttaaccatcctttacgtgacagcgctattcaattacaacatgggtcttacaacatttggatttattttgacgccttgttggtaatgagtttattagataattgaaatttttggtcaccgctgtccgctgcgatggtgtgtgtattattattaatcatgcatgcgtgtgagattgaataaattaatataagtcaaattggctgaaaacgttgtgacaaatactagagtgtctatatatatcaggattatgatatgcgggcatgtgatgtgtctaatgcgtacgtgtgcactcgtgtccacgtgcacatacacgtgcggtgtaccccgcgttgatagggtctcgattatttccaatcacgtatatcaattgtttttgtttttgttctttttgataaaaaaaatttttgttacttcacaattcacatatg

SEQ ID NO: 1722 - DNA, 3000 bp, Unknown
  misc_feature (1)..( 3000): cDNA_ID_2142684_gDNA_ID_1620440_Annot_ID_157134 3000 nt of promoter + ATG
cagtttactgaaatgggaatcgaaggagttgtcccagttgaactattgccgcctgaggtccggtccaaataccaagctaaaccaaacgaaaaagccaaacgagcgaagaaagaagaaaccaaaggtggatctcatgaaacagagggaaaccagattggtgtttctaatagtgaagctgaagctgaaggaggaaggggtgatgcagagacgatggagagtgatgctattgcagacactcctacgcctgaggaacagcaaagactcggtggttctgatacagaaaacggtcaagaggccggtcaaatcgaagacggagagacagaagaagctggtctgatggacactgatcttgatcatcctcctatgcccgtctcatgaatacgctttcagtttgtcgaccctttcttcaatggggaatcctttggatatgaagttcaaaagtattgatgtttaacaaattatgttaaaaggtattttctaaatatgtttgtatgagtgcaaatctgctagcttattacctgtctttccatttctatatactcaacaaaatcatcatacaattaagttcttttgcgtaatttatcgtctaagtgtaacactagacacatattcgcagctaataaacattggattcaattgcaatccactaaaaatacactcaaacaaacaaaaaaatcaaatacttgaggaaccaaaagctaaaagtgttactattatagctatcaacataaactttatgttttgccatcaatatttatttagaatataaatgagtggtttttaagtcgtgtcacgatttttaaagtccataaacaccaccgatctccatataataataaggtttcatcatatgccaaatccaataatacgtgaaactataccagttcattgtaggcttatttggttatattattactacctccaatcattgaaaatgtatatactttgtttagtcgttatcacttgtcaatgcatatcaaatcaccttataaatttacccaaattcactattgaattgttgatgcactgtcacataagatcacagttgtcttatagtcgtcgcactgttatgacaaaaaaagtgtcgactcatattgaaacaaaaaaaagactaaacaatgttggcacagcgatgcgataaagaatcgaccaagagacaaccgagtgatttgtgttgtcaacgacaaatgaaaagttgcctatttttgttacttatcgtttgaatacaaaaccgtagatcgatctaaacataatccgaatatactaattttttgtttaaacatgatttattaacaaagtcatttaattattgtaatacaaaaggtttttgccaaaacaacaacatgctactttttcatcattttcccggaagaaactaaagatacatgtggcaccgacacttttctaattttctatcagatcatgtggcccaaaggatttggaaacaaacagtacctagaatgcattctaatcatagatatttatttttataaacctactacgtctttaggcatatattagcttaacactaaaaattacatatgtttttttatatataaagaagacgaactcacaactttattagtactttattgaaatttaagagcaggttaaaaacattgaaaacatcatatattgtgattttagtgttacgcaaatattgtctaaaaaatacgttagtttttcttgacttaacttatagtgtacatatataggtatatagattgtcggcaaatgtatacatatggatgtatggcatataaataaatatgatgtgatatgatagtctcaataatttgcacattgttttccacttgtacataatattttgtggtcaacagtacattaaatttgtatatgcaaaacaggagaaaagacaaatgggaaaaataatggtgtgggtggagcctaatttaattgtatctacgcaagagctagtgaatagaattagagaatttaagtctgtatcaaggcaaatgaaagaaataaagaaagttattccttgaacatttctaattttatatttcaggttaatataaagtacattgataaaacacagttaaaagtcaaaaccaatgtgctcaacatcctctaagcattatatatatagcttttatttttgtgaatctatttttattgtgattagtatagtcatcactcaggagacagaagaacaaaatagagggaaataataaatgtaaagggtgatccaatgtttaccaaatctatataaaattttcgtccttttccgataaaaagactcagtgagtcaaaattattcatttaatttttcttacgtcaatttaaagtcaatttatacattttaatttttgtgtctactttataagtactcagtattttttttttttgtataaagaatttaacgaaattaccaactgttaagacaaaataggagtggaggacagagagcgccaagcgacacacttttactgggtcccacattttaaattcatttattatcttttatttattttctaaatctctttttatttttttgttggtagtttgtgtggttttctttctctactttggtttggtagttgattacttgaggaggtacttcaatatcttccgtctgtgtctctctctcttcgtcttcttcattacgcgtcttcttctttctcctcttcttctacattagcccctctctctttaattagctgcagctcacctttcactatctcttcttttatattgattgtgaacttgtgtgtgtgcgtacatttggagtttcagagaaaaacagttggattcactccaatacctaacctttcacccatcttcctcattacttcttcagaagaaactgagaaatcttctctgcaaagcttgtaattgcatgttttgatgggagttgtaacgactggatctctctcgaccaacctgttgggttgacttgacccggttgcagacctcggaagctagagattgcgtgtgtgtgtctgaatttgacatactgtctactgttttgtcggtact

SEQ ID NO: 1723 - DNA, 3000 bp, Unknown
  misc_feature (1)..( 3000): cDNA_ID_2142696_gDNA_ID_1620440_Annot_ID_157138 3000 nt of promoter + ATG
gaaataaaccgaataataatcatcaagtttgaataggcaatgattttgataaagttggtataaatttttgatttaatagcaaaaaaagatcaaaattgtttactacaatcatatattctgcaagaaattgaatatcatcataacaggattaattagaaatatatttataattgatgataaatagagaagaacaacaaaatttatcataatataatttgattaaaaaaaacccaagttattttatgatttaacataaattgagtagtaacatagaatttggaaaaatatttgaaaagcacaaactgaataacatgtgatattaagaacaaaacaaaatcttctaaaacccacgacaaattcttttcttaatgggtatactacgcctttctgcttcttcccgaccaatcttgcaacgaggacaatcgcaatgcccctctcgaatttcaccttcttcaatcccatcatcattctctgcttcactccttgttctttttcttgcgactgtttccggattttcgttaccttgcagttcttggatctctgttttcataagtgcgttgaacatttgagaaagaaccacgtctccttgaaacagattttgaagagactttatgagttcatctccttgtatatgccgggacctaaattgtttcatcaaccccatgtattccttgagtttcgcttcacttagtctttctttgatgaactccgctatatacaaaaaccaatgcttacatacggcttcactctcaatctttgttgtcttcatcgtttggatacaacactttgttttttttcttcttctttgtcttacaattatgattcgagtgtatttataaggaactgagttgtttacaatccgatttagtttgggattctaaattctaactgatcaagcttatacttaccaacttaaaaaaaaaaaaaaaaaaaacttatcaagtttttttcacatgattaagataattatcacacgaatcatgtattatttagaaaaaaagaatacttagattatgtttggagtgttgacaaataaaagaagataatgtttggaagattacaggaaaataatgtgagatttgatctgtgttttactttcagacgttaatatccatccgcttagacctgccattaccattgctggtttcctctacactggaaagagagaatctcggaatagcgtaattgtaacggtcaggtggttgctgcggatagagtgtaggagactgcatgagattgtgttgcggtaatgtgttatatttgtaagcatctccttcccttaggctgcaaaattcaaaagaccaaaacccgataaagaaaagaaatccgattttttttaggatgataaatatatataccttgttcttttatagaactgatcttcatcacttgtgccctcatctaaccgctgggaaggtgcatgggaaagagaccatgctgaagaaggcgacggtagttcgtctgagaaatatcttcttcttatcaactgaaaacgaaaaacgttcattaggttgaagagaaagagagagagggagagagctattgtaaaacatggcaaggtcagaaatgacaccaaccatatggaaaattttggtcagagcttctttgtcatatctagcttccttggcagcctgtgcataattttaccaaaattatatgacataccgcataacactaaattcaaataaagcaagtaatttagtctgtggttaccattatgagaccaacattgctagggaagctctcagagagaggaagttcatcactatggggaagcagaccctgcttctcaacccaatgacgagctgcatcaacaagattgccactgcttccatttgttcctcctttggcagcaatatcagctttgtttccaataacgatgtatgggacgggaagaccaccaggcccaccagaagaaaggggagctgaaaactccccagttactgaaacttcacccgcccatttctgcaaattagtttttgtagtcctttgcgaaagatcatgaacaaaaataactcctgcataatcaaacagtcgcatcagtgacaaaacagggacagagatgacatttgttgagacagaccattgatttgtgaatagaacagtgagcggcaatctttgtatcgttcatgacctgaaacatcccaaagttcgacgaagaaatctctctctgagtcacctttaatgatacttgaagaactagcaggacttgcgtaagttaagtgctgcaccaaagagagttccagaaactaagtagggaaacttatcccatgctctctttaaccatatcgagaattttttttatagaacagcttaagttaccttgacaccaactgtacatccaatagtttgagatgggcgaacaatagaggagcctttgacaatgagatgcacaagagatgattttcccacacctaatttgatatccagagataaaactttgctcaatagtggagaagatgtagtagacttacgaaacttgactcttattaggttccacaagtagaaactcatatccaatcatcatgagaaatcttctcattagctccttctttaaggatgagtttgtgcactacgacaaactttctttagttccattaaatggctacttaaaaagctagaaccattaccaaatctatggaaacgagaatttgttaatattacctgaatcaccaaccaccaatactcgaatttggccgcataatggcgctaccatatgttccttattttccctgccacgttccctccaaaaccgcattttgattactccagcaaaatcggcactgcgaaattaagtcccatagtcgcgtcttcgaccaaaagagaagcttccagaaatcatcatttcgaaactctgattcctagctgtaagcagattattctaatccatcaccttgcacattgcaaaacagagtctcggctacagttccttcaccttcctagtgcaaataatctctagagcacaaatcgaaaccaataccgaagttaacacaattgatg

SEQ ID NO: 1724 - DNA, 3000 bp, Unknown
  misc_feature (1)..( 3000): cDNA_ID_2142739_gDNA_ID_1620440_Annot_ID_157152 3000 nt of promoter + ATG
attacactcttaagctagaaagactcaagcggactctgaaaaagggtaaagagaaaagtggcatctgattgatcaccttctaggcttctactgcttagcacgctttgcaagataacttgtagtgattttagagaaacgagtgattgtggagaacaattgccataaagagcgtcccttaacaacaccttctctaaagctcctcgcttgtttagccaacattggttctgtttcatctgtcttggtttgacgcatcacctcctgcattgaagctactgatgaggtaaaaatggagttaaccatgaaagtccatagttcgaatagaagagttcagaagtgaaaggtcagacctggattcatgtttgttaaccgtcttagtctatcttcagctacacgaatagcccgtgtcgagcttttaacaccttgagtgataccttggctacacaaacactgaaagagttacaaaacagatatgaagaaattggtaatcatcatggtgggatgtgagacaaaccctaaatcactgagctccatagttaagtcactgatctccattcccgataaacgaacagcagccattgtatctggtagctcttctctagttacatccaaaagcttttcaagagactcagctgctttcttgaaagcctttctcaacattccaaagtaaaactcaaatcaaccttcaaaatccatcaaagggttgaagaaatctgtaaaagcaaaatgttggagaacgaaccagaagagtaggaatcgcagcaaagaagagccacgatgctgaaattgctgtctgcaacagaacccatgatgatgattgtttacaaagtgacataaagtccagatctttattgagcaatttgaatcaaaacctaaatccaagagaggcttaccacgcaagcgacgacattgagcaagacgaagtgcttctgtgtgaatgtccattgagagagttggagaggaggctgtcccacggacgatgttaattgggaagagatcgatggctcctgaggattcgagtacaatgcagagggagtagaagatgcgattgagtctgaacccttggtcaatcgtgaaatcggtgaagctagccggagagtgacccgtcggcgaaaggagagatttttatcgatgaatccgttatggagaatcggattccaagagattagagattggggtgattgcaatttcgaaggcgagaataacattgtgaatggttttagctctattcgtcagaaaccattgttaagcttcgagtcgacgataacaatggatttcagttgtgtcagcgagaaaatttgcgtcaagtttagaaacaacaatatttcacgaaaagtcctctgtttatgcgttaactattgaaaataaccccattactatcatttgagttaatttgaccttctttgcgtcatatgcaaaatcggaacaccaccacattggtttggaggtttgtgagctacaagcctataaactacacgtagcacctccctatgcacgtgtcacatgaatgattttaagggtttgggctgatgtttgagctataactacatatatacatttggtttgattcgtttttcttacattatagtttcatcaaaagccaaagcataattgatggatcaagtactctactcctcttacatcataaaaatccctgtaatatcacgaatatcaccatcacaagctcaacttacgaccaggctcaataacacgacttattttggcttgtcatcgtcgagaggcaattttgggaaggtgtttgcaaaagagtctcgtaaagtgaaactgattagtccggaaggtgaggagcaagagatagaaggaaacgaagattgttgcatacttgagtctgcggagaacgcgggacttgaactgccatactcgtgtaggtcagggacttgtgggacatgttgtggaaagttggtgtcagggaaagtggatcagtcactagggtcctttcttgaggaagagcagattcaaaaaggttacatcctcacgtgtatcgcacttccactagaagattgtgttgtttacactcacaaacaatccgatcttatatgagttacacatgcctgccttgaacttttgaaatctcagtattaaaatatgtatttcagtatttgatgtgttttgatgtatttttatgtattgatatcattttacatacgttgattcaaaatatttaaatcggattccacttacaaaatcagactagtaatgtatatgtgcttcgatcatctttgttcagtagttgaggcttttatccccatcatgggtctgtaattggtatcaaatatactatataggcccattaaggattcgtaagatatgggaaataacgttgggctttatttcgtcaccatgggtttagttgttgttgttgagttgtctttttcgcatctggacggatattgtccgtatgaatttcttagactataaagattaaatgtaatttcaaattattatttgatatacttaattcaattttataaatttaatatcttcaaaaaagtttgtgtccacaatataacaaatgttatcaaagcaaaaaaaaaaaaaaaaacttcttctaatataacaaatttccctaaatagcttgcaaattatctgtaaacatgatgaaaatattaaacatgatgaaaaatattaaattatcatattattcaaaaaataattaattagccaaaagctatatatgaattttgggccttacaataatattttcgcaaacggcgcctaaataatttgggggaaaaaatcaaaaaccctatttccttttcatgaagagcgctcgttgaaatcacgcaataagtagaacacatttggacaaaaagaaaagataaaataaaataaaaaacaaaacccccaaatttgtgtctcctccggaaaaaaaattcgaaattccggatccaccgccatcaatccctagctttctctctctttctctatcttcgccggcgaaaccagtagggttgctcaattcgttggtagagtactgtggca

SEQ ID NO: 1725 - DNA, 3000 bp, Unknown
  misc_feature (1)..( 3000): cDNA_ID_2142734_gDNA_ID_1620440_Annot_ID_157148 3000 nt of promoter + ATG
acatgatctatttatcttctatcaacaaatttcatataaaaaatttctatacttttttttgctggtatcaaacttttctatacttgatacgtacgtacacatataatagttgaatttttgactaactgtaattacggtaaatattaattagtttcacacatgcacccgttttcaactgctatatatgttaatcgtataaatcgttagtaaacattttttttcttggtaaggatcgttaataaacattttagtaatgtttatattcacaatttaattaaatctattgcagcagctggttttaatttgttgacatcatcattagaatattatgttagcttagctcgtgggtcatatattaatcaatcataattactcggcgtttgtaacgcattattccccttagcgagacatttttgtcgtatcttattgttatatgctacgttctataaacatatccctaattattgtgtaaatagtcaacgtttgtattgttacatatgtacatgtaaatcagtaaataatgactcataaaagtgcaaaatcgtttgatgattagaccaaaaactgtttatcaaattacgatttatgacaatataatctaattaatgttattatactttgtttatcagtattatggattgttttcacgtttcaaattcggtttatattattatgatcaccacagacgagtatatagtattcaatttcactactttttttacacgagtacaggacataaacaaatcgtaaacaggaagatgcaatataggaatagatgcgaccgataagctgttacaatcagattagtatatttaattatcatattttagttataaccactcaatgtaattgctgtaagttgactaagaagaaatgatgagtgatttgaactctatttatgacccaatctcttgtagttagaagaaagaagaaaaaaaatggagggagagggaagaagagaagatggagattgctcttatctctgcatcccttttaactccatccgcgatatctttcaatcgttcttcactaggtttcgcggtctaactcctgataattctccggtgacggtgagtaatatgaatcaacaattcttataagttaatatgcacggattcatacaaaatagatttatgatcacttctatcaaaagcaattttctcgttttccttttaacgtgaaattcacaatcctatatcatatatattaaaacgatgattaatttgtttaatattcgtcagtgttatgaagtaaatatttctgataactgtttgtaatttcggagtttctttaatcgttattttttgtattttacaattttacatacttgtggaattttgaataactatttgccaaatgatcatgttcttaatcgtgattaaatttactcggatgggtacgatattaatatatggtagttggtacttgtataaagaaaatggtaaatggtttcttgagctcattcatataaaatcaatcatttaaaaaatcaaatacatgtttcgaatccgtgggctaatttatgaaacttgatttggaaactaagtctaaagtacgacatgaatgtttttttttttgtttctgaattattgtcacatctttcttttcaatatgaaatttctaatggaaaatgtgtatatgtaataatgttggtgacgaagatatcacaagaagtagaggaagagacagaggtagtgaatataccgaggagtgtggtgtcggggaacgttgcagcgcgaaagggtaagcagcaaacgagttccgggaagggtggaggtaccaactaggcaccttcctaattttagcttccacaagtcttcgtttcaacaaaaagtcaacttcaacattaagttaataatattgttaacatttacaacttctcaagcttatgtatattgttataagtatcttatattttatgtgaattatgtgattattgactgtttgtaagctctttgagtcatttcatgtatgaataaaagataaaagcaaattccctcttatgatatatgaaaaagttgtaaaagaaaaaataattaaataaggatgaataaaaagtttgggattgtgactgtaaataatagtgctggctagttaagattgtgattcagaactacagatcttggccaaggtgaataaaaagtttcacaaatgggcacaagaatgtaaaaagacaatgagttagataaaaataaatcaagattatttgttgtttttatttataaataataataaaagttctaattgttttactgatatgcaactacaaaactgtagagtgagtgggtcattcgtacgcaaaccaaaatattccctttatctgtcccaaaatgaaactaaactccaagggttttatgggtttgcacagttggccactgatctctgcatctgaaattcaaactccacattttccattgtatgtgaatacatgattaaataaaaaaacaattttgccaaaaaatgaaactaaacactctacaagtaaggcagcgtaacaatatcttttaaagaataataagaaagcgattttgtccactaccttgaatatttttatgtcttgatttctatagtagacttttttgataattcccaaaaacagtgatatttattcttttaaattaatttatatatttttgattgaatagtttgataaaacttctcacagctagtttatatatagaagaaagatctaataagataaattaagactttcatcgatcattggccttcaaaaccaatttgatctggtcaaccttattgtaagtagagcacatgtgtacatcatgttgaaaaacataaataaatagtaatattttataccgaacatgcaataatacgaaaagacgcgccaaatgagctgttattagtagattaatatatgtaattaccattttataataattagtgtaaattactaaatactgatgagcctatattaataaactcaagtcacacctcagtctctcacttagctctcacgaagcagaattgaagaaaaac

SEQ ID NO: 1726 - DNA, 3000 bp, Unknown
  misc_feature (1)..( 3000): cDNA_ID_3063937_gDNA_ID_1620440_Annot_ID_157136 3000 nt of promoter + ATG
acaaaaatcccctctatttttgttgtttgagaatagtagtactagcaagtgcaagattgatgcctgatatgagctgataaacttcgtacctttttcttatcatttgactggcttcactaggttgcttgcagtttttgtgcttgtgaagaaacaagtgaataattggacactttttcctttaattggttttgtgtctctaggtagagcatgtcaggtccgagaggaacttacttgcagaagttgacagccgttacattgtaaagcttttttactcttttcaagattctgaatgtttgtatcttatcatggagtatttacctgggggtgacatcatgacactactcatgagagaagacattctttctgaagatgttgcccgtttttatattgctgagagcattcttgccatccattcaattcatcaacacaactatgttcacaggtataataagttttgacatcatttttattgctagtgatttagggtgtaaaagagatctctacgtattgttaaaagtccatgtatactatttggctctttggttcttgatttgagtttgtttcttcttgcctgtagggacatcaaacctgataatttgatactagacaaaagtgggcatttgaagctttcagattttggtttatgtaagccacttgatgacaagtattcttcattgctattagaagacgatgaaatgttgtctcaggattcagagaaccagtcaggaaaatcagacgctgacaaagcaccctggcaaatgcctaaagagcagttactgcagtggaaacgcaatcgccgtgcattggtacttatgctgcttctctaattgaattacatgggctactcattttatgctacacaatagagatcagttaccacatccaaaatatcttgggtaatcaataggtctctcaattttataggcttattcaaccgttggaactcttgattacatggctccagaagtactcctaaagaaaggatatggaatggaatgtgattggtggtctctcggcgcaattttgtatgagatgttagttgggtatcccccattctgttctgatgacccccgtataacatgccgcaaggtaggtgtatacaattggttagtcatataaaattttatctatatttgaaatagtcatgcttgcttaaaaagacttgtgcttcttatctcagataattaattggagggtatgcttgaagttccctgaagaaccaaaaatatcagatgaagccagagacttgatttgtcggttgctttgtgatgttgattcaaggttgggaaccagaggtgttgaggagataaaggtgcgacttctgaaaaggatatgtaaaattacgattcagtttcatgatccttgatatcattgtattatattttgttcatgtttcagtcgcatccatggttcaaaggcaccccatgggacaaactgtatgacatggaggcagcttatagacccattgtcgatggagaactagacacacaaaattttgagaagtttcctgaagtaagtttgatagaatctcaaaaaacttgtcatgacataatttgtggcatgaggcattatgttgaaaccgactagtttggtgaacctaaaacttgttttaaaactgcttgttagaagtcaaaactgtcttatggatcttagtattgctaaaatgagaaagtcaaaccgtctaatatcctcatcaattttcttgatattttcttgtaggttgaaggatcaccatccgaagcaccacaagttggtccttggagaaaggtgaatcactccactagattcctatcgtataatctgtgttgcaaattgacatatgcgaaaatttctctgaacatgataaaactagcagattatgttttgttatggttgagactagtatcaacgagtttggacagtatgctattgatgaaaacaatttggtgctaactttataaattgggttgagcagatgttgacgtccaaggacaccaacttcataggatttacatttaagaagtcagacatcacaagatcaatggaaagttcaggtagtcttcatatctcttgtctctactgcttatgtgtttgcttattataacttgctcttaagataaattgtcttctagaaaaaggtccaatagttggatatagatctaagtatcagttgtgacattgaaatgtaggtgcagacatgaaatcaaatggatcaggggaagccccgtcgttgatatcattgttaggtatgtaaccaaactgtaaacgccgcaaagcgagtgatagttttgtggttgtagaagagagattgaatgtgaatgtttatatgattcaggtcggatcaatatggaagaaggtgaaggtggtgagttaaaccacaagacatagggaaaatacaaatattattgattttttatccgcttgcagttgttttgatcatttggcagaggcaatggagaggcgatggtagttttttaaccagatcacttatgatggggttcataaaaacttctatttccttttttttttcttgtaacatatttgtttttttttcaatctaaaaaagaaactgtaaagcatggaagaataatttctggaacattttacccacaagttatcaaatacatcaaaaaatgaagctcgcttttctgccatactatttctccatcaaaataatttgaaccaaacctaaatattgtgtggccgtaataagttgtatatataggttgataaaaaaaaacaataattagtgagaaaaaacaatttaggacgttttaaaaattattaagataaatgggccttttctatacaactattgggcccatcactgtcgtaactgattttatgtacgaagtaccgtttataacctcgctattattcggaatttacgattaaatcaccatcttctagatatcgatcaaacaggcacaactaaattcaattatctcattagcttcttccaattcgaaaccctaacaaaagccctaatttacgaaatacgccgaatcgttgacgagaatg

SEQ ID NO: 1727 - DNA, 3000 bp, Unknown
  misc_feature (1)..( 3000): cDNA_ID_3063945_gDNA_ID_1620440_Annot_ID_157132 3000 nt of promoter + ATG
agaattgtcatatggagataaggaccaaaagcataagaaaaaaaaaaatcacttgccttttggaggatctttttcatatttggtttcattagatgtattaaaaacaccttttatattgacggctgaaagaataagtcacgcaagtaaacgttacacaccttttaaacattcacataccaaataatcgtatatgcacgagaaacccttcttacctgagcgctcagataacggaaaaaagtgagccaaaaacataagaatccttccacagaatacaacatcattggcctgtatgccaaatagtgaaagcaaaaaaaagaattaaaaaagagtggatgtgttatatatgaaaaagtagattatgacttatggatatttgacaaagggaactagaaaagggtgcagatagcgaacctttgagagtcggcggagaagttggttgcaagtcctcaacatgacaagttttccgcgtgcaaaaagctcttgctgcaaataattgcaacatccaagtcaaaatacaagatacaactaaccgagaaaaaatttgatttcgtttaagaaataccttgcccaatatatcttgtttgctttcaatataaccgaaaacatctttacagtttttcatagtagacatttcggtcaaatcctccagcagctggaatatcatgccaccttctacatgctctttctcacaaagataaagcacaacatctaacaaagcaatcaaaacatgaagatggtgagaggttagacaaaagtagtgaggacaagatgataagcaatagacaacaagagaataagaagttttacggggacaacgctagcacttgtttgaacgaactatgcaaatcagactagagagattgctaacctagaagatgaggaatctgtccatgtatatcatcatcatcatcatcatcgtcaatcaactgaccatactgcataatttgctcccctgattgcgcagcagcagcctgaaaccccgaaaacagaaagagaaatccacacatatataaatgaacaagtatatacgcataccacgaaaatataatagtggagaaagaagagaccactagctcctgcagcaatgtccggagcatgttttcaagcatttggttttcatcttgagccaactttgtttgtttctgtcaaattttacaataaagacaataagtaagactaaaggagtgaagaaattgttagttgattcgaaagagttacctgaggttgtataaagtgttgaacagtcttgagtgcaaaggtttcaattggagctcgctgcaatatagcatctctaaatgcatcctgcgaagaaccacaaattgcagaaaacaagtttttataagctatatagatttaacaagaagcaaaagaaaacaagtctcataatcccaaaagagttaccattatttctcaatgaaccagcttccactgcaatgaagaggaatttaccgacgacaccaaaaccggatatgccggtcaaaattcacggactatgagtcgccggattttaaaagttgattaagaagaattgaataaaaatctggaaacggaggccaaacttgaagaagagtggaggaagaacaattttaatttagggtggatccggatccggaagatatcctcccaacaatcaaattatccgcaaatatccgggcttggatctggatccgaaatatttttaatttataaactgaataacaacatgttcattgggcctttcatagtaaaatgatatccgttgggtggtgggcttcacattatttagttttacagaagacctttgcctgtatatgttggatatggcgtagttttaatgtgtggaatcaaatcaattagaaatttaaaacatctgtattcaaaaattgctcgaaattgttcatggtatgttattgcagaagaaatcataatagctcacatgagaaggatttgaagatttcaaaaattgctcgaaattgttcgagataaatattaggttccaataattgcataaaagacattgtattcataatctacactcaacaagtgataaataaacattacttcctaacaaagtaaactttgatggatcgaacacctccttcaacacctaaaaactcggatgtgatcttctctttgggggttttgattgtaccgtcgacgtaaattcactaaacgattagtgagtggcagtggctcatgagatgaaagtcatgaaacaaacactttgagaccaaatgaaaatattgatttgacatattgggtccacttgctatagggccaaaaatttagaggcccaataaccaaaaaagtcgaaacatgtaaaatgtttctcgtcacttgaagaaaaactaaaaaaagtaaacgccattattgaaagaaaaacactcacatctctctctctctctctctagagctgttcatctccccaaccacaacaaaccaacttgcttagctttgctctgtccagggcaaagagcatcatccctcaataaagcaattcccattttcttcttttacttttgtcctaaaactgttaattgattctgtctgaatattatttttattaacggaccaaacaaaaaaaaacttgcagaagaatgaaagaaaaagcaataaccctccaaaccaaattctaaagcctcaaatttggaatattccctttcttcttcattcccttttttttttttaatttgccatttactcattattgatcttatgtgagacgacctcctctgtttctttcttcctcgtaacagtaaagggtcttcctttttaatctgaatttaccaatctgattcttctgttttttgttttttttatttgtctatcttttaaactatttgaaatctaaactttgtttggttcttcacgatttttaatctccgatgaatcaaattcatcaaaagattcatcttttagatctggttacgtaattcgatttgctctgttttttgtttttcgttttgaattctttattaagtaaccaaatttggggaagaaggaggagtgtgggtgataatg

SEQ ID NO: 1728 - DNA, 3000 bp, Unknown
  misc_feature (1)..( 3000): cDNA_ID_3063951_gDNA_ID_1620440_Annot_ID_157128 3000 nt of promoter + ATG
acattatatattgatcttgatcgtatgatttcatttatatttagggactgaattatatattatattgtaacatttaacatacagtatatcatgtgttgctagttatgatttacatgcacttcgaaaatggtatctgattttttatatgatttagaacttatctggcacacatcattgaataggatctaacacattaaaacactgtctaacttatttgtttgtatgtgtgtgttaaatcatcattttagctaagatttttaaccataggcaaagaaatgactcaaatgagcaaacgagaaactgcagacagcaacatatatcaaactaactctaataggcccaatatagcccaataagaagtgtgaccgatggagggaagaatcgaatttaaatgatacagagtttttttgtttggagaggaatagactgatatgatagtccgtgaaaatattttcatcttgttttcaatgtggagatattttaaagtttgaaaccaatccaagttctaaaacatcaaaagcttttattctctgtttaaaccacttggttggtcttggtcttcttgaaatatacaaaccagacccaaacgataatcagtgaagatgactgcatcattgggtctttaagtttcctattgggccaaatcagcccaactatattattgttattatttcagtccattaaagattttcggcccgttttatcgttgggaattcatctatatttccccaatttgatgatacacagaacaatttcatgtgtatacgataagaggcaaattcaaaatttgcaatcaatgtaaagtggaaatgagaagcatggtggctcaaatcaacttatctttccttggaatacaaactacaaatgatgacggatttggcttccctttgaatttaccttttacctctctctttttttttttttataggtaatgttgttattggacaaaaatgttaagaaaataaaggtgaatgataaattagaagagtacccataactattttgattatttaagttgccaaccaagctagaccactttccaacttttatagacaaagtgtaagaacttagcacatgctttccaacaaggaatatgaaactttatttcaaaaagattattgttaaagcttttaatcattctaaaaggtgattaatatttgaattattggaagtaacttgttttggacatataccaaattaatcaatagtatcaatggacatataacatgttgtgagactatatcaatgttatattccaagccagttaaaccaatttataatgataccatttatagataaacaatacactttacacacattattttcttagaattgggtctcatatagaacactcacaaaggtgacttataaaaaatgcttcaaagatcctagtcttttagtgtgcattcctcaaaatcgtagttgatatgtatcttgctcctattcgggttttggtctagaattttggtttcaggaattttcaattaactcattaaaacatttataacataaaaagatatatcacgaaaaccgatcaatcatttaatatatttttattttattttattttttgtcacaataaaatctagacaatagtgtttaaacatttatcaaaaaattcaccttacgattaatttgttttatattttgtgatgatgcaatttaatctatataaattataaaacatatcgataatctgtgtttttctttttctacatataaaattcataaaaatgagagttttgaagctcttaaaatggactagtcaacaattggccaatctttgttctaaattgctaataaacgaccatttccgtcaattctccttggttgcaacagtctacccgtcaaatgtttactaatttataagtgtgaagtttgaattatgaaagacgaaatcgtattaaaaattcacaagaataaacaactccatagattttcaaaaaaacagtcacgagaaaaaaaccacagtccgtttgtctgctcttctagtttttattatttttctattaatagttttttgttatttcgagaataaaatttgaacgatgtccgaaccacaaaagccgagccgataaatcctaagccgagcctaactttagccgtaaccatcagtcacggctcccgggctaattcatttgaaccgaatcataatcaacggtttagatcaaactcaaaacaatctaacggcaacatagacgcgtcggtgagctaaaaagagtgtgaaagccaggtcaccatagcattgtctctcccagattttttatttgggaaataatagaagaaatagaaaaaaataaaagagtgagaaaaatcgtagagctatatattcgcacatgtactcgtttcgctttccttagtgttagctgctgccgctgttgtttctcctccatttctctatctttctctctcgctgcttctcgaatcttctgtatcatcttcttcttcttcaaggtgagtctctagatccgttcgcttgattttgctgctcgttagtcgttattgttgattctctatgccgatttcgctagatctgtttagcatgcgttgtggttttatgagaaaatctttgttttgggggttgcttgttatgtgattcgatccgtgcttgttggatcgatctgagctaattcttaaggtttatgtgttagatctatggagtttgaggattcttctcgcttctgtcgatctctcgctgttatttttgtttttttcagtgaagtgaagttgtttagttcgaaatgacttcgtgtatgctcgattgatctggttttaatcttcgatctgttaggtgttgatgtttacaagtgaattctagtgttttctctttgagatctgtgaagtttgaacctagttttctcaataatcaacatatgaagcgatgtttgagtttcaataaacgctgctaatcttcgaaactaagttgtgatctgattcgtgtttacttcatgagcttatccaattcatttcggtttcattttactttttttttagtgaaaa

SEQ ID NO: 1729 - DNA, 3000 bp, Unknown
  misc_feature (1)..( 3000): cDNA_ID_2142672_gDNA_ID_1620440_Annot_ID_157131 3000 nt of promoter + ATG
agcaatttcttcttatggaaatgagtttgaaaaaaatgcagtaaacattttggtataaaagatttaaggtttctctattctttccaaaacaaaaacattccctttcccatctctccctacttgtaaatcttcgtctaagtatctgcaataatttctcagaatcaaggaatccaatccataacaaacacaattctagttacgattttggattttaattaaaaaaggatacgaaatctcgaatagtccctcggggttgaagattcccaaaagaagatccatgttcttcctaaatatgttcatcaactgattccaacacgaaacaatttttttattaccaaaaaaggaatttgattatatatgtcggagaaagaaaaaaaaacaacaacacagacctggtctggtttgatcgttgagctttcataagtaatctctacactctacaaacaaacaaacgcaattccgtcaaaacgcgatttttccaagaatctaaaaaacctaaaaacgtcaagaaaacggtaatgtaccgatttggacgagatcttgaaggaagcgacgattctaaactcgccgtcgagtagattcaatccccggacatcgaatttcaacacatggaccgttttgcccttcgttaattgaaaaagaaacacattaaaaacgtcatcactaaaaagctgaactgatcaatttcttttttatctacctgagcaatgtcaatctgttgaagaagatcaccaagagagacgaaatctcgaagacccaatttagttcgtttagaacccaatacagtgattgtactgtaaatgagtttccagcaacctccgatcttgtctaactctccagtcggctccggtgtcggattccgacattccaaaagcttcaccagtccctcgatctctgtctttttatccgacttaactccgaatatccctctattgatccctttaatcccaatacaatcagataacagaatcaaagcatttaaaatcaaaatttgaactacgagctaatgagtttcgaattaaagattctgatagtcgaaaggaatctgaaaggagcgaatctaatcacctttgagagcttcgtagagctcttcttttatatgagaaactgtaatctcttcttgttcttgttcttgttcttcatcttgttgttgttcatttggggaggaacaagaactctgttctgtgactttcccgatgaacatgggtctgagcctaaatgagttgtcactaaaactcagcgttttgccattagaactggtgaaagagactaatactttcacgtttcctgttcttctcgagattgctcctcgtgaagctgccattgatggtggctggaaaaggttactcgtcattagcagtttatacaccagaatctctaaacccaatggagcttaataagaagtagaagaagaagatgggatttgaggaaaaagagagagagatagatttatggggaggagaatggacagttttttttggttattttatccatcttttagcatctatctctcccccccaccatacactgcactgactctattataaaatttagccaatcccattggtcttttttttcttttttaagatggtgtcatggtaaaattctcaaaaaaatctccatctaaattgagaaaaacccaatttttgttatattttgcaaccaattgcatatgttttaaaaaagtgtttacacttcatcaaaagcagtaatcggagtacagtaaccacaaagtatcaacatagtaaatgctctgttctttgtcacaaggcttttaaaaaacagaaattcaggcatctttggttaaggttgcagagtcttgtgatggtggcttccattgttgtggagtctgagctttcttaatagagagagcatgaatctctttcatttcttcttctagcgcagcattcaccatacgatgcctctccagcaatctcttcccttcgaattgttcagagacaacctccacttcaaaactcgaaccacaactgcaataaacagttttgctgatattaagaacaagaaattatgccataagccagagaatcaaatgtgtattgacaatccggtacttaccctccagatatgtcaatgacttcctggtacacacaaaaacaaacaatgtcactaaaaaattctaaaagctaaagattgaaacaattggaacacatgaatcaagtgaaaagggaaatagattgacattgaagtaacttcaatcttcacatgttataaagcaaagaaactatacacatccttggatctgctttttgagttctagttcacaaaaaaccatgacacaaataaaattttccgacaagaacactcactactaagttgctaatacatcaggaacactacgtcatcaaatcctgagctcagtatcacactgcatcaaattacacctaactacgcaaacaaccaccttttatattctgtttcagagctgaaagacaacacatagtgatgtataatctagatgctgagattattacaatacatagtacctcttatgatccaactatcaaagtgtatgattttgatcaaagtgagcaggtcaaaaatctcaaatttggcaattttcccagatcaatttgatgattagggtttcaaagtttcccacaaaagtttcaaaccctaatcaatagatgaaattgaaagaagaaagcagtataagaacactcacgagatgaattggcttaagtttcgaagtcaatgaagcttcgacttgctccttcgtcaccatctctctctctctctctcaaacaaaaattgaaatccctaattactgtactcattgaattagaatattaaaccatacgctatttggttttggtttagcgagagtacggtttagtttggttcaattgggataccattcggttatcgacaattccaaaataataactagggtttaagctctgctttcctttacttcgtcttcctcactcctaaaaccctctcagtctctccatttcccggagcaaaaatagctctccgacc

SEQ ID NO: 1730 - DNA, 3000 bp, Unknown
  misc_feature (1)..( 3000): cDNA_ID_2142667_gDNA_ID_1620440_Annot_ID_157129 3000 nt of promoter + ATG
ccttaacatccttctggccgaccagaattgggtcttgagaactctctgatgattcttctttaacaattttatcactctccaataccttttcctgcttctttccaagtaagccatctcttcttctttcagcagcaagctctacatcgctaattagctttggtgatggagcattaacagtttccttatctttaatcttctgatcaacagcagtagacaaacgaggactagaatcaagccgcatcggaggcttcttttcggtaacagcccgaatcataaacaagccttcacttactgtagtaacctgtaagatatctggcatggataaaagaaacttcgaaaacttcttatgtccatagaaatctttatcaatagccaagttgctcttactcagctcagcacgtagttctgtaatggcagcccccttgggatataaactcactatcgaacgaatcttatcaacaacttcttttggaataggacgaaggttaacaacagcattcgaattcacagactcggatagttcttcgattttcacactagacgaagattgctcagtagtggtagcaatagcaaatggatcaagaagaggaatcctatagtgaccataccaagagttataaggaccatcaggaggctgattaaaatgcttaccagtaacacactctcctttaatcaaagcatcccaatcccacataatagaagcagcactacacaaaacaccaggagctgatgatttactcgcaagcaaaatgttgtaattgttcatcctcaatctatgtaacacacttgcaaactccttatcactagagattagcaaaagatgagctggtggtggattctgagaaacccaacacataagatctgtgattagagatctatcagcactgttcttaccaccgttaggaacatgagtgagactgattcctgtagcggagagagcgtcttggtttgatctggggagctgtaaaacgtcaccgaaggctgtgattgtgattggtcctttgattccgctgtttctgatagcggcggtgattgattgtgctactttgtagacattggtgtctacaggtaagttacagctcaggaagtcccaccagaccgaaaccctaacggatcgggactcttcgtcttgctgaggacgtcgagagggagaatggctggatccggagacgaaattggagccggaggtggttgtggtggagaatggagaggaatgaatgttagtgatgaaaagggtaattgttcgacggtgagattgggttgtggaggaagaagagaggcggaagagaagggatttggatggtaaagatccaaacttcatggtcggagagctatttttgctccgggaaatggagagactgagagggttttaggagtgaggaagacgaagtaaaggaaagcagagcttaaaccctagttattattttggaattgtcgataaccgaatggtatcccaattgaaccaaactaaaccgtactctcgctaaaccaaaaccaaatagcgtatggtttaatattctaattcaatgagtacagtaattagggatttcaatttttgtttgagagagagagagagagatggtgacgaaggagcaagtcgaagcttcattgacttcgaaacttaagccaattcatctcgtgagtgttcttatactgctttcttctttcaatttcatctattgattagggtttgaaacttttgtgggaaactttgaaaccctaatcatcaaattgatctgggaaaattgccaaatttgagatttttgacctgctcactttgatcaaaatcatacactttgatagttggatcataagaggtactatgtattgtaataatctcagcatctagattatacatcactatgtgttgtctttcagctctgaaacagaatataaaaggtggttgtttgcgtagttaggtgtaatttgatgcagtgtgatactgagctcaggatttgatgacgtagtgttcctgatgtattagcaacttagtagtgagtgttcttgtcggaaaattttatttgtgtcatggttttttgtgaactagaactcaaaaagcagatccaaggatgtgtatagtttctttgctttataacatgtgaagattgaagttacttcaatgtcaatctatttcccttttcacttgattcatgtgttccaattgtttcaatctttagcttttagaattttttagtgacattgtttgtttttgtgtgtaccaggaagtcattgacatatctggagggtaagtaccggattgtcaatacacatttgattctctggcttatggcataatttcttgttcttaatatcagcaaaactgtttattgcagttgtggttcgagttttgaagtggaggttgtctctgaacaattcgaagggaagagattgctggagaggcatcgtatggtgaatgctgcgctagaagaagaaatgaaagagattcatgctctctctattaagaaagctcagactccacaacaatggaagccaccatcacaagactctgcaaccttaaccaaagatgcctgaatttctgttttttaaaagccttgtgacaaagaacagagcatttactatgttgatactttgtggttactgtactccgattactgcttttgatgaagtgtaaacacttttttaaaacatatgcaattggttgcaaaatataacaaaaattgggtttttctcaatttagatggagatttttttgagaattttaccatgacaccatcttaaaaaagaaaaaaaagaccaatgggattggctaaattttataatagagtcagtgcagtgtatggtgggggggagagatagatgctaaaagatggataaaataaccaaaaaaaactgtccattctcctccccataaatctatctctctctctttttcctcaaatcccatcttcttcttctacttcttattaagctccattgggtttagagattctggtgtataaactgctaatgacgagtaaccttttccagccaccatcaatg

SEQ ID NO: 1731 - DNA, 573 bp, Unknown
  misc_feature (1)..( 573): cDNA_ID_2143175_gDNA_ID_1620441_Annot_ID_157163 3000 nt of promoter + ATG
aaatgctgaattcaagatttgttagcgatatttggaagattggaattcacttggaaggtcggattgaaaaaaaggagattgagaaagctgtgagggtgttaatggaggaaagtgaaggaaataagattcgtgagagaatgaaagttctgaaagatgaggtcgagaaatcggtcaaacaaggaggctcatcttttcaatctattgagactctagctaatcatatactattgttgtaagttgggaatatttgctaaagatacctcaacgtttctataaattgcaaaaagaaaagcacttgattatattgtctgttgtctaaaacaaaccaaacattcaaaaaagctcattgctattttattactgaatcaaaaacttgagtggtttcacttgtcatcaccaaaaaagaaaaaaaaacatttcgtgtcatagtcaagtacacttgtcactgccttagcaatgtaggccagtggttgtcttattgaatagactccattctccaaaatcattgttttgctttctgcagataagaaaagaaaaaattgcaaagagaggaagaacaaagaaacttgaatg

SEQ ID NO: 1732 - DNA, 3000 bp, Unknown
  misc_feature (1)..( 3000): cDNA_ID_3063988_gDNA_ID_1620441_Annot_ID_157178 3000 nt of promoter + ATG
agcttgcttatgaaggaccttccttcaggtaatagaagaaaaagttttaagcttttgatgttaccagaatcaaagcgatgatctttgatggtttctttctgcagggttttggatgaaaagctaaggaaggctttccataggtacattgagattagagggataaagccgagcatgatcaacttcttgcacgagtacatgatcaacaaggatagtagagagcacttactgtggttgaaatctctcaagaactttgtcaagtattgaaataagaaaacaatgttattttccgatgctctttgtcttccaaattttgtacttgaaacaccattcaattatgtttggatctatttatataaaaaaagagtattgtgagacagtgagaaaagtataaacatcactacaccaattagaagtaacttggtcaagtatgtccactatttcaagtgaatctattctgtctgctatcgaactgccaataaccatcttaaccatgtaaaaatagagctacatctgccatcataagaataaactgcgaacatggttgagggaaagcatcccctcacttgtcagatgactgttttgtttgtttctagattgtgtagcgcgacctgtgacttaaagttcactgtagttacgccagacagcccggaattcttcacggaatgtgtttaagcgtgccttgagatttggggttcttatgcttgcatgaacaatgatcactgtggagaaaaaatgttaaggtcaaaacataaactccatcaaaggacatctatgatcaaacaggaggaataactttaccagcaagggaagtgagaagtgcatagaggacccacaacaaaccgcaggaagaaaaccacatgacaagactggctatatatacatgagaaaattaacacattgatcagtttttaacaccaatattacattaactacataaagaggaattatgagtattcaagtacctgtaaggaaagtaataacgaatacccatcgcggtttcccacaaacgtatactgtctttcttgctgtcgatcttccacggatgacaggcctgcagtgatcacatattaaataaaattacaaatgtaactacgaaccctatttatatcttccatgaacctaattaatatggaactcacatgtggggaggtctcatttttgcagccatgtgtggggagaaatgcctaatcgttcttataaacttctcattaaaactagctgcaaaactgcaaaagacaacatttaaccccgttaagtttgaaaaactaatagattatgctagggagcggaccacacacacacaaccacatactacaatactttctgatccaatctcataaaaaagcaactaacatcgatgtatgattctaacatgaacatcaaatcgccacagcgggaatagaacataccaacttgaaaaactcaagacttcaagaaccaaaattagaaaacctatcaattccaatactgatatccagttctagagcaaccattatatacaaaggagcctaatatctaccaatgcatgtgaatacaaatggaacaaacgaccatgaagttcatatgaatacacatggaactagccaccacgaaacactcaaatttcaaaaatcacagatcataaaaacctatcggatgattcgaatccaatactaagaatccagttgaagagaaagcactgtatacaaagtagcctaatacccttctaattcatgcaaaactacaccaacttcacattaccatgaagccttaaacgcattgcagagcagatatatataagtagaaaccaaaacaagtcacatgagatggtacctgtcgttaaggaaagctatacttaaagctgttagagcagcacccacaagagccagaggtctcgtaacaagcgcaagacctgtttcaacacaaacatggattaacaaactgcacaagatcttgatcaaaacccaaattcccaaaaatacagctaaaagcaataaaattctgcaaaactataacttacccagaacgaaaatcaccaagataaagtaattcgtcctatagctgcaacacatataaaacaagcaaaaatcaacacaagatcaaaatcataaatcctatcgacgcagacagaaattgagaaagagagagaggtaatactagtagagattgcatttgagacggctcttccatttagagaaagagcgagggaacgcgaatctagagaagaactcgccaaacgaacgaggaggcgtcgaccattcaacttctctaagcgcctcaatcacatcctcagctgctacgttgtcccaatccatatctccctcgcctcttctcttctcttcctcttcaaagacgaattcgagagactccgatgagtttgattacacgattcgtgattgtttggttctccggtttgcttttgcctaagaaatggagattagtacacacgtgtgcgagtgagtccccacgtgcaaactaaaaaatcccaaaaaaaagagtaaaaaaatgtctgagcccgggttcgaaccggggacctctagtgtgtgagactagcgtgataaccgactacaccacccagactttttattaattcaattaagtttgtatttaataaggaagcttaacaaaattgtgatgcgctctgttttttttttttttttttttcgtctttgtgatgcgccgctttcgtcaacaaattgccgaaaaagagtaaacaaaaagcaaaagaagtgtagcaatgttagtgacaagagaatgtttgcagtttcgatagtacctcgaaccacatcgtgccgtttgagctctgcctttctctgtcaactctcgattcctctcactcttcggctccaccatcactaccaacaccaccagcctcacctaccatctcctctctcttttcaggtttccctttctctttcgctctctgtctctcatattccgagaatctcggagtttcggcatctctgatattctctcttattcgtgtttcagattcattcgttaagaaagcagatcgacatg

SEQ ID NO: 1733 - DNA, 3000 bp, Unknown
  misc_feature (1)..( 3000): cDNA_ID_3409060_gDNA_ID_1620441_Annot_ID_157180 3000 nt of promoter + ATG
agttcacgatttttatttggtatttttatttattctttacttaactaattaaattaaattttaaagtaaaaaaaaagacttttcagtttccaccattgaagattgaagatctctttatttttttagtatagtaaaagttcatgattaatttagtgttttcatatattcttcaaagaattaaattgtctcagattaacaagtttaaagaaaaaaactttgtcaaaaaaaaaaaaaactatgatttctaaaaccggctatccgtttaaattttataaaacccattaggcccgcgggtttaaactttgttccatgttggatatagtttaaattttgtaaaactataattttgtaaaaactatgttccatattggatacagttccggctcaattcatttttggacctttggcaaaactcaaaataaaatataattattttggtaaaattagggccttttagtcttaacaattttttctgaaacttgttcaagagatgttaaagtgattaaaatattcgatattgtacaagtactagcattttgatttatattttcttgtgttaatgaacgaattatgaatgtgtttaggtccaatcataaaacgttagtttcattatactagacaagtagttgctaagctttggggtgattgttcttatgatcccaacgaaaggtttcaaaagcaaactttctcttgtcagctaaatcgccagggactgtcatgattccgtaagtcgctaagagcatatcgattgtctcttcgctcattttctcatagtcttcttttttgtaacacggatagagaagaggcatctcagacgaaggtggtggtaatggctgctgtggttgcgattttcggatcaattgcggtggtgactgttgaggctgaggtacagcagcaatctcctctttcggattggttgaagaagaagagcctttcgagtccttgtttcccatctctttgaatttgatgatattcacttgattaattgcccttacttggtccttcccttatgatcatttctaagtaacatgcttgccgtaataaagagagttttattactttttttgcacgtattcaaccgaaatacatttagtaggaacttgcatacgagaccccaacatgaattactatgtatcgcgagaacttataatcatgaatgacatatattcaacaacttacaaagattattataatcagcgaatgaaaacggatctaattgggttttaggagtggaccattcaaccctaagaatgaggttatcataaccatagccattcaatttgttgattgctcgctgtgcatcttccctgctcacaaaactgacaaaaccaaatcctctgctcatgcttgtcttctgatcaatggctacatgacaacgggttacagcaccaaacggacgaaacaactccatcaaatctggtccacgggtatcttcagacaaattagtcacacggacagagttctcatcatgtctactcctcatgtctgaaccaccagcttttctgtctgcaccttctctcatgcttggcgggacataagccgccctgccagttccagttatggtcgatgtagaagtttctgctgttaaaggctcgtccattaaggataagagatccttctgtgggcatcttgatgtccagtggtcacctttcttttggcataacctgcagaccatgaggaccgcacccggtttgcccaactgagacatgctatctcctgatacggtcgactgttccgcgttgctacctgagatattcaaaagaataaacatcttaaaacctcaaaataatactaccctttaagatggtaatgcaaaaactaaaaatgtagttggcagctataaagtgaaagcagaaatctactttcgtgcaagaagccaccaacaaaacatctaggtgggcattacggccacccacatatagaacaatatggctgactaacgtgtccacctataaagaaacttatgtaaaaatgaatacttgaatgtgtacagttaatagcctagaaaagagaacacagaatttgtccacattcagaaaaggctaccaacaagatacttatattggtgacatactgaccaatcacagaaagaagcagccatatatggctaatatgtgatcggctaattgggcacctttgttatgttacacagttacaaaaaaaaaacttgaaccaaagatatagttgatgatccataaccaaaaactgggttaaatcctgttctagtgttgaaacgaatcaccaacgacattgctataggtgtgcttactgaccattcacacaaacagtagccataaagctaacatgtgactggctaattagccaccctaatcaaaacagagcataataacaacgaatcctaacaaactaaaatgcaaagttgaagattttaccaggagctctaattcgttccaagatgatatcctctgttgaacgcattgtgaggtaactactggattcttcatgagctgcgtctccgaacttattccagctccgtcgctccacggcttgtttggtgagagctcgcttctgaacacgggtcgtggtagtgattttgacctttttgtcctcttcgttgaatttgtactcaatcaccttctttacaccgttctggtccggactaatcatctgcttaggcggaagaaggaaatcatagtcgccttcttcttcgtcaatttctccccaccgaagcttttttgttttttgtatcgtatcaatcgccatttttctcagatttagatatgccgcttattaagttcgttagtttagtttaaaaggcaacaactaaagacagaagcaaactagggtttcggattatggaaacggtctcttaatgtcgtaatgggccactaggcccatattggcccgtatttttagccggtcctgattttctgtgatttttaatttaagtcccgctaaatttgtaatttgctatattaaaccctaaagggaaataaaaaccctcactcttccaatttgagcttcaacacaaaaaaaatg

SEQ ID NO: 1734 - DNA, 3000 bp, Unknown
  misc_feature (1)..( 3000): cDNA_ID_3063986_gDNA_ID_1620441_Annot_ID_157179 3000 nt of promoter + ATG
ataccacaggtttctgaacctgtaacaagtcagtagtaaatcaccatgagaacttaattaggcacaagaagctctacttacacccgtcctgaaagttattcatattttagtaattggagtcttttgaggatattactatacttcagtatacgattagttaaggatttgggttccgatcttatctaaggttttcatataactttcctctttcgtaattcaggatgttaggtaaagggatatgttcagacaaaagcatttcagctgaaaaaaggtcaaacataccgcattggtggcatcaaactttccacctaatccaacctccaatatagcagcatctacctgcataaagaagcaaaaagcagaaccccttatatcaataaagagaacatgatgttagtttatctatcatgtcactgagtaagaaaaatagtcagccaaggtaaagactggtatcaaacctcttctgcagcaaatattttaaaagctagcaatgcaaggaagcggaaatatgtaggcattggtatctcctcgttagttctctcctgcaaatcaaatagtcggcaaccttgtattttgagtaaaaaactaaagcatgtatcttaatttgcaactatgcacaccattgtaaattcttatgagttcatatcatgaaatactcagaccgcaaaacaaaaggtgacttcaacaagatacagggaagacactatacatgagctctaccgcatcaccaccccctcgatgaaaatagttccaataatacaatttctctaagtaccaaaacttcagtactgaacaccatggttttaagctaaaatggaaaaacaaaataagtgttcatgaaaaagggtgttttacatgtttatcacattctatatggctttcatcactaagattccaagtttacagaacgttactaacaactagtctactagtcaatcgagataaccaaactacagatattgagttcaaaacaaatgaatcaaatagctgaaccttcttttctcacgaacataccttgagcctgttatagcaccaccagaaatatcccaaaaatttctcttcacttatgtccacactgcagcaataaatagaacatatcagattaagcgaatataagcatttctcagtaaagaagagtgaaaaacaggattatgctagcgaagtattgttggttcctgattatatgagggccggtaactatatatttattttctcaaaattttcagcaaacttagaaaaacttacccatccaaacgaaatctttcccggacatcaatgaggtgaggtgaagtgaagagtccagttcgaaagccatagtttcgaataatagactctgtaaaggtacatgtggatcccttcatgccacataagaaacaaaaaggaatactgttaggtgctggatcagatagtaatcagccatgctaacaatgaaccactttcatcaaacaagttcactgaaggtttgaatcaaaaagtaagcaagtactagtttcataacaatttcctttgtgctatcccaaatctactatcacataagtgatatgagtcaagattaaagtagcaacttttgcaaaactgacactccatcagatgaaaccatacgcatctccaagcatgcaaggatctcaaaaccaatgttcttctcgcactcactcaaattggaaaaaagctcaagatgactcagtccagaaacgtatctctaatccccacagagcaaaaaccttaggcttcttctgacaaagcagtcataaggacgtaacggtcacaactagtgtagaagctgacacgaattcagaagatatctaactaactaactaaagtaacaaaaccaactcctaatattgacaatagatgatttagtatcatttattgagctttaccagaaaaagtaaagttgttgttgttaccttgcctttggtaccagcgacatgaataacattcatctttaaaatgtcttcttccaggtcaagtagctgccaaattaattacaagaagcgtattcaatcagaaaataaaacaaaaggtgcaataaatattcaaaactctacgagaatccaatcgaaaagagaaaccttgagataatcaaagactaactcaaagcgatcccctttattgctcttatcagcacgacttcgtttcgtgatcaaagacgacaaagcagccaacgcttcctcatatgaatcacctcctgtcaccaacaaaaacaaacaagtgaactcgattcgattactgttatcatcaagtgaggaagagctagagaagaataagaaaatcaataacaaaccttgagctgccatgtcgatctgctttcttaacgaatgaatctgaaacacgaataagagagaatatcagagatgccgaaactccgagattctcggaatatgagagacagagagcgaaagagaaagggaaacctgaaaagagagaggagatggtaggtgaggctggtggtgttggtagtgatggtggagccgaagagtgagaggaatcgagagttgacagagaaaggcagagctcaaacggcacgatgtggttcgaggtactatcgaaactgcaaacattctcttgtcactaacattgctacacttcttttgctttttgtttactctttttcggcaatttgttgacgaaagcggcgcatcacaaagacgaaaaaaaaaaaaaaaaaaaacagagcgcatcacaattttgttaagcttccttattaaatacaaacttaattgaattaataaaaagtctgggtggtgtagtcggttatcacgctagtctcacacactagaggtccccggttcgaacccgggctcagacatttttttactcttttttttgggattttttagtttgcacgtggggactcactcgcacacgtgtgtactaatctccatttcttaggcaaaagcaaaccggagaaccaaacaatcacgaatcgtgtaatcaaactcatcggagtctctcgaattcgtctttgaagaggaagagaagagaagaggcgagggagat

SEQ ID NO: 1735 - DNA, 3000 bp, Unknown
  misc_feature (1)..( 3000): cDNA_ID_1444196_gDNA_ID_1620441_Annot_ID_157187 3000 nt of promoter + ATG
attctccgccacttagactgatgtggaaaattgatcccccaattgataggtttatttcgcactttagaaaaagtttggaaagaaaagtagacggaactggccaaccgctgcttatcacaatctctggtgccggtggatcgtcaaaatattggaaagaagttaggggattccggcgcggatgatctgtcttagagggcgcggatgatctcctcccacgtgagggcgaagtcatgactcgacgaggccaatcacgaacgctacaggtgtgggagcgatcctggtcagggaaggctaagacggcgcctcgcatatgggtagcactactcgtactatcttgaatgttgcataacagttagaggcctagctagcattagtttgagcagctagccgaaaatcggacaccaaattattgtagactgccctgccggaagaaaagtaattaagttaaagagtgtcgagtaggaggagtcagcttattctatagatactgtaaaagccaactcatgtaggttatttaacttcacatatagcccatcagcttgtgacttcttacaaaataacaacgggggatcctttatccccctgtcttaggaatcacttccccttcattgaaaacgtcctatccatcgtctcgcaaagagacgcccaagatttatagcaagttttgacttgagcgctgccaccgatcggtggcccgttccaaatgtaaaaattttaaaatcataactttttcaaaaaaccccaaaaatttatcatctactacttttacaatttcatgatctctttcaaacgtttcgtctttactctctataaataaaataaaaatcctacattgaaaaatttacacattctcattaatcatcatcgacataggcacacggcgactccatcattctctcccattaaaaaaaatattcaggtaaaaacttttaaaaaaaagttttttttttctttttttcaattggtaggaggttaattcccaatcaattttaggtttaagcatatatagaaaaagaaaaaaaaaaactcaaattcatccattttttttgtgtttttaaattttttctttaaatgatataggagtgtagatgaaaaaattaaagccattttccaaaaaacaattgatatgcatgaaaatcctggaaatgagattcatttaatttgttgtctatatctcacttactaatcttctcctttttgtaattccaaaccctttttattactttaggttagtcacttactctcggctctctcttttcttagctctgttttttatatctaaaataactttttaaaattgttgtgcttgatttgcagagatttggagaaaaacatgattgttgaaagtttcttataatttggagaagtactatctcaagtttgttaaattagtttataattcaagagttttagaaaaccatattttttccttcatttttgtgtgtataggaaaacatacatttttttaacatagatcatttctcatgtgtctcaagacaaatagatctacaaggtcaagcaatcatatttcttttattttcagtcatcttcttaggctaactcaatttcggaaaggagatttataggaccggacaagaagaatatacagtaaagctaaacaaacaaacagagaccaaactgaatatagtgaagaagaataatgaaagaacaaattttaccgcatgttttttttttcttttgtcaatctaccgcaggccataatgtgactcttatattggcttatgatagatttttgtatgctaactcatttagcaaatcgaagtatttttagtttaattctttaatgtcttataacaacttcattaatgaatttaaatcacaaattaaagttacaattaaatcagttttaagaaaataaaccattttaatataaagtttattgtagaaaactggaacttctagattaatgtttgttaatccaatggaattttacatagttcatcattaacgaatgtgtatgtatatattatcttttaaatccaaacatttataagtaaaatattgcatgtaattaatttgatataaatctaattatccaaaatgctatcatataaataataccaatctaatttttttcccgtacgtcgtacgggtggaatactagttctataataattcaacaaaacattattactaattatttggattaataggtttaatggcggacatcgagaatccaccagtgtgtaggatttgtctagacaagggagatcttatccacctcggctgtttatgccgggatgatatgtctcttgtacataaaaaatgtgcagagatatgattcacacagcaaaatactaggtaaatttatttaataaattatatatatatatatattaaaaatattaataactatttgattaaatttttgaattacaagatttgcgagatttgcagcaccgaagctgcaaacattcacgatttcgtcacattgcgatttcggcttcctcgagagttattattttttaatttttatatttttgtaatttttatctttttctgtttatttttttttgtgttgtttcattttcgtattataactattcagatgtgattgtaaacttattttcttaaacgtgaaaattggatttatacataatgtgactgaaaaaaggttgaaaacatcatttcttaaattgcgtaaaatttatatttttaaaatttttaaaactataattagttaataataattcgatccgtagacggtttgtccgctccgaccaccgtaacaattcaaaaccgaagaaaattgtttatacgaatctattccgtaatatatatatatatatatatatatatatattataagaaatttctttttaaaaaactaatccatttaatctataataaaagtcactcgccattcgacaatatatatatatatatattcttcttcactgccagtctgaggatttccggggaaataaagaaacttgactgctaattgctaaaggtaatgcttctgagaattggaagcta

SEQ ID NO: 1736 - DNA, 3000 bp, Unknown
  misc_feature (1)..( 3000): cDNA_ID_3063982_gDNA_ID_1620441_Annot_ID_157181 3000 nt of promoter + ATG
gttctgggtaagttatagttttgcagaattttattgcttttagctgtatttttgggaatttgggttttgatcaagatcttgtgcagtttgttaatccatgtttgtgttgaaacaggtcttgcgcttgttacgagacctctggctcttgtgggtgctgctctaacagctttaagtatagctttccttaacgacaggtaccatctcatgtgacttgttttggtttctacttatatatatctgctctgcaatgcgtttaaggcttcatggtaatgtgaagttggtgtagttttgcatgaattagaagggtattaggctactttgtatacagtgctttctcttcaactggattcttagtattggattcgaatcatccgataggtttttatgatctgtgatttttgaaatttgagtgtttcgtggtggctagttccatgtgtattcatatgaacttcatggtcgtttgttccatttgtattcacatgcattggtagatattaggctcctttgtatataatggttgctctagaactggatatcagtattggaattgataggttttctaattttggttcttgaagtcttgagtttttcaagttggtatgttctattcccgctgtggcgatttgatgttcatgttagaatcatacatcgatgttagttgcttttttatgagattggatcagaaagtattgtagtatgtggttgtgtgtgtgtggtccgctccctagcataatctattagtttttcaaacttaacggggttaaatgttgtcttttgcagttttgcagctagttttaatgagaagtttataagaacgattaggcatttctccccacacatggctgcaaaaatgagacctccccacatgtgagttccatattaattaggttcatggaagatataaatagggttcgtagttacatttgtaattttatttaatatgtgatcactgcaggcctgtcatccgtggaagatcgacagcaagaaagacagtatacgtttgtgggaaaccgcgatgggtattcgttattactttccttacaggtacttgaatactcataattcctctttatgtagttaatgtaatattggtgttaaaaactgatcaatgtgttaattttctcatgtatatatagccagtcttgtcatgtggttttcttcctgcggtttgttgtgggtcctctatgcacttctcacttcccttgctggtaaagttattcctcctgtttgatcatagatgtcctttgatggagtttatgttttgaccttaacattttttctccacagtgatcattgttcatgcaagcataagaaccccaaatctcaaggcacgcttaaacacattccgtgaagaattccgggctgtctggcgtaactacagtgaactttaagtcacaggtcgcgctacacaatctagaaacaaacaaaacagtcatctgacaagtgaggggatgctttccctcaaccatgttcgcagtttattcttatgatggcagatgtagctctatttttacatggttaagatggttattggcagttcgatagcagacagaatagattcacttgaaatagtggacatacttgaccaagttacttctaattggtgtagtgatgtttatacttttctcactgtctcacaatactctttttttatataaatagatccaaacataattgaatggtgtttcaagtacaaaatttggaagacaaagagcatcggaaaataacattgttttcttatttcaatacttgacaaagttcttgagagatttcaaccacagtaagtgctctctactatccttgttgatcatgtactcgtgcaagaagttgatcatgctcggctttatccctctaatctcaatgtacctatggaaagccttccttagcttttcatccaaaaccctgcagaaagaaaccatcaaagatcatcgctttgattctggtaacatcaaaagcttaaaactttttcttctattacctgaaggaaggtccttcataagcaagctcatctttggaaggatcatcaggaaatgtaacccacatgtccttgatcgcaatcctgtctggaaaagcagtacatctaaattccaaacttggtcctgtcttcttggaaagagttactaagagaggcacattcgattgcttaggcttcaatggcttatcctcatcttcatcttcttcattctctgcttcttcctcatcatcttcatcatcttctttgtcaccagtcacaagattagtcatgtgtacttcaactttaacagtctctccttcatattctctagtcaatgtcacaatcttccctcctggtttgtcttccatttcgaaagggaagccacttggagtttcttcaacctttattcaaacaaaagaagaaacagagagattacacaccattgccattgaaacagagcttcacgaaacacataaatcttaataaacaaaatttgcagaaactaaaacatgaaaatggtaaggatttactcgatgataatcatcagctttctcggcgtatccaatctcctcttcaatgattcgaagaagcggatcagttggagaagctctctttttggtcgatgtggtaaatggaacattccggtcaaccgacggcgtcagatgtcgcctccggccagaagcggactggtccaacaatgagtaaacgaaagaacggtttttccaataacttcccacaaaccgagaagctgcgcgacgtacaagagtcgccattttttttgtgttgaagctcaaattggaagagtgagggtttttatttccctttagggtttaatatagcaaattacaaatttagcgggacttaaattaaaaatcacagaaaatcaggaccggctaaaaatacgggccaatatgggcctagtggcccattacgacattaagagaccgtttccataatccgaaaccctagtttgcttctgtctttagttgttgccttttaaactaaactaacgaacttaataagcggcatatctaaatctgagaaaa

SEQ ID NO: 1737 - DNA, 3000 bp, Unknown
  misc_feature (1)..( 3000): cDNA_ID_2143213_gDNA_ID_1620441_Annot_ID_157177 3000 nt of promoter + ATG
gaagcagctttggttttcttgatgtccattttatgagtatatgtagtaactaaacttcacaatgtgaatttcttgtgagagagactagagaaggagaaagagagagagaaatgaatgttgatattttgatgagtgagaaatggataatgatagttttggtttttgccctaattaactccccaacggtccgttatataaccaacttcttctgatgagaaggagatgggttcacgtgatccccacgtggctctgccgccgtcttcgactctcttctcaccgccacgtgtgctttctcgtagatgctatggataaactttgcttttactacttttgtactctttcttctcttcttctattttgtcatttggataagttcttttaccttcttcttttcttcctttatacaatgaagatattaaactctcgtttttattattgatctttggcacattacactgacaacaatctctatcttcttcgttttctttaaattaaataattcgatcatgtgactcactatcgacttattctcgaaaatgtcgctttgattttattctaagacttgtaagtttgacttccattattatggagtatggactaaaggtttattcattgacatcctcaaatctcgaatattaaactttcattttaaaatcttttatatatcggaggattttgtaggaggataatggttattcgacctttttttggtttttgatgttataaataagaaaatgtctagtctattggtattgggtccgagaatgtcatttatatacggataatgttggatagtgaaacaaattttatgccgttgatgtggtttacaggaatgtaaaatgctatactatacatatgatcatttaacctatacaaaatataatggttcatctaagatcacaacagataaaaataaaaaattatttcaggtaaaagattgattaagagagtccaccattgtggggattaatttgtagaaacttctcatggaatctatttcccaccttattcttcgtcgacttatgatatagcacattcatttctttagaatatatatatatatatatataacctgatattgatattttggtctctctactaattaaccaataaagaatgtatatatttcatctttttaccggaaattccgacctcagccaaatatatatatctgcagattttttgacggtgaagtgaagctaaatcatatcaaaatagatctgataaattgatatattccaacaaaaaaagagaggtcgcaaagcaaagcaaagcaagctgaaatgaaacagtaatgaagcatattccacgtcaatctcttctttaattttgattgcgttttatcttctccaaatctagtaagattcgccgtataacaataataaaaaacattgggatataagaataaaaatcacttgcaattctaatttcggcggatagatttgatattccacccacatacatgcagacacatatatgccgacatcaagtgaacataaattttatcaaaaaagaagaagaacagaaatggctttcacatgttaacaaacagaaaaagaggacagaaataatgcatgcttagagtattcttatccactttgttggaccaacttcttatatgcttttatgtcgtatgttgtttaggtttcatcttaatgcagaaaatattagttatagctaacgaatttaaaagtgtttaacctattgtaggtttatattgttgtgaatccgatcattagtagtttacggttgcgaatccgatcatactgtcgacagattattaatgggagatgattctcgtgttaaatctccggttaaactatcgctagacgagttccaaatttatattattacctagaaaacaaattagataatattcggctccgatatattggggtcaaatgacttcaagggccgctgaagctaagaatcggaaaagtggtcagctaattaattcgaaggcagcaggagttaggaataaaaagtagataattaattcgaaggcagcaggagttaggaattgtaatgtcttctagagttcgaatagtttaaagtttagacgaatgattcgaatctatgtgaagttaatttatacacaaatattaattcttccactcctaaatctctcactcagtcactctatcatggatatcaaatcatggtgatctaaggatcggttctcgattcatgttttacaattgtgttaagcgtagtgattccactattcaacactaatatgtttctaaatctcacatgtgtagatagcaaatgaaactgaaattgagcttctaatcactatttaaaccaaaatgtaacgttttccctctattttgactcatcaaatcctaatactctttcaaatgtgttattttcattttgaaacctcttaaacaagaccaacaacacagtatatagtcgaataagtttgcacaaaatacgttgaggagctaattctagtaagttaataaaattttgtattttatcatactttcaactttaccgtacataataatacattaggaacctttttttaagaaaaaaaacgaaaaatactcataaacgttggaaatctaattatagactgtttagtagatgttgttcaaaaaaaaaaaaaaaaaaaaactgtttagtagatttataatattttgttttatttcatatttttaaacatttccatagtatgtagcaaaactatatttttttattcagaaaatattaatattcactgctctttttttttcttcaaaggaggaaaaagcctttatcatttggacggacaagcgctcgagaaactaatttaattcaaaaatactttttttttgtttttctgtcatttcgaatctgtctctaatctcatagggttcaaaatttggtttctgctgttctctcgagaaaaaagtacagttcccgcattgttcagattctctaagattcattcatcaatctgacttttcccgggaaaattcactgtctctgagtccaaacccgaatccagcgatg

SEQ ID NO: 1738 - DNA, 3000 bp, Unknown
  misc_feature (1)..( 3000): cDNA_ID_3064007_gDNA_ID_1620441_Annot_ID_157167 3000 nt of promoter + ATG
tagccatgcatatgacatgttgtttctttgtgttttaagtttttcaaccgataaattgtttgtgtatcagaaatttcttcttttgtgtgttttgcattgttggaataaatttttcttcttaagttggaatacacatatacttaccactatattatcaggccacgttttcagcaactttttactattatcctgcaacctactagtccaacggatcttggaaagaagcttaaaaagagaaaggttcaatggagaagagaaagcaccatattgtgaacagaagaaggaataacaagaatataaacacaaacactcttgtgacatgggcaccacaacaggaggttcttaaaaagttggttgtttgctagatgttgaaaaagtttaaccatgaaaggaagaacagagcacaataatcactcatttgtccatgaacttgagcaataattattaatcgaatagagagacatggtcgaaagaactgaagtatctaagtttgatgcgactttacagagcaagatacatgatttttcataactgttatattattgatagtagtagacgccctatctttgggttgaaaacttgagtttccttagcagcttttgtgatattttgaatcatttttatgggatatgtttgagttattttgtttttacgatatggtattggtaatacatactagttactacatagtcgtagactttcatgtttatttacaaatggatacaggtttaaaaacatttacttgcgactatttgatacacgttagttacctgttaaaccagattaaataaaactaaaccacttgcacttgttaattgttagtgcttcgttagttgtaaagctgagtaattttgtttccactcgagagagagaaaatggatcttatcttcttttttttttttatcatcacatcgatcgagaagcgtagagttagggcctaggggtccactctcatattaataacataaatgatttcttgtgtgatatagcttcactgatttatcagatctttttgcatttgggtcgacaaacaagaaagaagaagaaagcttcaatggagaagagtaatggccttcgagtgattctgtttccacttccattacaaggctgcatcaaccccatgattcagctcgccaagatcctccactcaagaggtttctccatcactgtgatccacacgtgcttcaacgcgccaaaagcttcaagccatcctctcttcaccttcttagagatcccagatggcttgtccgaaacagagaaaagaactaacaataccaaacttctcctaacgcttctcaaccggaactgtgagtctccgtttcgtgaatgtttgagtaaactgttgcagtctgcagattcagaaacaggggaagagaaacagaggattagctgtttgatcgctgattctggatggatgttcacacaacccattgctcagagtttgaaactcccaatattggtcctcagtgtgtttacagtctccttctttcgctgccaatttgttcttcctaagcttcggcgtgaagtgtatcttccacttcaaggtattgttatttcttacatttttcgtatagaccaagcaactcgttaacctaaaaacatatatctaaattttctcacagattcagaacaggaggatctagttcaagagtttccgccgcttcgaaagaaggatattgtacgtattcttgatgtagaaacagatatactagatccattcttggacaaagttctacaaatgacaaaggcgtcttcaggtcttatattcatgtcatgtgaagagttggaccacgactcagtgagtcaggcacgtgaagatttcaaaattcctatctttgggattggaccatctcacagccactttccagctacctctagtagcttgtccacacccgacgagacttgcattccatggttagacaaacaagaagacaaatccgtgatttacgtcagttacgggagcatcgtgaccatcagcgaatcagatttaatagagattgcttggggtctaagaaacagcgaccaacccttcttgttggtcgtacgggttggttcagtccgtggcagagaatggatcgagacaatcccggaagagatcatggaaaagcttaatgagaagggaaagatagtgaaatgggctccgcaacaagacgttctaaagcatcgagccattgggggattcctgacacataatggttggagctcgactgttgagagtgtttgtgaagcagtccctatgatctgtttgccttttcgttgggaccaaatgctaaatgcaagatttgttagcgatgtatggatggtcgggataaacctagaggatcgggttgaaaggaatgagatcgagggagcgataaggagattattggtggaacctgaaggagaagccatccgagagaggatagaacatcttaaggagaaagtaggacgatcgtttcaacaaaacggttccgcatatcaatcgttacaaaatttgattgattatatatcatctttttagccactgacatgttgtttctttgtgttttaagtttttcaaccgataaattgtttgtgtatcagaaatttcttcctttgtgtgttttgtattgttagaataaaattttcttcgtaagttggaatttacatatatacttaccacttaattatcagccacgttttcagcaactttttactattattttgcaacctactaatacaaacgcatcttgtctttttatgtcccttaactaatgaaaatcaaatataaattagaccactagttacatgccctagagggaaaacgaatctggtctttctttattagcacatcatgaagagtatagttttgtctcactctcgagtaataaagaatgcgaagtgctaataaagaaagaccagattcggaaatttctttatgttatatatagatgtttgttatcaaaagggaaagaattacaccattcactgaaatatcaggagatttacatttggaaagaaggtcaaaaggagaaagcttca

SEQ ID NO: 1739 - DNA, 3000 bp, Unknown
  misc_feature (1)..( 3000): cDNA_ID_3063996_gDNA_ID_1620441_Annot_ID_157171 3000 nt of promoter + ATG
gatgtgactcaacccaatcaaaaccccaacatctaaaatcgagaaatctgtgatcaagttccttacgattgatgtaccaatcgattggaaggggagagaagaaggacatacctttgattaagatgcaagggagatgattggcgagagagattatgggatctgcagctcaatgaggacgatgagttttctaattactactcaattttcctgggaaaatgaaaaaggtttggaatttggataaaggagacgggagctgtatcttcacgtttctcgtgttttcatttgtttttttgctcttgggatagcgacgaatcctgagattattctaatttcaatcttttcttcttcttcttcttattcttgtcttcttcttattcatccttcaatagttttcttaccaaataaatagcagcaacaataaaacccctttcaaataagttggaacgtgattttttcacgttctcaattacttgaaaacgtgatttatatcaatatttcaccgttcagatttcagaagataaaatcgtttaccactttaacgttttcacgtttccaaacatgattctgattttgattttgtgcaaaatgtattttattagtctaaactataaaacagtttatgaatattctagaaaaaaaccctctattcagctataatatttgtttgattcaataattttatgagattttaactatcaatctcacatataccaatttgtcttcttatgaactttatggttgtatttattatgattagtgagtatatattttctagggttgaggttggcaattggcatatggctaaacaaccctattgcttaaggcttagtttatgtaggttaaacttgtacttagatctaagatatctatatgcgggcagcacaacatgctttcaaccatgtttagatagtttcaattgcaaacttaagcaatgattcattactactgagtatatgagaattgaagcaaggtttagtcgtttagatagtttccttagttttcttagcttagatctcaacaccgaccaaacataatcatttatttggactataagaactctcacgatatcttggtttgatttttacttgttggatcaagggtttgagggcaatagtttatatttacctaacttgaatggagcattcgtccctgaattgcattttgcacctatagaaggtgagagagttcatgctcgggtataagaagtaatggacttgaacaagagggcgccaaaacttttgtctaatctccattgatactgtaattaaaaaaaatatcttcataaccaaataaagagtctatagactatatataggtcagtcgttttcctttaaattcaaacctcttatgagattttttaaagaaatatcgtaagaaagaaaattttcaatcatgaagtctataaaagttgtatatgccaaacataaaaagtttgaagacaaagggtttgaaaaccgagattgaatgtagaaggcgggacacataacaaaaaaagtttgtaagagtcattaagagagtagtaagtatatcaagttatcaatatagatcgatatcaataccttttttaaaaaaataaaaataaagttacaacatttgggaaaagtaaaatttaggtgagtgctgtgtcgaaaaagtcaaaaactgtcactttaataaaagtactataccttatacatataagttcatttgaatttttgtaaaacacatccgtttaacaattcgaatttagacagtccataacctttcactttattttgactagtaatcaatagtattgctttatcgaagttcaaattttagaattgttagatgtgatggacaaatggacatgagtcgttatgacgtaacaaaatcctaaaaatacagatgtttgttctttgttttttttaacgcaatggaaactatacatttttttgaaaaacctaacaaattttgtttataaaggatatcaaattgttatcgtagaaactagaaagtaggaaaactaatttaaattagataattaagctctcaaagtcattaagctacgcctaattgtgggaggttaggcccttaaacggctacgaacttcaaacgaaatcgatatgggaccatgcgtttgaattaaaacctcagattactatattgcacactacagacatccatattaacgaaaatgccactcacttacccattgcattatttcctgacaacaaacaaaaagatggctgcattaaatccacttaatcctttttaaactcctaattattacttatttactttaatattggcggcctatgtcacattaaattttggtactcttcaagaagaatgtctccactttcttttgtatgaacatttttccggtctactctgcattcaataatattcagaaagtggttttgttgatatttgttgccatttttcgttcaataaaatcttataaactgaaattcaaacttatcttagacccaatgttaaaaaataaaaaaaaacttatcttagaccctgaatacagctatattcgtgtttaactaaaacaataaaacttatatttgaagttattacttccaaacaattaaacgtacttacatcttgtaagatttctttagttaacatgtcaattttggaaattcacctgtctcatttacgtaactaattattgccttgtaattaataaaccacaccgagtcaccaattgctatttgtggtaaaatactaaattcttgatttaaaacatgggcagaaccgtaatatccacaccattcaagaaatttgtccgccaaaaagataatttaatattttgaaagaaaaaaaagtcaaatatattctctttctactcgtgactgaggaagagaaacagagagcataactttatatccagccgattttttttcaaatttcttaccttttgctctcactaaagccatgttcttacctttatagtgagtgttatctaaactcttttgggtcttttgcaaaagaaaccagttttcaaagttcaaaattttgtttttaaaa

SEQ ID NO: 1740 - DNA, 3000 bp, Unknown
  misc_feature (1)..( 3000): cDNA_ID_1021304_gDNA_ID_1620441_Annot_ID_157173 3000 nt of promoter + ATG
taaccgaaatggatgttcctaaatcataccttgaaacccttccaaaggtctacatctttaactcaaaacatccctataaaaaccattgtaaggttttttttttgttctgacattaaacttttggtacagaacggtaggtcctgccttggggatgttatctacaggtatgtaacatctgacaaattttctgcggagtctcttctcgattgccttgatctgtcctctgagcatattgctcttgatatcgcaaaccgtgtggaagcttcgatatatgtttggaggagaagagttcaaacaaaacttggagtcaacaataatacttcaagcactactccaaagttaacatgggaaatggtcaaagaactaatggctgctggtgacaaaaggggattgcttgtggagagatcggaaactctcttacgttgcttgaagcagcggtttccttctctaacgcagacttctctagacataagcaagattcaatggaacaaggtccagacacacaaatcctctaaatacattacagtacaaaatggctttgcttgttcttatatattcagtcctttgaaaatttcaggatattgggaaatcaatcctcgaaagctactcaagggctttggagagcttagcatcaaacatcatagcacgaatcgatgatttactctacgtggacgacttaacaaagcaatcagatgataacaatcttttgtcaagtccagcggtcagcagcattatagctcacaagaaagtagtaccactcccttatctaatatctgcatcaggaactccatatagaacaagcttctcaacaacaccaggcttctctccttcaatgattagccccaagaaaggagagaggagaacaccttactccagcaaggacactaacaaaatcattgagaaaggtcttccttctcgaggatatggagtgagaagagtcttgaacaattatcttggcatggaatcaaaactgaaaatatgcgttaatccgtcagataatgcagatacagcagtgattaaccaaatcagcaaagacgtggaagaagagaagaaaagaaactcaacatcagtccatcaaaagggtcctccaaagtacactgtctcttaaaagctaatagaagaaactcaatagagtgtataattaatgcagacatggattgatttgtttgatatttacttgtagtttctgtcttatttggaatggtaaagtgtctatctttgcaaaccaaatcagatcacaaaatagacaaaaatgagagtggttgtaacaaatattctcatcaaatttgttctggtttggtttactagctttatttatttggtaaacaatcaccaataacgtgtataatttaaagttatgattataatgtttctttttgtaacccactacaaaatgtcgttgtagtatagtggtaagtattcccgcctgtcacgcgggtgacccgggttcgatccccggcaacggcgattttttttttttttaaatctcttcctccttttttatttcctttctgaacgaagctctctctctgattggccggatctgccggagagaaaaatgacgacgagtattcacatcacagctctcgacggaatcgtcaacgtgaactcactcttcacactcgccgtattcatcggattagcttggaaccctaccgatccagacaacagcctcgtaaccgaccctaattgcgtccccacagctcgtatggctgagaatctcgtcgccttccatgtgtactctttcgcatcattcctattctcaagtctcatcgctctaggtctcaaacaagcaatgaggctcaacatagcttcttcgtttcacatctctactcgaatcgatcctgtggtttactatgtgaacaagacggctcttagatttgggatggttacatccggtttgggatcggtttgtggatgtgggtttctcatgttggctttgattaatgttgttcagatcaagcttgggactttgggctgtggtgctagtggtcatacttatgcagctgttgtgccgcttgtgattctggttccttctgcacttttcatctatgtttctcttatgttatatgcttttactcgttagagacatggtttttgattccatggttgatgcaattagggttatgtttgtatgatgatgatatgatggaaatgagaatgattctatgtttgatatggttctttgtaaatctcttggtttggcttctgatttaagtttagtgtctgagtttttggatagatgatattctagatttgattggagttaggcacttatgtgtgttttatcaggaatattaactggtggattcattcaaactgatttgatcccaggaaatgggtatgagattatgctggattctgatgcctgtttggtttgatctcttggattattgataaagcagagtctacttggaatcattcatcaaaaagagacaacttttctctgttcctcatttggatagagttttttcacttgtttatagttttgtgtcttctgactaagctgaatgattgatttcctctgtatactatcccattcccacatatctcgggaactgctttgtatgcataattgtatgaaaaaatagctttgaggactggagaaaaggaacctgatatatctagatctcatgaggtgatcagtgaattttcagcttaaaacttgaaggctcataaaaccatacttttggaagctttttctttggtttatgctattacatttgtcatgtaaaaatacctctttgctttcttcaaaggttcaaatgattagcttagagactaaagggcagcatgatcttactttagattaaaatagctatgcacttagaggctcttaatgcgactgattaggtgaagtaattactatgttcctttagtgcttcttccactacttctgtgtggaatttctctgatccttccaaatcctcctgcaatttcagttgctataaaacttaggttccataactagtagtatatgcatcaactcatcactcaaga

SEQ ID NO: 1741 - DNA, 3000 bp, Unknown
  misc_feature (1)..( 3000): cDNA_ID_3063992_gDNA_ID_1620441_Annot_ID_157172 3000 nt of promoter + ATG
aagaaaaaaaagtcaaatatattctctttctactcgtgactgaggaagagaaacagagagcataactttatatccagccgattttttttcaaatttcttaccttttgctctcactaaagccatgttcttacctttatagtgagtgttatctaaactcttttgggtcttttgcaaaagaaaccagttttcaaagttcaaaattttgtttttaaaaatggagaatttagtgaagagctgcgcagggatcgagaagaaaagaagcaatttgactccatcgatggaagatatacttacagagtcaaaggagagaagcagcactagcggagcgagctacgaaagctcctccaccaccaccgtcgcttcgtcttctccaccaccaccaccgtcgcagattctgggttggccgattagaaaagcttcatttcggaaaaattcgaaggagagtgttaattttgatcataagaaattaacccttcacgatgattctgggtttaaagcgaaagagatgaattctgcaggttagtgagaaaaaatcaaaaattgaaacttttttactcagccctaagatctcatgtgttttctttgttgttgttgttaatctgattgtggattagatgtggagatgatgaaggagagatttgcaaagttgttacttggtgaagatatgtcaggttctggtaaaggtgtgtgtacggctttagctatctccaacgccataacaaatctctgtggtaagtcttaaaaaaagacgaagctatcttgtgtttgttaaaatgcttgaaccaaagtgttgaatttgatgtttcttcttttagctacgattttcgggcaactatggagattagagccactttcaagcgaaaagaaggagatgtggagaagggaaatggagtggattcttagtgttagtgatcacatcgtcgagttaacaccttcaacacaaacttatccagacggcaacaagtttgaggtaagctcttgattttttaagattgttgcaactgcaattactggagtttgaattgtgaatcttcttcaggtcatgacttgtcgaccaagatttgatcttttcatcaacctccctgctctccgtaaactagacaatatgcttctcgtgagtttcacttaactttcttatacgatgatcctctcaagtgaaacctgttttgatctctgatgtaattttcttttgcattaggatatattggcgagtttcaagaaaactgagttctggtatgttgatcaagggatcgttgcttcggaaaacgatggctcagcttctttccgcagaaagattcagcgccaagaggagaaatggtggttgcctgttcctcgtttagcaccgaatggtcttactgaagaagcaagaacagaattgaatcataagagggaatgtgcgacgcagatacttaaagctgcaatggctattaacagccttgctttaaccgaaatggatgttcctaaatcataccttgaaacccttccaaaggtctacatctttaactcaaaacatccctataaaaaccattgtaaggttttttttttgttctgacattaaacttttggtacagaacggtaggtcctgccttggggatgttatctacaggtatgtaacatctgacaaattttctgcggagtctcttctcgattgccttgatctgtcctctgagcatattgctcttgatatcgcaaaccgtgtggaagcttcgatatatgtttggaggagaagagttcaaacaaaacttggagtcaacaataatacttcaagcactactccaaagttaacatgggaaatggtcaaagaactaatggctgctggtgacaaaaggggattgcttgtggagagatcggaaactctcttacgttgcttgaagcagcggtttccttctctaacgcagacttctctagacataagcaagattcaatggaacaaggtccagacacacaaatcctctaaatacattacagtacaaaatggctttgcttgttcttatatattcagtcctttgaaaatttcaggatattgggaaatcaatcctcgaaagctactcaagggctttggagagcttagcatcaaacatcatagcacgaatcgatgatttactctacgtggacgacttaacaaagcaatcagatgataacaatcttttgtcaagtccagcggtcagcagcattatagctcacaagaaagtagtaccactcccttatctaatatctgcatcaggaactccatatagaacaagcttctcaacaacaccaggcttctctccttcaatgattagccccaagaaaggagagaggagaacaccttactccagcaaggacactaacaaaatcattgagaaaggtcttccttctcgaggatatggagtgagaagagtcttgaacaattatcttggcatggaatcaaaactgaaaatatgcgttaatccgtcagataatgcagatacagcagtgattaaccaaatcagcaaagacgtggaagaagagaagaaaagaaactcaacatcagtccatcaaaagggtcctccaaagtacactgtctcttaaaagctaatagaagaaactcaatagagtgtataattaatgcagacatggattgatttgtttgatatttacttgtagtttctgtcttatttggaatggtaaagtgtctatctttgcaaaccaaatcagatcacaaaatagacaaaaatgagagtggttgtaacaaatattctcatcaaatttgttctggtttggtttactagctttatttatttggtaaacaatcaccaataacgtgtataatttaaagttatgattataatgtttctttttgtaacccactacaaaatgtcgttgtagtatagtggtaagtattcccgcctgtcacgcgggtgacccgggttcgatccccggcaacggcgattttttttttttttaaatctcttcctccttttttatttcctttctgaacgaagctctctctctgattggccggatctgccggagagaaaa

SEQ ID NO: 1742 - DNA, 3000 bp, Unknown
  misc_feature (1)..( 3000): cDNA_ID_3064011_gDNA_ID_1620441_Annot_ID_157166 3000 nt of promoter + ATG
tataccttgactgaatttatagaatctttgcataattggattggaaaaagaaaaaaaaacagaaagaagaagaaaggttcaatggagaagagtaatggcctgcgagtgattctgtttccacttccattacaaggctgcatcaaccctatgattcagctcgccaagatcctccactcaagaggtttttcaatcactgtgatccacacttgcttcaacgcgccaaaagcttcaagccatccactcttcaccttcatacagatccaagatggcttgtctgaaacagagacaagaactcgcgacgtcaaacttctcataacacttctcaaccaaaattgcgagtctccggttcgtgaatgtttgcgtaaactgttgcaatctgccaaggaagagaaacagaggattagctgtttgatcaatgattctggttggatcttcactcaacacttagccaagagtttgaatctcatgagattggcctttaatacctataagatctccttctttcgaagccattttgttcttcctcagctccggcgtgaaatgtttcttccattacaaggtaattattcactttaccatcttatatgatctatcaatattttactctaatattgactttcttggtccaattttcttttaaaatattttaaaatagccttttttgcgaagtacattaacactggcaatgcatatgaaaacatctaactactacctccacttctaaggttggttttatcggtcattatagatgtttttcttttttttggcaaatgtcaagattgggtgttttaaattgtaaaaatacccaattttctatatatttcgaggtttaatctatgtttcggtccataatctactcagttacaaaaaggtcattgtttagcaaaactagcatttttggttctattagggtagtacaagtcttttagagacactaattaaagattttatagagataaattaaaattctttggtcccaaaatatacagtcttaaaaaaaaagtattttcgtggtgaattaatgctgatatcccgaaattatgttttgattgtatcccaattgctttacagattcagaacaagatgatccagttgagaagtttccaccgcttagaaagaaagatcttttacggattcttgaagcagattcggtgcagggagactcgtactcggatatgattttggaaaagacaaaggcgtcttcaggtcttatattcatgtcctgtgaagagttggaccaagactcactgagtcaatcacgtgaagattttaaggttccgatatttgcgataggaccttctcatagccattttcctgcttcttctagtagcttgttcacaccggacgagacttgcatcccatggttagacagacaagaagacaaatccgtaatatacgtgagtattgggagcctcgtgaccatcaacgaaacagagctaatggagattgcttggggtctaagtaacagcgaccaaccatttttatgggtcgtccgggttggttcagtcaatggcacggaatggattgaagcaatcccggaatatttcatcaaaaggcttaatgagaagggaaagatagtgaaatgggctccacaacaagaggttctaaagcatcgagctattggaggtttcttgacacataatggttggaactcgacggttgagagtgtttgtgaaggcgtccctatgatctgtttgccttttcgttgggaccaattgttaaatgcaagatttgttagtgatgtatggatggttgggatacatctcgagggtcggattgagagggatgagatcgagagagcgataaggagattattgttggaaactgaaggagaagccatccgagagaggatacaacttcttaaggaaaaagtaggaagatcagttaaacaaaacggttcggcatatcaatctctacaaaatttgattaattatatatcatctttctagccatgcatatgacatgttgtttctttgtgttttaagtttttcaaccgataaattgtttgtgtatcagaaatttcttcttttgtgtgttttgcattgttggaataaatttttcttcttaagttggaatacacatatacttaccactatattatcaggccacgttttcagcaactttttactattatcctgcaacctactagtccaacggatcttggaaagaagcttaaaaagagaaaggttcaatggagaagagaaagcaccatattgtgaacagaagaaggaataacaagaatataaacacaaacactcttgtgacatgggcaccacaacaggaggttcttaaaaagttggttgtttgctagatgttgaaaaagtttaaccatgaaaggaagaacagagcacaataatcactcatttgtccatgaacttgagcaataattattaatcgaatagagagacatggtcgaaagaactgaagtatctaagtttgatgcgactttacagagcaagatacatgatttttcataactgttatattattgatagtagtagacgccctatctttgggttgaaaacttgagtttccttagcagcttttgtgatattttgaatcatttttatgggatatgtttgagttattttgtttttacgatatggtattggtaatacatactagttactacatagtcgtagactttcatgtttatttacaaatggatacaggtttaaaaacatttacttgcgactatttgatacacgttagttacctgttaaaccagattaaataaaactaaaccacttgcacttgttaattgttagtgcttcgttagttgtaaagctgagtaattttgtttccactcgagagagagaaaatggatcttatcttcttttttttttttatcatcacatcgatcgagaagcgtagagttagggcctaggggtccactctcatattaataacataaatgatttcttgtgtgatatagcttcactgatttatcagatctttttgcatttgggtcgacaaacaagaaagaagaagaaagcttca

SEQ ID NO: 1743 - DNA, 1306 bp, Unknown
  misc_feature (1)..( 1306): cDNA_ID_3064036_gDNA_ID_1620442_Annot_ID_157194 3000 nt of promoter + ATG
tgatcaacatgactaatcttccacgagactagaaccactaacccacctcctctagataaagctaaacaattctctacaaaaaatttccattaaatgtttctaattgtaattgaaaacatcaacttaaaatattattaaataaattttgtataaacgtgattcattttaactttttttttaatgaattctaaatccaaatgtgtcttaatctactgctatcacaactccacaatattagaaacaaaacatatagagcttgggccattttctgcttttatgattttcacgaagtgttttcaccaatatacttacatcactagttcagttgaatctacttaaaatcataaggtacgtaactcaaatcacattaacgattcaagttcattttcatggaattagatattttagtaaaattactacctattgatgaatttggatatttctagttttaaaacgggaggaaaaaatgattaacgtctttcatagcactatataaatgttaatttttatttgaattaaaaatattcagttaacgaaagtgtttgtgattaatctagagtttatttggagaaatagtcaaaaaaaagtttataatacctttttcctggttcatttttttttttttttgccaacatttaaattccaattgttgagattttagcccatcatttaatggtgagaagaatgaaagtgctaaactatttgtcttaaatgattatactttgattataaaactgtgacaatatgattattatacatattgttaaattttattctatgtgatacatatataaatgttttagcaagtacaaaacatggaaaatgtgagcgacttacaattataacatcaattctcattagcatttccgcttttactgaaaacaaaaacgagtgagtacaatttgtcttcccttttttttttttttggacacaaagtacaatttatcttctatttcctcctttttgtgtaatttgtctcttgtcgtatcacctacattttcagcattggatgttataaatgcgaacaaactataatgtaaaaaacatgtcagcagcatcgggccatttcaaactatgtaaataatgaagaaattatatgatctattctaaataattaattaggccaaatattattctaagtgaaaaatgtcacgctcaatttctcttatataataactccttcccttgaagcctttctttaactcttttcatcttccttcttccttcttcttctttaaacacaaaaaaccgacaaaagcctctgtctcggacagagacaaagaaacagaacagagcaagaacaatg

SEQ ID NO: 1744 - DNA, 3000 bp, Unknown
  misc_feature (1)..( 3000): cDNA_ID_3064030_gDNA_ID_1620442_Annot_ID_157205 3000 nt of promoter + ATG
aagtaaattatgtccaaaatcaactgcaaattgttcagctaccatttcttgtaataaaagaacgtacctgtgcataagccagagcctctgaaactgaaaaaaatgtattgagaaactcccatcgactctggttccgcaggtcaactaactcccttccatagatctcactttcatccatacaaagacaataagagaatgagacttccttcaaaacagaacaatgactttgcaactctcttttttcttcacattaccaatggtgttgaaaagtcaaatatacctgacagctttatttgataacatctttgtaccgtgcatggctctcttcacatacccaaatctatcggccttaactaaattacctttctctttgtcaatcatgagacccctgataacctataataagagaaaacatagtttgagtactctaaaaactagatagggtactacaatgtggaacctttcaactttcacaagaaaataaacatatcaccagttccggatcaaaagcaagtccatcaacagggaaacccatgctctttagattttccatgcaatagtcataagcctttccttcccaagcctgaacaagaccataaattagcatcaaatatgggtgcataaatgtttcctacttatgtctgagaaaggaagaactcaccatgacattgtagtgcatcaaagtgtaatccatatcatatccaattgcactaatggaccgaagattcaatgtacgactacaaaatataccccgaggagagtgctgtgcagagaaagggccctgcaataccaggcatgagaatgtgacacaaaagaaaaagaaaagtccatataaaaccagacacaaataactcaatacattcatgttttcgcaacaaagggatactcaaacttcaaatacataacacaaagttgtaaggattagataacgaacttggatacccaactctctaatcaaattttcagccgcttgagcctctgttctcgctacctcctcaatgggaccctccaatgtagcctgcccatctcctacatagatacaccaaagttacattttgctcatacaacgtgacattcacaacaaaggttcgatctttttagctcttatttatctcaattaaacaaacatcaaccaaaatcaagttccctaaccaaagaccaaaactttatcccacatttcactaaaaccaatctgaatttcgaaaactaacaaaacaaaaaggaagattgtatatataccaaatgactgaagagggtcaagcttgagattcaaatctcccttagtactttgacccagatagtcaacttcatacttagaagaagtagtaaccgaaaacacatcatccccaacagccacgcgtccaccgtcagctccggcggctctgcacttgatcatcctaagagatcccctcctcttgttacttttcctcaaatcaggtaattccgcagcagaaaaagaaggaaatttcatcttcgttgacatatctctccacagaagctttttatcgaacacctgatcggcacatagattcattctcactttgggcgtttttgtactgtaaagagatgagagttggggaacgttaactgagaaattaggcatctttacgctcgttccaatatgtgagacagaaaacgacagaacatcggcgtttgaattcggaagatggcgtgatgttttaacttctagaagatgagagtgagagatgatgattctctcttaaataaaagacacgacacaaggagaaacatgtgctcttaataatatccaaatttggcatcagaatctattcgcacgaatcgcgaaaaagcaactactaatttttttttttaataatatttatatacatttattcacacttgatgatatatttacaacttcttatggattatgtcgaataatctctgaccaatagtgtgacgtttgtttgatagtcatgtatcaaaaatatgataaaatatatatcttgatgataaatgtcatattaacatatttgtcactcagcgaaagaattaattaacggaaaaatgtgacatttacaaagttaaaatcaaataagaaagaaagtaaattcttgaaaacctttttaaggccaaagcaaggtacaaggggcgggttagccctcttctatatggatgaatcagataatcatatacatgatcgatgttgagaccaagtttgaaggccataaaatctttatgacattcgtttatagagatcatgtagtaaaatagattcattttgacttgttgaatgaagaaataaaaaatagggcgagacacatgtgcaaagacaagaacatgttttcgggttaaagaataacatcaattttccttaaatgtggatttggttcaaaatgatgattggcattgaccaaactatctttaatttatatggatcttctttcagtagtgctttctatttattttcatatatattagatttattaaagaaatttctgtgtagttcttttttcttaaatctaaaatactatgatttaatgttcatttaaataaaatggtatatttaaggtaacaagaaattttattaatgttttctttgttaattcttgatatgaaatttcagtttctaattttcttacataaatgtttcttaattgtatttacatatgatatagccttaataatttttgaacccactttgtttctggtataatataaaattgagtaattattttactaaaaattaaatgagaattatctctttcttaatatatatatagtcaatttcataatgcgttatgcaggtttaaatctaaccaaagttgacactttcatgaaccatcatatcaaaattatatcttagcttttataaatttattttgtgggtatagaataaaatccagctaaattgattaattttatctgcgaaaaccaaacccctatataagagcactttaatctcaatggatacatctaaaaacaaagagaaaacaaagtaatagctattagctagtgacacctcaaaacaaaaaaatg

SEQ ID NO: 1745 - DNA, 3000 bp, Unknown
  misc_feature (1)..( 3000): cDNA_ID_2143361_gDNA_ID_1620442_Annot_ID_157207 3000 nt of promoter + ATG
aaaaataaattttttttaaatgtaaaaaaaaaaattaatattttgttgaagaagttaaatataattctgcaatttgagagataacataagataaattttcacgtattagtaagtaaaagtgacaagttatgttttataaccaggtgatttttaaaaaatgaaatttgttttgatgcaatatcgtgtgaaaagtaagaaaactaatatatgcaataccatatttaaattgtgaaccttattaatttcacctaaaatgaaaattggaaaactttttcatgtatttgatagacttgtgagtttgaattgtataaatttccggcaagcaaaagcagctcgtgtaccaagttgtcggaaactttaattttgttagcatgcattggactaaaccaacgcaaatattttattttatttatcgtagactgaagacctaaagagtaaaatgaatgtgaaagtgacacgttgtgtggagtattttgtatctaactaggtgtgggaggtccggttatggaaagctaagaaaaccgagacaccggacaacaaaataatggtatcaacatcacgggttactctcttctgcggtttacctataccggaccatgttaaagatgctccagacgagctgaagaaagttatatccaaattataaattcaaattgtatctatctcattttgttaggaataagaacaattttagtttggttttattgtacgaaccaaacgttttaataaattgttgtaccaaacatgagatattataaggttataaaaattgacaagttattgtgggtttagtttgtagatcattttgaaatatagtattaatagactattttgttgaaacgtccaaatcgtatagatggggtaacaaaactaaactcctttatatgattcttttgcataaaattctgtctttgtaataactgaatcatacatacttttttagtttgatacgcataatataattaccacaactatgtagtgcatttaagatatctttcttcatattataaatgtgtatcaataccatttaaatcttcgtatacaaagaaaaaaaacaagatggatattagtttttcgatggagatattatttggttgagttctttcttcttgagacaacaacatccagtgtggagtctaaatgttccacaataccatccatttgtatacccgtggcttaagcaaatctgatcacatacgcttgtacactcggaccgataacacatggcgtcatgaacgtcaatagcgtttattttagctgtaaaagatatcataaaaatctattatatatgatagatcatcatttatgtttatatttagagagctctacattgagattcgatcacgatcaaacggtaaggttacttcacgataaactaacgaagatagtgtattttgctgaatgatgtaaattatattaaaaaaaaatataaggtatatatataaacaaacgaaggtaatatggtttagatcaagaaaataccctaatagaaatcaaaaagtttgtgtatatgttttatgaatttgtaaattgacttaccggccatcgcaaacaagagaacaattgttatggcagtcagtatatgtgaatgtttctggttctgcatttttttgttttgaggtgtcactagctaatagctattactttgttttctctttgtttttagatgtatccattgagattaaagtgctcttatataggggtttggttttcgcagataaaattaatcaatttagctggattttattctatacccacaaaataaatttataaaagctaagatataattttgatatgatggttcatgaaagtgtcaactttggttagatttaaacctgcataacgcattatgaaattgactatatatatattaagaaagagataattctcatttaatttttagtaaaataattactcaattttatattataccagaaacaaagtgggttcaaaaattattaaggctatatcatatgtaaatacaattaagaaacatttatgtaagaaaattagaaactgaaatttcatatcaagaattaacaaagaaaacattaataaaatttcttgttaccttaaatataccattttatttaaatgaacattaaatcatagtattttagatttaagaaaaaagaactacacagaaatttctttaataaatctaatatatatgaaaataaatagaaagcactactgaaagaagatccatataaattaaagatagtttggtcaatgccaatcatcattttgaaccaaatccacatttaaggaaaattgatgttattctttaacccgaaaacatgttcttgtctttgcacatgtgtctcgccctattttttatttcttcattcaacaagtcaaaatgaatctattttactacatgatctctataaacgaatgtcataaagattttatggccttcaaacttggtctcaacatcgatcatgtatatgattatctgattcatccatatagaagagggctaacccgccccttgtaccttgctttggccttaaaaaggttttcaagaatttactttctttcttatttgattttaactttgtaaatgtcacatttttccgttaattaattctttcgctgagtgacaaatatgttaatatgacatttatcatcaagatatatattttatcatatttttgatacatgactatcaaacaaacgtcacactattggtcagagattattcgacataatccataagaagttgtaaatatatcatcaagtgtgaataaatgtatataaatattattaaaaaaaaaaattagtagttgctttttcgcgattcgtgcgaatagattctgatgccaaatttggatattattaagagcacatgtttctccttgtgtcgtgtcttttatttaagagagaatcatcatctctcactctcatcttctagaagttaaaacatcacgccatcttccgaattcaaacgccgatgttctgtcgttttctgtctcacatattggaacgagcgtaaag

SEQ ID NO: 1746 - DNA, 3000 bp, Unknown
  misc_feature (1)..( 3000): cDNA_ID_2143390_gDNA_ID_1620442_Annot_ID_157216 3000 nt of promoter + ATG
gattgaaaatattgcttagaaggaaatcaacattgccggatctttttatatttaagacaccaagtgttatcttacacaagctcggattgaaaccttgttatgcaaacttgactcataaaatggtagaggtaaactgagaaaagaagaaaaaagttgctaaaatcgattgtttacaagtcctcagcagtcagcaacatgattatttggttataggagttttaaatgtctttcgcataaaacacaagtggcgtcttctacaagctcggatcaaaccttattatgcaaacaagactcacaaagtggtaaaggtaaactgagaaaagaaaaagaagttactgaagccattgcttacaagttctcggcaacattggttatagtacattcacgataaggtttaatttctacctcagctttgtacatgatcaagctctttgcaaggtactacaagtttccaaagaacaaatttaattggaacctttcaattatgatcatatagaataaatgtaaaaatgttctaagaacttcatttttatgcaatatatacagaaaaaagtaaggagattaataacacaaagaagaggcgattaatatagtgaatatatacaatgagtatatacattagagctaagctattaacgttgaaatggaagatgttggggaagaagagtatgcacaatgttcgatagatagggtcttacttaagaaaacagaatggtaacatatacgaaaatcacgtcgtcttgttcctcattgctgtttattggtagaagtaggtttatccttaggcttcttgatgatcagaacggaggaatgtgcttaatgagctaaatagttacgcacacttgacgctccacaaaaacatcctcttgacgtcagctccataaccatggctaccaaggacaagaactcatgcatgatgtctctccacggcttccaacattatgtttctcggatctccttcaatcacctccaaagacgagatctcaacggacttagccgagcacacttcggcgcacttcttcttaaccaagtccgcggtcttgtttaaatcttcttccaccattggtataatatcgaccgttcccgggccagcaacaccgaggaagaaggtcgctgttggtcgagcgtgaaggacgacaagtttgaatcgtgggttggccttgaaaggtatgaaaaagagatcaagagccgtctcgagtgcatggtagctatgggctgaatcatctactccgacaaccaccacacgctcacttccactagccattttgattttctttagctttcttgatttgctttgtgattgtagagtagtgatctctatttgagcgttgttgtctggaccgatattcacgcgaggcatattgttccaactaaaacaggtcagtttcaatactttttgttaaagaaacatttaaatagttaggtttgttttcctttcccgattatatcggtctattaaggttatgaccaaggtgtttttattttctgtttggttttatatgaataaacaaaccaaagtggagagagttcaattattcaatcttttgcatgaaataaaaaggtaaagcgtgagatttaattaaaaaaaggatataatattgtttttgtttttaagaatttaacaccccaacaaaagactcgaaatcaaagcttagaggaatcgtataacttacaaatgctcacctagctatactcatctaaatactttgccaatcaaacttttagaaactgatattgattgaatcttttgtaacttcccccataaaatacaatattttacactttattcacctaacaaaatcaaataatccaaactcactttattttctagaagatttatcaaatagcacgtcttcttctatatgtagacactcgtttatctatttcccctttttaattttcacactcgtgatctcatctattactcgatatatatagcacgttgcacagttgcagtatatacacccacaatttacataaactatcattctatcaacaacaaataaaacaattaaagtacgacaccagaaaactaacatgtcaaagctcattctcatcctcaccgcacaaatcctcctcctcaccgcaaccgccttagccggaaaaaacggtgaagacttcgcaagaacaataaaccgaaaacacctcggcctcggcaaaaaagagaaactcacacatctccgtgtctattggcacgacattgtaactggtcgaaacccaagttccatcaggatccaagggccggttgcaaaatactcaagttcctcatatttcggatcaatcaccatgatagacaacgctttaacattagatgtgcccattaactcgactgtggtgggtcaagcccaagggatgtacgttggagcagcccaaaaggagatagggttgttgatggcgatgaacttggcttttaagactgggaagtacaacgggagtaccataacgattcttggtcggaacacggtgatgtccaaggttagggaaatgccggtggttggaggcagtggaatgttccggtttgctagaggttatgtcgaagcacggaccaagttgttcgatatgaagactggtgatgctactgttgagtctaactgttatatcttgcattactgatgatatatgcctataaattcacccgccttatctaatggttgtttttgtttttgtttatatttaatctatttaccatacatgttaaaagaatttcgcctcttgttacttgttagtatatttatgtatttaaacgtgattatcttttactattatgagcttgaagaaaaaaaacaagagatttagggatttaacggataaaatccaaaaattgaaaccgagttctgaggtttggttttagtttcaacttttcagttatccacacacatacacacatacgcttccctgaatttggtgacgttagtcttcttccttccttctcactctttgtttcgccgtgaaaatgagctctgatagatagaagcgacagagagaaacttgaagcagatg

SEQ ID NO: 1747 - DNA, 3000 bp, Unknown
  misc_feature (1)..( 3000): cDNA_ID_2143376_gDNA_ID_1620442_Annot_ID_157212 3000 nt of promoter + ATG
gactcaggacataggtacgaagcttcttttatttagtatgtcacagttgaaagaatgtcttgtatctttttcggaatgcagttgtcattgttttcgccttacaaacacctgcactcacttgcttgtagatgattaagcttattttgtgactgtctctttgataattcctttgatgccaaactctttctcctactgttttttgctctgaatgttgtgttgcaaaatgcctatatttatgtgactatgatgaatgcttctctcatgcttttagcggatattgtttcacttctaaacatatgcactcacttgtagactgtttaagcttactttgtctatgagaatacttttgtttgtcttgcatagaaaagtactgttatctttacatttcacgataagagctagaacaagatacacagttagtgcttgttttgttgtttaaactgaggcttatgttcatgtcttgtacttgtagccaacctaacctacaaagaaattgctactgtaacaatttgaggatcttgtgtgaaaatacgggtggacttgtcaagccactctttcttttcttctcaatcgaacactattattatccaattatatactctctattttttatgattcaattcaagttagattccattatgcacagaaaattaaattgatcatatgtccaaagctctactgtcatttttgaattttgttgaaattttgaagggttaacttattttgtgccattgaccactatgatgcatttgaaagactttttttttgttgttgaacatacgtgattactagcttcataggaagaaataagtgtaacaaaatatatatatttgacgaatttttggtcctctactggtaattttgagttgtgttgtagaaatttgtggtgactcaaaactattgttttaaggctcattaagattcaatacaaatgaattagataattctataaggcccattaagattcaatgcaaattatttagataatttctaaaggcccactaagattcaatgaaaatctgcaagtcggagtagaagcagaagaaatcgactaatctcgccaatgtcgtctccagagaggaagaggaagaaacggtcgcttgaaccgtcaccggaatcgaccccaaacccgtcacttcccgatgatttgattgtgagcatcttagcccgagtctctagattgtactacccaattctctcgttagtctccaagagctctcgaaccctcgttacttcgccggagctatacaagactcgatctttcttcaaccgaacggagagttgtctctatgtatgcttagatttccctcctgaccctaacccacgttggtttacactctaccgaaaacctaaccaaaacatcaccgagaagacaaagaactcaagcgggtttgttttagccccaatcccaaatcaccattcacatagttcgagtatcgttgctattgggtctaacatctatgccattggtggatccattgagaatgcaccctcttctaaagtctcaattttagactgcaggtctcatacatggcacgaggcaccaagcatgaggatgaagcggaattatccagctgctaatgttgttgatgggaagatttatgtagcaggaggcttggaagagtttgattcatctaaatggatggaggttttcgatataaagactcaaacttgggagtttgtgttaagccctttagcggagagatttatatataggagcttggtgattgaaggagaaatctacatttttggggataaggttgtgacttacaagcctaaagaagatagatggggaggtgtaggagaacatcagagtatggatttgggattgttttttcattcttattgcgtgatagataatgtactgtattgttatcgtcctggtggaatcaaatggtatgaatcagagaaaagatcgtggaggaagttgaggggtttgaagggattgtctaagcttgctagtagctgtgttaagttagcggattatggtggaaagatggctcttttgtgggacaagtatatcccttgtagtgggaataagagtcattcgatttcgtgtgcggtggtttcccttgagagatgcaagaatcagggtattaggggaaaggttgagtggtttgatgatatgcttacggtacctagctcttataactttgtgggtgctcttgctgctactctttgatgatgattgccatacgaggcacacacatttgattgtctagctagcttacagataattgctttctatgttgtaataacttaatgatgggattcttcttaccatattatttcaaaatgcaactggcttcatttccttcttcatttttgttttcttgtcaagatcaaacaaagattattcagttatagcgtcttttgttgtctagaaatcactgaactagtagttagttattacaccttcaccggttgaaacaacaacttgatgggacagggaagtgagaatcttttttgccttctcggtcttagaaagaatgtacatttgcgatgagagtaagagcaagaatttaaaaaagaacaaagaggaaaagccgaagaaattgacattgtttttgcttataaacatttgcagtcacttgcttgttgattaagttgattttgaggttaattgacaactataacaaatcagaagatttaagttgcaattatgtgcgctaagctaaggcttttagactcttatcatcatgtagtaacatcaagccaagtgccaatacctttatatagatacttcctgaatacaacaaaattggacacaatgatctgagtttcatattatataatataaattaactaaaccgatttctcaaccacacatttgctaaaggctcaatataaattaattaaccctaaatccttcttcttcgaccttttatttggcgccaaacccgcagttacatgtttttatttcccgctcgagcaaattgatctgatccgagtctttcaagcggggagagaaagagagagattcgttagtacattgatcta

SEQ ID NO: 1748 - DNA, 3000 bp, Unknown
  misc_feature (1)..( 3000): cDNA_ID_3064019_gDNA_ID_1620442_Annot_ID_157199 3000 nt of promoter + ATG
taatgatccggtgagataattctgtgacaagtcaagagcttgaagattctgacaaccagctaactcgtccggaatattcccttctagcttattctgccatcccaagaagatgttgagctccttaagcaatccaatctctggtggaatcaaacctgaaatctgattggcgtcaatctggaactgaacaagctttgtgcagttacttagaatcgaaggtattgacccggtgatgttgttgctgctaagcataagctcttggagattcgacaagttaccgaacgatttagggatggttcctgagaaatagttcatagagagatcaatggcgtttaagcttttcatgaatccaatctcctcagggataggtccgtggagattattctgccatagaagcatcttctctaggttttgaagctttcctagttcttttggaagcgtgccggacaagtcattgtcgtatagaaacagattgataagttcagagcagtttccaagctctttagggatctcacctgagagcattgtagaatagacagataaagactggagcttgcttagttgacccaacgaaacaggtaaagaaccggatattttcgttgctgctaaccctaagaccttgagattcctacagtttccgatctcctccgggatcttccctgaaagctctgagtttcctccggctcttatgctctcaagagtcgagatctttccgagctccaacgggagattctcggataagtagttatcgaaaatctcaagattcttgaggctaacgcagtcgccgagttccggtgggatctttcctgtgaggccattggagtttaaacaaagttcttgaagattcttgagcttccctagactcgaaggtatttcaccaacaagactatttgagcttaaatcgataactataagctccgaacaatctccgatctcagaagatatagctccggtgagattagtgttggagataacgagtttctgaagtgaagtaaacgaagaaatgttaggagggaaaggtaaagctaactgaacagagacgacattgatctctgtaacgagtttgttgtctgaggaggaacaagtaatgtaaggccattgacatgggtcagaatcagaaggattccagccggagaagactgacggtggcggcgagttcgagctgtgaagccaagaaatcaaagctgagacttcattggttgatgcagaggtcgaggagatgaagaaagctaaaaacagagacaatgtaatggaaaaatgagaaacagttaaggctttttttcttggaatcggcatttgcaaagacataagagtttttttctttgcatttggctctcaaatccaaaacaagccttcttggttctgcatcgatctgagtcctttggcttagggtttagggaagtttttgctttagagataagcaataagaaagaatgatatattaaatatataaaagtactaaacttcatgtgctctgtctttttcttttacctcggggttctgtttctagcttcagattaattaattacagtcattaacttttctttgaaatatgtttgccaagagcccgagacactatccatagatgacaaaagtcaatagttatatatacataaaatatcacaaaacaaaaggcattggttatatatatacagaatcatttcacttagtagtgttttttcttataagattatgatagaaatatggaagcatgcatgtggttttgcattgttttcctcaattaagtcaggattgtgagttggtttgttttcgagacctgaaccgagcgtttaagattcttcctcgtttgaagtaaactccataattgtccacacctaagctaaaagaaagtaataacaagtttaaatattcatgacaaggaaaatattgcattcagaaaattgttaacaacgaagtaaacatttttttcaatccgatgccaatagtctctagcggcatcaaaagtccacaaactcgatacctctgggtaaatgagcgaatgggccggtccgttgtagcccagaagagaaattgtcctctaaattccatacttccatgaattttctctgtatatcctcgtttgatgtatggtatatttgttccgctctaaatcatgaccaacccaaggtactaaattgtcatttaagctttgattggtatttggtagcatgggttaccattgaccaacccacggtactagttgcttttcttttagttttgcttttgctttattttcttagagagtgggaggacaaaaggtttggatcattaagccaatgaatgcttcaaagaaattgaatttttattagatcctcaaaccaagttggatcatcaaataatggctaagaaataattttagaacagaaagcaaagaaaagctatccgcaacaacaaccattagttaataaattaaaatgaaatgtgaaatttatgactaattgaggtatgttttcatataatatagtatagttcggatataaattcaacataatttatttgtggtgtactgaaaaaaagactttcttggattctgacgtaattctcttaacacgtgagtttacgccgttagatgttattggtggttgttgttatgctctgctacgtggtaatgagttaagttaagccaaactttggcattcgattgactaacttgtacggtagctataacaatcaacttgtcaattttttttccttcttcttcattcgaactttatactatttaagcccattagtattatttgggccttaggacagagggaacgggtttaccaaccccggatagaaaagtaggaccgagtgatgagatggaccaatgataaaccttctgagagagttggtcgacagatggagtaggcggggtcgtggggcggtaggtgaaggattacgacctttccttttttgttcacacccacttatatctacccctcctcgcttctcacacaatttctcagatcaaactcaaaacaaaatttgtttgttcgtttgatctttcttaaaaatatg

SEQ ID NO: 1749 - DNA, 3000 bp, Unknown
  misc_feature (1)..( 3000): cDNA_ID_2143342_gDNA_ID_1620442_Annot_ID_157201 3000 nt of promoter + ATG
taggacgaccccaaccaaagtctgcatcataaataggtaatctaacccagcttgtgattcccaaatttgggcacttgtaggtatgtgcaccgcggacaagggctgacagatcaggctgcatctccaggtagtcaagagctgacctcagatagttatcatccatacgaaccaagaaatcatgaatctgtcctgcagcataccatgttggcttagataacaaatcccctgcaacagccaatggtgttgcagtgaatatcacattcccaaagtaaccaggaggcagctgcggacgtagtctagaccttccatcagttgcaatgtacagtttcgtctcttggtcgtttggaagccctcgcgcctttcccactgatctccacacatgccctgccaacatctcgtatgagctgtagctgacagtgttcccatcctccttggatttcgccttaagagcaacaagctggtctcgtgttaatttgaatatagagacagtggtattctcaggtcctgatttagacggatcaagaggtatcttcatacttggtgcaggctgatattcaacatgatgaaaagcaggctgtggcgggtccctagctcggaggagtgttcgatcaatgaaaggtggaatggttaggtcaagaccacgagccatatcagaccatgtgttgataaaatgaagaccagagaaaccatctgccgcgtgatgttgcatcccaaccccaagtgaagctcccccacatttaaagaaagtcacctatatcatcaaacaatatcattacataactaaaaacagaacatacatcatcaaagaatatcattacagaactaaaaaacagaacaacacaagcattcaataaattaaaaaagggaaagactttaaattaagctgacctgcaaaacgagaagcgggaaagagtgaatgccagcggagtgatcaacttcgggaataagctgacggagattaagggtaggagcaaaatcaccaaaatcatcgataacagaaggagtatcagccacaacgaagagaacaccagcaccgttacaatcgatctcaatacgaccatcatcgtctctcttcaagcgaccagccatagggtaaaaagggacaagggctttggaaagagcttccttcatgacctgagggtcaaagaaattggaagcgccggtgggtctgtagaagtagacactaggggtatggaatctggggatgacaaggtcgacgttggagttccaaagattagtgattggtgtctcggtggcaggccggaccatggtggaatctctgatgttaattttcatatttttaagaaagatcaaacgaacaaacaaattttgttttgagtttgatctgagaaattgtgtgagaagcgaggaggggtagatataagtgggtgtgaacaaaaaaggaaaggtcgtaatccttcacctaccgccccacgaccccgcctactccatctgtcgaccaactctctcagaaggtttatcattggtccatctcatcactcggtcctacttttctatccggggttggtaaacccgttccctctgtcctaaggcccaaataatactaatgggcttaaatagtataaagttcgaatgaagaagaaggaaaaaaaattgacaagttgattgttatagctaccgtacaagttagtcaatcgaatgccaaagtttggcttaacttaactcattaccacgtagcagagcataacaacaaccaccaataacatctaacggcgtaaactcacgtgttaagagaattacgtcagaatccaagaaagtctttttttcagtacaccacaaataaattatgttgaatttatatccgaactatactatattatatgaaaacatacctcaattagtcataaatttcacatttcattttaatttattaactaatggttgttgttgcggatagcttttctttgctttctgttctaaaattatttcttagccattatttgatgatccaacttggtttgaggatctaataaaaattcaatttctttgaagcattcattggcttaatgatccaaaccttttgtcctcccactctctaagaaaataaagcaaaagcaaaactaaaagaaaagcaactagtaccgtgggttggtcaatggtaacccatgctaccaaataccaatcaaagcttaaatgacaatttagtaccttgggttggtcatgatttagagcggaacaaatataccatacatcaaacgaggatatacagagaaaattcatggaagtatggaatttagaggacaatttctcttctgggctacaacggaccggcccattcgctcatttacccagaggtatcgagtttgtggacttttgatgccgctagagactattggcatcggattgaaaaaaatgtttacttcgttgttaacaattttctgaatgcaatattttccttgtcatgaatatttaaacttgttattactttcttttagcttaggtgtggacaattatggagtttacttcaaacgaggaagaatcttaaacgctcggttcaggtctcgaaaacaaaccaactcacaatcctgacttaattgaggaaaacaatgcaaaaccacatgcatgcttccatatttctatcataatcttataagaaaaaacactactaagtgaaatgattctgtatatatataaccaatgccttttgttttgtgatattttatgtatatataactattgacttttgtcatctatggatagtgtctcgggctcttggcaaacatatttcaaagaaaagttaatgactgtaattaattaatctgaagctagaaacagaaccccgaggtaaaagaaaaagacagagcacatgaagtttagtacttttatatatttaatatatcattctttcttattgcttatctctaaagcaaaaacttccctaaaccctaagccaaaggactcagatcgatgcagaaccaagaaggcttgttttggatttgagagccaaatgcaaagaaaaaaactcttatgtctttgcaa

SEQ ID NO: 1750 - DNA, 3000 bp, Unknown
  misc_feature (1)..( 3000): cDNA_ID_2143416_gDNA_ID_1620443_Annot_ID_157230 3000 nt of promoter + ATG
aatacacaagacatttgtaaattgttatcacatactcaacaccatatatattttcaatacctctcgagcatcttctgttatgatttttcttattttctctaattttattacaaaccttatggttactaaatactatgcagaaccgtgcctacttgaaagaaaatgaaacattcgcctacgatattcaaatttccaaatttttacataactcatatcaaaatcaagttaatttcttcataaattttgtgcattttgtgtttgtatttatactgtacggattttctcttacatacgcaaaaataaaaagctttttaatattgaaaaagagaaaaaagaaaataaccaattatgtaataattcttacaaagagtataaatatataaatacagacaaatcttcttctttttgcacacccgaaaagccttgtcttcctatctctctaccaaaatttctctctttctctttctctctctctatagctctagagtgcgtcgtgagtatgtttttattgacgccattgaaattgggttaaatcggtttgaatcggattgaacaaaaactgtattaataataactagatgagtacccgcactacgtgcgggtttacgtattactatttataaattgttttatataatgcatgttcatataaagtaaagttaaatgcataggttttgaaacataaatatgatttgtaattgtttttgaaaagcccaactatattagttcatctgaaaaaagaatgtgcttgagttgttttttattgttgttttagatttttagttttttttttgaatttatatatccttgcttttttaattatatgtatagattgtgagacggtgaaattttagaaaatttatttcttacactaaaaatataacatgtctttattaatcatgtctctgcatatttaatctaagcatattcaacttgatgttcttggaaagtttagttaaattcttgtcataatcttatatcttacgtattagttataaagatagctcctcaaatatctttcaaattacttgttttcttagcataaatcttgaaaagcttagatatatttaatctgcatattcatttagtttctttcataataatcgtctaatttttaggccaggaatatgtgtaaatctttggattttatcatcactttagccacttaagtggatctcaaaattaaagaggatatattgaattaaaaaatgtagaaagagtgatggttcaagttctcattaattatatttttctattttaattgttatgttgaattaattactaattatgtattacttattttatgaagtctaggtggcaaactctcatgtgctaatgtgtcaagttgtggaagagagttagtcttctttcatatatataattcttcctctacttttctctcttctgattgattccaatcttctttcatttcttcttctttttcttatggagagggggcatgttaaataatatcaaatttatttttatttatactttatagtatatgtttaaaatttgaaaaatacattttttattgaatatcccatttatataccaagttttgttatattcttaccattcactaaataattcacacttgtttgatttgtactctaaaaaattatgcaattacttataattcgtttttatttattataaaaataaataaacactaaaagatattttttatgatatatttctaataaaataatttgaaatataaacttttattttgcctatgttcttaaaactcattggcacggctctgataccaactaccaactcaagtgtctcgtcaggtatatttgctcatgtcaagagtgaagcaaattgacatgaactccccaagccgtcttgtaaggacgaatgtctctcaagtaagcaaatgaagcagtcatttcgggtggtaagttttgtttgcttgtgataaaagtaaaaatagtttggtgcttggtgagagtgtatttatattgattttagaaattggtcttgttttaggttagaaaatataagaaaaaaattggtgaacaagtataagatatctttaaaaatcttttaatcgaatcaaaaatccatagaaattttatctttagcaacaatttaatcttaggctttagcacaaacacttaactccttatttcacccctcttcacctaattttgtaaaactgaaaaaaatagattattgatttcatcaaaatataaacatatagttttgtaaaatattaatttcatttattaattttatctttaatgacaacttaatccttccttataaaaccttagcaaaagcacttaactcccttatttcacctctctcacctaattttgtaaaagtgaagaaaacagattaattaatttcttcaaaatataaacatagttttgccataaacgaaaggttggttcttctcagttgattagaccgataggttccctttttgtagttactttattggggtggagaaattatattattcgattccttatgatgtcaactaaaaattaaagaagaattgctttgctgattgaataacttaatactgtactacattggttgttttgataagagattttcaattactactgattattcaattaagtgacatcgttcaagaaaaccctaattaaatgctaatatataaaataatttcatttaaaaaaatctcctaaaaacacgaaactgccctaaatcttggtaaccttatttaacttgtactccgttaaaatagaaaactttacgttatataaatcttttttttttgttatctcataaacgttagtttactaaatatatttaaattaatgctattgaatgtaagaatattcatacgacagacacaactcaacttatcaattcttttttgggtccgtctcttgcgtgactcaagaatcaaacaacacaagtgtcaaagccaccaagaacacaaatcgtcgaaaccccaaagaaaaaagtctcagcaaaatccttctttcatcgtctttcgatttctccaaaaaaatg

SEQ ID NO: 1751 - DNA, 3000 bp, Unknown
  misc_feature (1)..( 3000): cDNA_ID_3064040_gDNA_ID_1620443_Annot_ID_157232 3000 nt of promoter + ATG
aaactatgtttatattttgaagaaattaattaatctgttttcttcacttttacaaaattaggtgagagaggtgaaataagggagttaagtgcttttgctaaggttttataaggaaggattaagttgtcattaaagataaaattaataaatgaaattaatattttacaaaactatatgtttatattttgatgaaatcaataatctatttttttcagttttacaaaattaggtgaagaggggtgaaataaggagttaagtgtttgtgctaaagcctaagattaaattgttgctaaagataaaatttctatggatttttgattcgattaaaagatttttaaagatatcttatacttgttcaccaatttttttcttatattttctaacctaaaacaagaccaatttctaaaatcaatataaatacactctcaccaagcaccaaactatttttacttttatcacaagcaaacaaaacttaccacccgaaatgactgcttcatttgcttacttgagagacattcgtccttacaagacggcttggggagttcatgtcaatttgcttcactcttgacatgagcaaatatacctgacgagacacttgagttggtagttggtatcagagccgtgccaatgagttttaagaacataggcaaaataaaagtttatatttcaaattattttattagaaatatatcataaaaaatatcttttagtgtttatttatttttataataaataaaaacgaattataagtaattgcataattttttagagtacaaatcaaacaagtgtgaattatttagtgaatggtaagaatataacaaaacttggtatataaatgggatattcaataaaaaatgtatttttcaaattttaaacatatactataaagtataaataaaaataaatttgatattatttaacatgccccctctccataagaaaaagaagaagaaatgaaagaagattggaatcaatcagaagagagaaaagtagaggaagaattatatatatgaaagaagactaactctcttccacaacttgacacattagcacatgagagtttgccacctagacttcataaaataagtaatacataattagtaattaattcaacataacaattaaaatagaaaaatataattaatgagaacttgaaccatcactctttctacattttttaattcaatatatcctctttaattttgagatccacttaagtggctaaagtgatgataaaatccaaagatttacacatattcctggcctaaaaattagacgattattatgaaagaaactaaatgaatatgcagattaaatatatctaagcttttcaagatttatgctaagaaaacaagtaatttgaaagatatttgaggagctatctttataactaatacgtaagatataagattatgacaagaatttaactaaactttccaagaacatcaagttgaatatgcttagattaaatatgcagagacatgattaataaagacatgttatatttttagtgtaagaaataaattttctaaaatttcaccgtctcacaatctatacatataattaaaaaagcaaggatatataaattcaaaaaaaaaactaaaaatctaaaacaacaataaaaaacaactcaagcacattcttttttcagatgaactaatatagttgggcttttcaaaaacaattacaaatcatatttatgtttcaaaacctatgcatttaactttactttatatgaacatgcattatataaaacaatttataaatagtaatacgtaaacccgcacgtagtgcgggtactcatctagttattattaatacagtttttgttcaatccgattcaaaccgatttaacccaatttcaatggcgtcaataaaaacatactcacgacgcactctagagctatagagagagagaaagagaaagagagaaattttggtagagagataggaagacaaggcttttcgggtgtgcaaaaagaagaagatttgtctgtatttatatatttatactctttgtaagaattattacataattggttattttcttttttctctttttcaatattaaaaagctttttatttttgcgtatgtaagagaaaatccgtacagtataaatacaaacacaaaatgcacaaaatttatgaagaaattaacttgattttgatatgagttatgtaaaaatttggaaatttgaatatcgtaggcgaatgtttcattttctttcaagtaggcacggttctgcatagtatttagtaaccataaggtttgtaataaaattagagaaaataagaaaaatcataacagaagatgctcgagaggtattgaaaatatatatggtgttgagtatgtgataacaatttacaaatgtcttgtgtattacaaaagtctatgacctctcaattacctataattttttgttcacgatatatgatcaagtaaatatccctaaagagcaaattcttgctgcttaaacaacataaaaaccataaaaaccgttgatgtgtgacttctaattgtacttagttatcttgtaccatcaacttttttgtaatacttttgtcaccaatcgcagtttctaattgcacataggtaaagtcttatgctggattttaaaaaatttaaaactctagggaccaagcttttaaagactcgaaaaaatcccaaaagctttctttctctcccgagcacctgaaaaatcaaaaccgcatcggcgcgtgaacaacactctcctcaggaaatgctaaaacgacagcgaatcttccctcgccaccaataaatttctgccacgtaaccgtcgtttccctcgattttcttcccctttccataaacccctctaaaaacccttcttttagggtttcaatctcatccatctacaacctctagctcttcgatttcacgtcactcttcactcaataaaaaagctactgcttcaaagctggctacttcttcaatttactctcattcgtttgcgttgatgtagcaaaacaaaaaccaaa

SEQ ID NO: 1752 - DNA, 3000 bp, Unknown
  misc_feature (1)..( 3000): cDNA_ID_3064087_gDNA_ID_1620444_Annot_ID_157242 3000 nt of promoter + ATG
tctaatgagatcgtccatagaatattcttcaacgatttggtctacctggagatcgcttatgtcttctcctccgacgtccatggcgaagcaatagctaggtttcttcgcctgtgtgattgttgggctatccgataataaagggagaaatatacgcgggaaaacaaagtgtaaaacgcagcgttttaagtatcccctccatgtccaaaacgcagcgtttatatggagaatgatatacattattagcattttgctaagttggagaactaaaataaatatgcatctccacccacaagtattcttaagctatggttgagtaatgtaacaatgaaacaaaaattcagtggaagagataaatataacatttagaggtcagcggcacggacttcactatagccatacctactttttgcttgttaccgatgttaggtccagcttcctcgatcatcatacacctgtggctttatcgattaccatcctcgttgccggcaacaacatctatgttttgctgatgatttttttgtgttaacaaagtcaatggcaagatccttatcaaaacttttcaagattctagctatgtttgagatagacaaggaggatgcataaaagaaagctaattgcatagttatacctttgatttaaggaaacatagcactctctattacgcgcctaccaggctagcaatttaaataaatatttagcgtttcgtttggcgtaagaaatgttaaacatgtttatgaagttctatatatcaacatggaaagtcgttttgattcttgattaaatatgttccttatcagttatccataacagtacaagctttttgctatatgattttcaattctcaaagaggtgtttaggaaaaactaaaagtttttctaatgctgtcttctggtccaataaccactataaatctaaagtatcttgttggtaagccatgataaaaggttgatcttggactacgtaggtgtagccgtgtaggttcgtcgacaatttcattacctatcaatttaatttatttctattaacaaaaaacgaaaaaatcatatagtttatatcaaaacttttatactaagacatcactattacttcaaataatatgtatgtatagggtgggaaatatgggatagatgcaatatggatagacatcactacacaacttcaatatagtttctttctttctttattatgaaaagtacatgtcttaatgcgacaagatatttctagcctcattttctatatagttttgtttatagattatattcatcaaaaaagattttgttagcttttgtttaggtttgtcatcctctgtttctcaagtttaggactgttgtctcacaaaattttctgacttgttgtctttgtttctttgagattccggatttcgttaaccggaatatgcagacattgttttcggttttttcccacctttgcactatacttttgcagtttaaaaggattttacaaaggcggtttatcaaactggacatgcgattttaagccaagatttgtattcatgcaactaatcaacaaaggataagaagaaaaaagttaggaattttgttttagcaatacaatcattcacacatgatattgacacatcattgctctctaggattaaaagcccccttacagtcttcaaagtccgtagctaagttggaaatttcttacttttataacgtttaagtgtttgtattttggtctataaacagaagataattcccataaaataagaggttgaacataaaccatgtcacactctcaaataagaggtgcaagtaacataagtggcaacgtctagacttaactaaaaagattcgtccgccagaagtaaaaagtaatcaaaaataaaaattcgagaaaatggtctcgtacacggaacctctaacatcaacgtaattgactattgagcccccggtccagatacatagcgactagcgagagaagaaaatcctcagggtagaatagtcattaactgcctaaccaatcatgaaatgtcacgtgtcacgatcttagagcctctaaaacggacggtggtgaggttgtcaagatccttaccgtagttcttcttcttttgtggctattacaaaattggtttaattctctaaaccgacaaagagagaacccaagtttaaaattttaagtgatttgaatgatacatattgtatttgctacttaaattaaaaaacaatcaaatggagaagtttaatgattttttctgataaactattgaatttactgttcgtttgtgggtcggttggtctaaaccggccgttagattacgtaaaattgagttggtaagtaggtcggtttaccacgtgatattttcttagctagagtttggaagtattgctagcgtgcacgatggtgcaccgaacaagtgttatagacccttaccgtataaagaaaaaaaataaagaatcagaccggagatagatagagagagagataagggagggtgaaaaaataagcacacaccattatccatctgtttttttttttcatctctctctctctcttttcttcttcgattcgtgttttctccatttcattctctgttacgcttcaatcgaactcggtgagagtttcttcacttaatctctgtattcggattcttcgttggtttctgttgtttgttcttgtagcttatggcttcgtatttgttcaaagctagggttttatgtttactagtttgtgtggtatagttcgaatttgtacgatttagtaagctccagatcgtgaattttgatggagatggagttttttgtaaaaaagtcaattccatttgctgatttatgttagtgttttggttcgatttctcttatcttcattatgagctgattttatagcttccattgatctgagctaagtgaaattcaactttccgagcttacttgtgtaaatcgaatctgtttttatgtgtacaactgtttcttgaagttcagtgatatggtttgtttactaactcgttgttttcttgttgaatttatttaggaagtcatg

SEQ ID NO: 1753 - DNA, 3000 bp, Unknown
  misc_feature (1)..( 3000): cDNA_ID_1022127_gDNA_ID_1620444_Annot_ID_157251 3000 nt of promoter + ATG
ggataaaaatatccgacctgccggaatcgaaccagcgacctaaagattttctgttgcaaacaactacagtcttccgctctaccaactgagctaaggtcggatttacaatctaatcaactttttaacattataaacctttcttagtattttgcaagaattctttaatcagctcatcaacctcttcttaagaaaaaattctactattaattttttttttttttgtaattctataaaattcagcttcataataatatgcaaaagctgatattttattcacaagccatatgaagaaaacacattgatgaaagtctcaattttattcttgattttaacaacatcacaggttgtacccatccccttctctgttttcaagctatgatttataatattttggctctcttattatatcattgacaaattaatttgttctagcatacttcattaccctcccggctccaagctaggtgacttgatcatgtagcgttggtgctccacacgagcttgatatcttctctcttacttctcggttttggcctttggaggagaagcacaaaaccttctctaccatttgtctttctcttctaaattggttccactataaaacccattctttataatttatttcttttgttgattaactaatgtaacattttttttaaaaaaggaccatgaccatcaagatggatgtataattctcaagatcacaaatacaaagcttatgttgaagaaccacgaaaacctagaaagttcatagatccatatatatatatattaaagtttcatttcccatcagcaaaaccctgattgaccagtcttgttcaaaaagacatgagaaaacttgagagaagaacaaaaaaaaaacataaatgaatgaaaaggtattatcgtaaactatgtaataatagaccaaaaatctcctcattttctttcgcatcttgcaagtactggaaccttactggatttgcaccaaacttggaacataagaacacataagtagacacaacctttggattttctaagatccacttctctgtagtatccattctctccgagaatgtaagttttgtagttcttacacgtttctatgtctaattcactaaccattgctactttcttcttctcgtcgacgaggaagaaactcaaatcttcaaaccaatagctgttaggcaatgtcatatcaacttttaagaacttgctccacaacactatattgagctcaatcttagttgtaatccatattcccatctcatacgcatcagacttctgaaataacactgcaagctgctcttctctaacagtagatagaagtacagtatcctcatgacaacagtgaaatggaagaggaagactcggtccaaatctttcacatgtaaaatcaaaagaaagtaaaaatgcttcctctttcaatatgtcatgagcaataaagtaaacattacccttcaaggacacacgctgattatctattatatggtcttggtcggtattgacatcaataaccgtccacgcatcagacttaaaatcgtagatttcatactcacggtacatagacgaaaaccataagattttgtggttgttgttgctgtcgtatcccatataaaatctgccagctggtctatgattaaacctgccagctggtctatgcttatgcgagttgtttctaggttggatccacctggtttgacccaagtaagggttccaaaccatgagcttcgagttatccttagggttgcataacaacaataataataagccatcacaatgaaacacactatctatttcgacttgattaagtttacctatttgctttatagatggatctgccaagtctttgtgattatggagattgacgctcattaaacaagcctttaaatcacatatcatgatcacctgaatctccttggcttctttaccataatggttttttgtaaagctcgaatctttggataaatcattccattgtttacaagttaatttcactgctttcaaagatgttattggaaccctagagagtatctcttctaccaaatccgggaaaagatcagacatcgtcgacattttttcaaatagagattagggttttctactttcacgcttgcccacactacttttttttttgtttatatatacagtaaaaaaaaattgtgaagaaaaataaatacttacgtataggtgtatagccttttaaccaaaataaaaggacgtgatttacattttttttttttttgaaatatttcagtaaaattgttgctactaaattagtttttctgtaagacatttcaagtaggtaaagtagggcgcttaggctggctgaaaacagataaaggattgcgttagcctaacttggtctgttcatcgcgacgaggaagagcagcggcaaaattttctagaattgattcagcttgcttccaattccgtatctactagattctttcaacattgagtttctttcattaggtcagctcaaagcataaaggtgttcttcatataaaagacattaaaccagatagtaaaccataaacttaggtaacattaaatcagaatataagacttctaatactcgtatttcccattctatcatgtgcttgtgacctctataacattctcaatgagagaagcatccatgtgaacttgagaagcatgaaactgaaatcacaatgaacttctggtggtcatggtaatatgacccataacgttcattaccacttaagcaaacgatcttaaaaaatctctaaattcgtttgattatataataagactaattaatcttgtttgatatgatcataaagcgtcttaacatcatcgcatcaatgtttgtttgtctatgatttttcagacaatttagaaaataataaaaaaaaaataaaaatggaaatctgacgtggcgagtgagagggcttgtgaggagcacactcttccacatctttttcccactcttccttcttatcactttcctcttctctcttctcctctgatcccaccacacttttgaactttcactca

SEQ ID NO: 1754 - DNA, 3000 bp, Unknown
  misc_feature (1)..( 3000): cDNA_ID_3064070_gDNA_ID_1620444_Annot_ID_157254 3000 nt of promoter + ATG
catattgataaaccaaaaaaaatgatcaagaagaaaaataaattatattcatagagaaatggtttcttcatatcgattcttgtaaatatagcaatcaactaaaaaactaacttcaatataaactcttgtagaacaccaaacaagtcttatccaatcttttccttagaaactgatctcacgtctctcggcgaagaactttccggtgatagcttgatcaggaagcaatgcaagccagactccagtgtcagctccatcttctgctgaaacgttccctgcatagcctgtcattgcggttttcacccaaccgggacaaaaacagtttgcatatatcttctctccctctggtctctcggatagttctttagctagtactcttgtgtatgcgttcaccgccattttggagacagagtagtctgtgaaggaatgtggccaacctccagattcccatgttccttcttccacttgtttcaaaaactctgatactgttttgtcaacgatttcttcagttagagagtccacatccataagcttggctctcacgtcttcattctcaagtttctgttgaagagaactaggtcaaaattcgttgctgccataatttttaaggaagatgaatcgagttagagagatatatagatatatgtacactgtgtcggccttttaatctaccgagccttgaagtgacattgacaatacgagctccttgacaagcatgtctcattagtggaatcatggcgttgattatgttcttggtgccatagtagttggtagatataaccatatgcgagaattcaacagagttatctgatccaacattgtagtttactcctgcattattaatctgcatgacaaaaatatttcacatcataactcatcaagagaaaagcctttagtatcaaagtctttcaaatgaaaagctcatttggttatgtgaattaatgaacaaaaggaaccaaacttactaaaacatcaataaatccatatttttctttaatccattcgcaaaactcttggattgaggaagagtccaagatatcgaggcggtggaaatcaacattgaatccaccttcttgaaggatcttggcggcttcgacgcctacattctcgtctcttgatgttagaataactgttagtccatgtccagccaattgtctcaccatctcaaatcctattcctctattcgcacctgttaccaccgccacggtttcagaggtccaccacctaaacaatcccccattcaagaaataaaaaccaatatgacacttagttatcagcaagacaacaaaaaaaaaagatcgaatgaatctcatatataagaaaccaaaaacttatttaaacgtccaacaaaattgttttcagtttgagatatcgatggaacacagaatttcataattgcatctcgtggacgataagcttgtaccaagtaaactagtttatatgttttgactagacctaaatgtaattcttcctactgagtaagggatatatacaaacatttattataatcaaaatttcatagatatgaagacataaaaatttagaatgggaatattgatacctctggtgatcagaatagggaatagtacgaaggagggagatctcttggagtctcttatctcgtttctctttcgatttttctttgcttcctaccatctttcttcttattttctctcttctacgatcctaagtatgtttattttcacgataagaggaggcaagaaagaacacagagcttcgtcgtcgttctcatctccctctcacataattttctcatcctttttgtgggtcaaaaggtgcaatcccccactttctgcgtaatttttttgtggcctctcatttcaaattcatctgattcctatttttagttatagcatctgttatgggaacataaattagctggggcctagctagggtgtgggctctcaatacgaaccaaagttttgttcattctgttttagttcctattaataattcgaccatttcttaacaaaaaaaaataataattcgaccatttggttttgtggcggtttaaaattgagaaaacaatcttatttaagagtctctcgtgttacacactctcactacgaatctatgatccacatgaccacatgcatgtcacgttgcatcctctcacattttgataaaatttatttgggacattttcggtatatagctcaaggctcacaatctctcatataacagctaagataacgttcttattctggtttagatatatataatgaagaaattaattagtttcaatgtgtcatatccacaattattctaatttttcttatttattatatatttaattctaatatctttttttgccaaacactattaattccatatactaattatttttatcaactaaactttttttaattgtggtatatttatttttggtatattattttttataggtaaaattatgttatatttattatttttatcaaaagtaaataaatatattttgaatagataagataagatattttttctttcacatatttttgggattaatattagattaaaatatagttaaaatcgagtaagtttggttaaattctggataaatagaaaatattgtctatttactgatcgattcaattagaaacatagttttaagaataaatccaaaaatacatataattttattagttgcaattagtcaaccctaaaaacaattgacaaaaaacaattaaactaaatatcctactacagtttttaactctggcataatattgaatcaacaatcaaatcatctaaaagaatatgtagttctctattcctcaagattttatgtctactttcggctcgtcatatcaatttgtactgttgtacatatctaagccaaaaagaataaaaattagttataatcatatgtgatcaagagaaggccacgacaagtataggcccattaatgggtccataagtacccactttcattacagaacaacactttcctgccgaaaagagagagagaaaacaaaacaaaaa

SEQ ID NO: 1755 - DNA, 3000 bp, Unknown
  misc_feature (1)..( 3000): cDNA_ID_2143501_gDNA_ID_1620444_Annot_ID_157259 3000 nt of promoter + ATG
ttatattccttcttctagccaatgcatcaaacagttccaaagcaaaatcctttgaagtcattcctacaataccaaattttcattcaatcagtacaaaaaaaaaacattctaatcacttttcaagattataacattagtctttacctatgcattcaccgaactttgtccgaagaagtagtccaccggtagtcgcggtaatctgattaaaccgcttctccacggcagaccaaccggcgccaccgtcggttttactaatgaacttaagtcccttcaacgcttgactcgcggcggatttagtccggtctaacttagccggtcgaggcggctttcttccaccaataccaccagaaacagatgtcaaacgcttaagctcgtgagaaacagacgccaaacgtttcaccaccgttgttttcttctcaagacggtttcgtttcagcaaagtaagctccggactctcttcaacgctagatccaccttccattttcaagctatgtacagagactgtatcgtcttgtacatctaccgtgaggtccacgtatggtgccgtacgtgttctctgactgttctcagcagtgaatctggagttccccggttttttatagatcggtggtaattgaccaccgctcattggtccgctgtttccggcttctgcatcagagtgatagcctcctgacacttcaaaactcactctagacattttttaacacactctacctgaaaattttctcgtcgccgctaaatttcaccgggatctcaaacaagagacacaaaatgatgaagaatttgttgtctactggttatggtcttatggaatctctcactacttttttagaggaaaattttgtaaacgcagagacaacatttttcccgagaaaatgagagaatttttccgggaaaatatttgatgttattcttctctctgaaagtaaacgatctctcaagtaatttttgataggagaatgagaaaatggattcgtataaatagtgaagagaagagacgagtaaaagaatttgaataaagaagagagacgtggtcggacttggcccaccaactttgtcatctatgatgcaaaatatttaacaaataacaactaattgaggttgtaacgtgcatttgtaatgcaatacattgagaaaaaaacaaatattatacataacaaagttgagtttttttcactagttgtttatttaagaattagaacaatagtccactgttttttaacaagtccatagcgaatgttggaaacttattttaaaaaattattaattggaagtctaaagaattacgaaaacaaattgtatttgattaaaacaaagtacaaattgcatttaaaaagaaatagtctatagaacatggatgatccttccatataaagtttgatcatgcacatagtatgacaataatcaaagagcggggatagctgtgaatctttagcagcgaaaacttcaaacatatatttcatgaatacaacaatgttataaaatgaatttcgtacgacataataaatgttatagtaattcttatgtttgtccaaaaaaaagaaagtaattcttaggttaaatatataaaaacatgacaaaagtgtaactattaaagatatttgatgtactacatatatataacaaattttatcaaagatgtacatagacaactatgttcttaaaactccacaaacattacggcagttagaatttaaatttatcttggaatattgtttgtatattattaacaaatgtaaattggtgtaggttttcagattttcataatgaaaacagttttaaattatggttacgagataattttgacgaatatgaatacatatatagaaaatgtttgggcctatatctatgaaaatgtttgggcctatctatatctatgaaaattgtatgagataccaacaaaataaaatatttaaagtagcaaaacattgtgttacttttctattatcttgtcttaaataaataaaaatcaattttttttttaagaagtaacacaatgtgaagaatacgtgtgtacttttttttttttggcgtaaataaaattagtaaattaagacaagattaatagaaaagtacacacgtattcttcccattgtacgttaaaaagctcgtgaattcacatgcatgaggacgatttgggtaaccaataagttgactatatttttgtatgtctttctatttttcttcacatggaaagaattttccaacgaaaagttgaaggggagacaattaggaacactaaattgtcaccattaggctcttaagttttaatttggcaaccaatttcattttctctattctgtatttttggattgggaccgttttatttgtttgtgtgtgtgcaacttgagctcttcttctgtaacacgcatgtgttgcgtttggtttttaatttatttgcctacttttgcgttttcaacgtttgttaccacatttgaactataaagtccaattccataccgatcctctacaaccatataaatgtgctacaacaaaagttaatctttgatcttgatcaactcaaagatgactatacatgattagttctcctaaaagctaatgttgtagagtgcaattgccgacaaacctccaagttttgtgtcaacttgaatttgtacttaattgcaatctttggaacgtgttcattcgaaaacgagaataaaaagaaaaaaacatgactacgtctataacaagtaaacaaaagacaacagtgaaaagaatcttatcaaaagttcaaaacgcaaacgtggctaaacctgtacccaaacagtcccataagaagccagaatcaaagtacactgtgtatataaatgagcccaacaataaccgaataaacaaaaacaaaaaaataacgttgccttgacgtgtcatcttactccatcccttccttttgcttcttctcctttacttccttttttttttctttccatcattttgtcacaaaccggaaaaaaaatctcaccggagaaaaaataaatctcaccgacgacgaattcgatc

SEQ ID NO: 1756 - DNA, 3000 bp, Unknown
  misc_feature (1)..( 3000): cDNA_ID_3053837_gDNA_ID_1620444_Annot_ID_157257 3000 nt of promoter + ATG
tattagatgagtcaattatctatggaactgcaacaattcgaggtgagctatacctcttgagaactctgccggcgctaccatcatcaacggtgaagagtccaacggctatatgctccggtgcgatatattgacaatccatagtcctagagtactcaaccgcagcttcaaagactcgtttcgtgctgatagagaaaggcatgtccgtcgattttgaatacgaagtagaagaagcttcctcctgtttcgaatcggaattagcttcgtcccaaatactccaaacagcttcacgagccttgtcgatggtgataccggatccaaggaagccttgaggatcacgatcctcagcgatcaaacctaagagaagatgctgcgtgtaaaccatatcttttcccaacgatttagcttccttctgagagaagattatagctctgatcgctcgttcggtgaaccgttcgaaaaccgctgaaatcggagtgaatttcttccgttttctttgaggaaatcgtcttaagttcgtcggagttgtggagaagcggtggatcgtgcggttagaaagggagattccgagatatgaagaagcgaatgaagaaagtgaagaagcggcgatggaggtgacatgtgaagaagaagaagaagcagagaggagtcggtgggagtgaagcgttagaggtgaggaagtagataacacctccatgatcgaattcgtcgtcggtgagatttattttttctccggtgagattttttttccggtttgtgacaaaatgatggaaagaaaaaaaaaaggaagtaaaggagaagaagcaaaaggaagggatggagtaagatgacacgtcaaggcaacgttatttttttgtttttgtttattcggttattgttgggctcatttatatacacagtgtactttgattctggcttcttatgggactgtttgggtacaggtttagccacgtttgcgttttgaacttttgataagattcttttcactgttgtcttttgtttacttgttatagacgtagtcatgtttttttctttttattctcgttttcgaatgaacacgttccaaagattgcaattaagtacaaattcaagttgacacaaaacttggaggtttgtcggcaattgcactctacaacattagcttttaggagaactaatcatgtatagtcatctttgagttgatcaagatcaaagattaacttttgttgtagcacatttatatggttgtagaggatcggtatggaattggactttatagttcaaatgtggtaacaaacgttgaaaacgcaaaagtaggcaaataaattaaaaaccaaacgcaacacatgcgtgttacagaagaagagctcaagttgcacacacacaaacaaataaaacggtcccaatccaaaaatacagaatagagaaaatgaaattggttgccaaattaaaacttaagagcctaatggtgacaatttagtgttcctaattgtctccccttcaacttttcgttggaaaattctttccatgtgaagaaaaatagaaagacatacaaaaatatagtcaacttattggttacccaaatcgtcctcatgcatgtgaattcacgagctttttaacgtacaatgggaagaatacgtgtgtacttttctattaatcttgtcttaatttactaattttatttacgccaaaaaaaaaaaagtacacacgtattcttcacattgtgttacttcttaaaaaaaaaattgatttttatttatttaagacaagataatagaaaagtaacacaatgttttgctactttaaatattttattttgttggtatctcatacaattttcatagatatagataggcccaaacattttcatagatataggcccaaacattttctatatatgtattcatattcgtcaaaattatctcgtaaccataatttaaaactgttttcattatgaaaatctgaaaacctacaccaatttacatttgttaataatatacaaacaatattccaagataaatttaaattctaactgccgtaatgtttgtggagttttaagaacatagttgtctatgtacatctttgataaaatttgttatatatatgtagtacatcaaatatctttaatagttacacttttgtcatgtttttatatatttaacctaagaattactttcttttttttggacaaacataagaattactataacatttattatgtcgtacgaaattcattttataacattgttgtattcatgaaatatatgtttgaagttttcgctgctaaagattcacagctatccccgctctttgattattgtcatactatgtgcatgatcaaactttatatggaaggatcatccatgttctatagactatttctttttaaatgcaatttgtactttgttttaatcaaatacaatttgttttcgtaattctttagacttccaattaataattttttaaaataagtttccaacattcgctatggacttgttaaaaaacagtggactattgttctaattcttaaataaacaactagtgaaaaaaactcaactttgttatgtataatatttgtttttttctcaatgtattgcattacaaatgcacgttacaacctcaattagttgttatttgttaaatattttgcatcatagatgacaaagttggtgggccaagtccgaccacgtctctcttctttattcaaattcttttactcgtctcttctcttcactatttatacgaatccattttctcattctcctatcaaaaattacttgagagatcgtttactttcagagagaagaataacatcaaatattttcccggaaaaattctctcattttctcgggaaaaatgttgtctctgcgtttacaaaattttcctctaaaaaagtagtgagagattccataagaccataaccagtagacaacaaattcttcatcattttgtgtctcttgtttgagatcccggtgaaatttagcggcgacgagaaaattttcaggtagagtgtgttaaaaaatg

SEQ ID NO: 1757 - DNA, 3000 bp, Unknown
  misc_feature (1)..( 3000): cDNA_ID_2143478_gDNA_ID_1620444_Annot_ID_157253 3000 nt of promoter + ATG
agttatcgttgaagaaagaatgatgtaaataagtaaaagaagatggtcctagagcatcttgtcatgggcaatatgaaaacccacatcttcgtcaggtatgttgtgttgttcgaagttacatttttttgcatcctgatatattatttctatactagcttatggatgtgtattagttacatatttaacaccctcatttctgtgtatttaattttcatatgaactttaacaagcttttaaaaatgaccaaattcaatcttggtttggtgactgtgacaaatgtaaaccataatatcttttgacagatatcttaccatcttatctctttaaatttggacaacattttatccaaaactaggcaaaatctagtaacaccaaatattagcttggaaacttcaacaaacaagacacaacactgtaattatctcaacgccatggaccttcttcacggcctggttctttattaatacaatagtaaagtaatggttgctactacttggtatctattttcatatcataacttattttcactttgatactttttgaaaagaggagtttatgtttactgattccctgaaatgggagcatcacggcctctcttgaaatcgtcccatcctctgacccagggctgtccagccgctgcacgagtctctggcgctgcatgcttgttcagattcttcatgactttctcgtgtaacgccgagaacacctttaacatcacaacaaggattgttttaatcactgaagtaaacaaaagacgatatactgtttaaacgtagactcgattaagagattgtgattaccggatttgaactcactgcttccggaggctgttcctgttcagttagccatttccagagatcagggttttcctgcatagaacaaaaaaagattgaatgcaataatctaacaaattcctgattacaccttttgacgtcactatgaacataataaagttttcaccaaccaaattacttgtatggatcatttcgagattagatcacatcacagaaacaacctcaatctggttaaacaactcctccatacaagtaatttggtagcttcagattctacctaaacatgcaaatattcatatacataaagataatttttactgataagaagagacaatgaaacataccaaattgaggacatgaattagggatttaacaccattttcgtccatggaattaacattctcctcaacccaattccccaaaacaagatcaagttccaaaaaccctctttgcttgctcctatacaacaatctatcaccaaaaccctaacaatcaatcaccaacatttgaaacaaatcgaatccaaaattataaccatacctgttgatcgttcttctcttattctcttcgttagagagatcaatatcgaaattctgggcagacgcagtgttctcacagaagaatctcgcccccaaatcaactccattcctagaaaaaatatcaatcccacaatttttttttcaggcgtgttcacgaatacacagatcactattattacggtggagagaaagttaaagtaccggaatataataggatatgaccggttagcggcggcaggaatgatagagctccggccaaccacggcggtggagcgaatgatccggtgaacgttgatcagagcttttcgggtagccattttttgttttgttttctctctctcttttcggcaggaaagtgttgttctgtaatgaaagtgggtacttatggacccattaatgggcctatacttgtcgtggccttctcttgatcacatatgattataactaatttttattctttttggcttagatatgtacaacagtacaaattgatatgacgagccgaaagtagacataaaatcttgaggaatagagaactacatattcttttagatgatttgattgttgattcaatattatgccagagttaaaaactgtagtaggatatttagtttaattgttttttgtcaattgtttttagggttgactaattgcaactaataaaattatatgtatttttggatttattcttaaaactatgtttctaattgaatcgatcagtaaatagacaatattttctatttatccagaatttaaccaaacttactcgattttaactatattttaatctaatattaatcccaaaaatatgtgaaagaaaaaatatcttatcttatctattcaaaatatatttatttacttttgataaaaataataaatataacataattttacctataaaaaataatataccaaaaataaatataccacaattaaaaaaagtttagttgataaaaataattagtatatggaattaatagtgtttggcaaaaaaagatattagaattaaatatataataaataagaaaaattagaataattgtggatatgacacattgaaactaattaatttcttcattatatatatctaaaccagaataagaacgttatcttagctgttatatgagagattgtgagccttgagctatataccgaaaatgtcccaaataaattttatcaaaatgtgagaggatgcaacgtgacatgcatgtggtcatgtggatcatagattcgtagtgagagtgtgtaacacgagagactcttaaataagattgttttctcaattttaaaccgccacaaaaccaaatggtcgaattattatttttttttgttaagaaatggtcgaattattaataggaactaaaacagaatgaacaaaactttggttcgtattgagagcccacaccctagctaggccccagctaatttatgttcccataacagatgctataactaaaaataggaatcagatgaatttgaaatgagaggccacaaaaaaattacgcagaaagtgggggattgcaccttttgacccacaaaaaggatgagaaaattatgtgagagggagatgagaacgacgacgaagctctgtgttctttcttgcctcctcttatcgtgaaaataaacatacttaggatcgtagaagagagaaaataagaagaaagatg

SEQ ID NO: 1758 - DNA, 3000 bp, Unknown
  misc_feature (1)..( 3000): cDNA_ID_3064076_gDNA_ID_1620444_Annot_ID_157247 3000 nt of promoter + ATG
tcttttcacaaggacgtcacacatatggagctctttaaaaaatcaccgttggaagtggtcttatctaaggataaagattccaaaaagatgtctagtacactgagaaaggagaaagaaaatatacatcataacatggctctatagaagtatagttacatgtgtctatctgtcatctatatttgtttttctatttgaattattgtgtagtgaaataactatggttttgctaattgtggtcgacgttgtatttgtgcatgctaagacgaaaacataattattcgctcttttgaaacagcattactgtgtttcgggttacgcacatgcatgtgttgttgccctttgatttgtactatcatcgcttagccgcttacgatgatagcttatgctttatattttagtaaatatttcataaaaaataggttttcttttcctatgaattgtaatgttatcctgttaacgtttgtgaatatttctcaaattaaaattgtcacgtcttcgtatcggctttttactttatgttcatgttggtgtagacgttggccttctgacggttcatgaaattgttaagcatgtaatgtgactttttaaattgctttcagaaagaaaaataaaaattaaagacttgaagcatgctatatttcacgctataataattgaggtcccgatagtcatgtgaggtctatcctaatacccttatagtagaaagagccttttttaaaaagttttcaaaaaatattataatctgatttgggcaatactttgcattacatatggatgaactaataagagagaaggtttttaattagtagacttttgtcacttcaattctaatcatgaaaaaacttacaacatattttcattctttaatatagtttacaatctaggattggttagaaagaaacaactgagagaagtcaccaccggatgcttttggctagtggtttatcatgttgttctcgtagttgaaaccttggtgagagctagggatgcacattacgtcatatcataaagtattagcaaaggctataataccgagccatgggaggaacactgcctcggccgggccctctcctagttaacaagaaaagaaaaaaacctaaggaaatctgagttgggtcttaatttcctaggttgtcaagtagaatctgacaaatgtacaaaacagagggtacgtgatcgtttaggataagggaagacaaagtaaatggactgaatacacctgaaaatgttagacaattaaatattgaatagacttgaaaattacaagtcgttacaaaggcttcacaaatttgcgatgtatcaatctttttatttattttaataattggaataaaggaaaactattgaatggaagataaatagttcatacagctatatgattatgatcattatgatggcaggacacggaaggcaaaagagatacaatcagtttcacaacaataaatcacgtgtaaaattttatagattctgaaagggacaaagggttacgtaacccatcttctttaaggtggcaagtagcatcaaattcattggttggcaagcattttgtttatgcacgtgtggataaggttttaaatgataacattgacgtggcctattatggttggttaatatctaatgttatgtggaagaagaatttactcaaaatgaatcttgtcctagttattgcagaggtatagaaacaactaccgaatgtgtttaatgatggtctccaggtaatgaatcttccgccttggaacgatttcctgtcaatatgaattttgaaaggacttcaaattacgaatctttggagcagttgcaatagcatgatagagacagtcctgtgagcttggataaccaaagttgagctggacagtctcttaactgctcccaagagagattagtgtttgaagattcaaagaaactctccttaggtcaagaaagattagtgttagaagatttacgtggtggcaatagttactgtttaaggtgttgaaattacgtttttatatatataaaaagcaaattaccccgcgtattgggatattgagggcatatatttaattaatctgtttcataagaaaactaaagacacattttaaaaaaaaattaaagaaccatcataagaaaatataattaaggaaacaccataagtggaaatgacttgtgaggttttgtagagagactgagtagactttagaactgtagttgttacaagaagttgtttccaaccaacaaaggtgtttttgggtttgtgtatacttgtgttaaagtttttcgttcttttttgatcaaaaaaagacttgtgttgagggtttttttttttttttttgataagtttaacgttgtaatgttgcttaaaaaattatactagtaaactttggagttggggtgcactaaagttctgttatatctgaaagtatctctgcatgggttttacatacatctatatagaattgccatgattgtttttgtagtgatatttatattagctaggcctatattttctttcttgttcctatagatgcaatacgtaaatattatagaaatgtttttagaacaagtagtaagacatttcaatcagttcacacaaaatgattgaatgaaaaaataataatataaacagctatctgattgtgattgcaagatattgggggcagacaattaagagagtacaatcagttccacaacaataaatcacatgcaaacaagcttttatagatttttatagacccacacttcttctcaggtggctctacacattcatacgtgtagataagagtttgaataataagttgaagtggttaattctgattggttgatatttaaatctcgaagaataattttattacttaaaaaaaaaaaaatgaaacttgtctcttcagtttcatcactagcctcgtgctccaccattagacaaagacattttagaactccgaaaatgtcaataaaatggatgatgattatgagaaaaacttacacgtttaataggcccgaagttgctatctagcagttgtagcc

SEQ ID NO: 1759 - DNA, 3000 bp, Unknown
  misc_feature (1)..( 3000): cDNA_ID_2105242_gDNA_ID_1620444_Annot_ID_157248 3000 nt of promoter + ATG
ctaaggtgactcatttgatgtagtcactaaattgcaatattttaagatgatacttgctctgacctaaatggtgtcagggaacactcttgacctcagttcaatgtggtactatttatatttgggagttgctttgtaaatgttgcaattttacatttaaggaacatcttctgacctttgacgtcattttgttatttaatccaaaattcatatactctattttctctgcagtcttaacattttaaatttatctcatcttattcggttttggacagtccttcgagtttaaagatatagtgaaaatcggaagaactcatactcaagatgctacacctttgacattaggacaagaatttggtggctatgctactcaagtaaattatttgttctgttttctatccttatataacaaaagtgaaaattacatgtcattaagaaataacttataaatttttggatttcatgattgtaggttgagtatggacttaatagagtcgcatgtactctaccccgcatctatcaggtttggaaatgatatctcttgaggatctgatttcatattattctcaaagtttcattgagctctgacttgttagaaatgtttgtctagcttgcacaaggtggaactgctgttgggaccggattaaacactaagaaagggtatatctcgtttctagttttatatccattccgatttcatcctactggtaacactagtactatatgcataggtttgatgtaaagatcgctgctgcagtagctgaagaaacaaacttgccattcgtcaccgcagaaaacaagtttgaagctctggttagcctctaaataactttcatcatcatcaatgtccaaatttagtcttagcgtcttccactgggttctaaatcaaacaagatgcttctgaatggttgatgtatatgaaataagttgttgagttattacgcctttgtaggctgcacacgatgcttgtgttgaaacaagtggatctcttaacacaatcgccacatcattgatgaagattgccaatgatatacgttttcttggaaggtacgttatctaatattttttaatctttcttcaagatgtacatgttcttatgataatttaacatgtctttatatatactttatatagtggtccaagatgtattcttatgatattttaacatgtctttatatatactttatatagtggtccaagatgtggtcttggtgaactttctctgcctgagaatgaaccaggaagcagtattatgcctgtatgaatgcaattttttcctatggttcttatgtcctttccctctgcggctctgcctataccttttatttttcatagattttgattcaattgaattttaatctatctctcagggaaaggtaaatcctacacagtgtgaggccttgactatggtttgtgctcaagtaagttccattcaccaatacatattttactaacatatgaatttaaattgctaaggtagtcttgttcatgactcttttggttgcatcaaacaaaattgtaggttatgggaaaccatgtagccgtgacaattggtgggtcgaatggtcattttgaattgaatgtattcaagccggttatcgcaagcgctctcttacatgtacattaatctctttacttgtgatttttttgtcatttatactctattaaaatttaatcttaactatttgatctcatgtctttactagtccattagactaatagcagatgcttcagcttcatttgagaaaaactgtgttagaggcattgaggccaacagagaaaggatctcaaagctattgcacgaggtaggcttcttctcgttgattggccttaaaattattcatgtgtggaaatgatttatatataggaactaagtctttgttttatgtatttctctctagtctcttatgcttgtgacatcattgaatcctgtaagtctctaaatattaaacttctttgtcaagtcatccatattctcattatgattacaaatgaatttacctcaatgctaattcctcctttaccagaaaattggctatgacaatgctgcagcagtagccaaaagagctcacaaagaaggatgcacattaaaggtaaacaataaactattaacgttttcatcactaaataaatcggaatttaaacccatttttagcaagagaaaacatgttcatgtttgttacaatatatttgttgttctattttggatttaaaccttctccagtgaaaattatataatacaatacctttgagatccctaaatctttgctttaatttattctatagcacgcagctatgaagttaggtgttcttacttcggaagagtttgatactcttgttgttcccgagaagatgattggtccatctgattaagtactttataatggagccaaaagcttcaaatacaaagtggatgtttgggggcttttgcatcaagttgtgtttattcttttgtaataaattgctgcatgcatgtatgcttgtgttcaaaattttggatttgttttagagtcatgtgattatagtattctaagtaatttatcataaagtttgtcatatatacttaagtttaataaaaaataaatgtgtgtgaaaatgtcacatattggtgtttttgttataaaatgtcaaatattctaagtacatgtcaaatacttaagtcatgtataacatgttttctattatttatatttatgtccaccaataaagcacttatatatcaaaaacagattgggattaaatgatagactttgatttatatgagacttttgcgacattttatcaaaatatgagaatagacaaacaatatcatcacgacatgaattggtcgataaggcccatgaaggtccagtaatcttaatgggctttatacagataaattataccgaccaaatcgattatatacgcgccgtcgtcttctcaaccatcgcatattcgccgccataagcagagagtttcacatataaacgaaaaattcccttcgagaagtctcaagtcgacgat

SEQ ID NO: 1760 - DNA, 3000 bp, Unknown
  misc_feature (1)..( 3000): cDNA_ID_2143519_gDNA_ID_1620445_Annot_ID_157277 3000 nt of promoter + ATG
ctccaacatttgtgagagagggacccatcgtaaacatcacatcagattcttaagcttttcatttcttttgatatacaatttttggttttgttatttgtaataataataataaaaataataataaaatattatatttttggatctctatctcggccaccggagaattgttctgatttgcttccgcaatgcaattttgctggtttggtacagtttctgaaatctctctctaagcatatagcttctagatatctttgcgtcgatgatgctgttgtgtcatttggagttttttcggactgtgagtgtgcctgtagacagatggtgatttggttagaaaacgttcaacagaatcttgaactttggtgctcacgttgttgactttggtgctttacttatagtaaccatggtttggtatgtggtttactatggtcggatcctactggagacgtcaaagcctggggcatgaatgattgtggtgaatcatagacttttggagctgacaaagtcgcagagttttttgaaaaaaatgatatggaccttatctgccgtgcccaccaggatttaacttgagttatatttgtcattgagtttattctgaaaactgttcaaccttaaggtgagtatcttgactatctatatttagaccatcattattggtgattatattgatttttatgttaagaatgactcttatataagagccaaaactatccctaagagatggacgtgtgtcaatttttaagtgggtgaactatttatcagaagaaaaaaataaactttcgtgttctcttctcacttcctctcaaactttttgtcgactttctctctttctatcaacgagagccgatggcgataccatcgtcaagtaaagtacaaagcttttcgatcttattcgtatcctttaccggcgaggattgtctttttctcttcctgaattacactctctttttttaaaggatccatctttgatttgggtttcgttttttcttttcttttttggttttaagattcgaacaacattcaatagaaagaacttgttgtcacccccatcgagttgttttaatgtgtattaggtatagttaaaatccctaattaaagtctatgagttctcctagagattcactaagtagtttgctagttgagataacttcgcaaaatcttgtctttggttctgaaaaaagtggctgcttccacatggattctatccaagagttgtaggaatctgctaggtcttgtcgaccaactttgctttgatgattcgatggttgtgtatcccaacaaataagaagctttgattttcttttgattttgctctggtgcaaaacagaacaagcgattttgctggaacaatcgtgtgacctttttcttgtcaaacaccacatcagcttagacgtgtgttgattgttatccgactcatgcaatgcttgagtccgttcatttgcttatgttaaacgtatggaattttaagtaatatctttgactttctagaatgtgttcaatgtgtttttgttgttgaagacatcaactctctgtcttcactatgcttcaaaattacatgcgttcttcaacgtaattggatttggtgaattacatacactgtgattatgaatctttgttttgcatttgagaagttgttgatgttgattatgaactcttttttttttaagaaccccagtttaaatactaccattggacattgcctaaaattttaattcttacctaagctcttaacttcaaaattttcaaattcagtaatagaaatattgttaagagcctttgctaatatactaccaatattgttaagagcctttacatggctttcaaacaagtagaaattaaaaacttattttttcttctccccatgatgattaaaaactctctacaactttacatatattttttcgcaaaatcgtttttgataaatgaataatatcaatttttttctttcttttaaggtctattttacaaacaactattttctttttatcatcaccattaatgtgttcatacacgtcattcaattatttcattaactgcttcatcattaatagtactcaatatacagctactcactaaaaaaaaaaacatttcaacaattaaaaaacaattttttaattagcgatcattttggaactaatttgtgtttgaaacacggcaaaaatagtttggataatttgaagaagcaattcaacatttatcattataatctcaaagttccacaacacccccgcccccaaattttcttagtttatctcacttcttatttggttattaaaaataaatgaatgaataatacatatccaatttatttgttgagaatatttatttagtcatttatttaagaatttctatgatgttatttttattattattaaaatttatttttgttactatgttgcaacataattcaattttaacataatttatattcataaaaaatattaaataataataaaaattgacattcacaacttctacagtttttagttactaatcttaactgtaaaatttttgtaagttgaaacctctatagccaaaattaaccactcaaaccaataagtcccaacatccacattggttaattttttatgggtgtctttagtataaattagtaaaactgaagacatctttcttttcagatgtttaaaatgtctctaaaaatacacaaaactaatattaaagacactctttattttattatcattatttttattagttttatatttaaaatcatccttcaaaaattaaccaatgtgaatgctataacgaattatatattaaactcgattgtgcttgtcccagagaacaacttatttgattatctattcttaaaaagtaatgacgtcagctttcaatatttcacgttttttcaaagagaaaacatattatatttaggtaataaacaaagcctgatcattgatcaatgcatgggatctttttttgtattataaaaggctactctgtgtcatttgcatctctccactttgagcaacaatggcatca

SEQ ID NO: 1761 - DNA, 3000 bp, Unknown
  misc_feature (1)..( 3000): cDNA_ID_1013144_gDNA_ID_1620445_Annot_ID_157283 3000 nt of promoter + ATG
catcaagtttattttgttggtatactagagtatttgcaaatcctgtagaggggctagagtggttcgaggacagaagtcagtgaaagtcactattgatccaggtaaatttctttttccatagttataggtaatagtaaaaaatattgtgcagttttcatcactttgatctcacatttatttcatctcataggggttgacaatagtgatacattaaaggtggcaagggtgggtggggctgatcctgaaggtgaccagcctggagatctttatgttactctcaaggtgactttactaaagtcaactttctaacggacagtcatagttaattatttacttgcgtctcaattatttggctgtattccttttcaggttcgtgaagatcctgtgttccgcagagaaggatcggatattcatgtggacgcggttctcagtgttacccaggtgaaataacatggttttgtcaatcctgtctttaaaagtttatagacacttttgccttcagcatctattttggacttctggtgcagtatccgtgagttcgtttaccgtttatgtattgttcatgataaccgagtatatttttcatcttttgtcaggccattcttggaggaaccattcaagttccaaccctcactggtgatgttgtcgtgaaggtatatcaatttttttcacatttaaaaaaatgctttaagattttaactctagttctatcaacaatgaaacatgcttgccagcaaactgaacaagctcgacaatgtgaaatagaattcgccatccagtgattcgtaaatgctttgattctaaactttagattgtctttttctttgatgaaaaagaagatcagattttgcttgctagctaactgatagttaattccagctttgggtttctgctcccacttgttgtcgtttaggacctggtcttggaacttctccagcattctaacttggaaactcttttgttgcaggtccgtcctggaacccaacctggtcacaaagtagtgctaagaaataaaggtgagctcttttgtttatgtcgataagttcagtcgtagaatacctgtaagatgaaagaaacttttgagtatgattgtcttggattgagctaattagtgtctcacactggttattaagagcaagacaacagattgagaaaccaattgtgaagtggagtcttgtttgtttacttttcaaatgacatgcttttgtttacgatacaaacaggaattagagcaagaaagtcgactaaatttggggatcagtatgtgcatttcaacgtcagcatccctgcgtaagtcctacgaagtcctgagtaaattgtgtctgacaatgatatataatagtcaagctccacagcacaatcttttcttattcttgttcatgttctttggcagaaatataacgcagagacagcgtgaactgcttgaggaatttagtaaagcagaacaaggtgaatacgagcagcgcacagcaactggatcttcccagtgaaaaatgcaaatgctgctataagcctaaaaagctattgttgtggctgtatcaatggatatataatcaatcagacaatgattgagattatattgcgtaggattagtggagagtattgtctgggttttacttttaactaattctacaatgctacaagataaaaagaaggaaaagcctgtgctgttattgccttctcaaagttatagaacttttgatacggttcattcttttttgttttttactatcgtcgatcctttttcacgcttctcaatttcagtgtctaatttgcaaatgcttctgtcaaacattttgtagcttacctcttttctaagtgttgtgattctagcgacaagaaagagaatgcataacaatagttgttcagttcggcactaggtacagtttttttgtttttgtttttgtttttggaatgtaatgttaaatgatattcaaaagataaataaagtttgtacaacgagtgcaatggtgggtgcaatggtgtttggtagctattgaagtttaaagaatttcaaaaaataaatggcggatttaacttcttgccccgaacaagagttcacttggtacagttttatattggctatatttggtttgttttagttgatgtcagtgatgggctgatacgtttccttatttattttgtttatacagtggcgaaccgatcagaatctggttatatagttattggtcaactacataattgcaatcgctagtgacaaggaaatgaacatagccacattatttggtgtaaacaacactttcaaggaaatttaacagttgtacacgtctggtcttcgtaataccgtagcagatccgctaccttaagctaaaaaaaggaacactagatgatgactatcatgcatgttgtttgttccttcctactttctttgcttatggcttatcagccaaaatattcatcttcactatttaattttctttttttaaataaaattattatgttggagtaaaaatgtcaggttagcttccaaggattttagtcccgccagtttagtttcagtaaattttgacccataaatatttgggatttatagtggtttttaagttaataaagtttggattttagattttaaattttgcataaaagacggtaaataaatagacaacaaaaataaaattgagtcatatcatattttatacgcagttgaatcgcatgtcttcgttcggagccgcactttagtaaattctctattgattcatatgttgactttacaaaaaaaaaaaaaaaatagaactatttcaaattttcaatattccttttttttttcaaagtttgaatattactttctaaaaagtaacaaatcttcctcaacaattttctcataaaagatacaatgatgaatgaacaatggagtggggtatacatagaacacacgaaggtacaaatccactcaatctcaaactcctataccactgcaacaacaacacacaactacagaactggtcactactgtcccttcctctcttttgtcggtaaatg

SEQ ID NO: 1762 - DNA, 3000 bp, Unknown
  misc_feature (1)..( 3000): cDNA_ID_3064113_gDNA_ID_1620445_Annot_ID_157293 3000 nt of promoter + ATG
tgctttacaaccgttacatcttcgatccccgcacaaccgtcatatcatctatatatcttctttttgtcgaaataaatgattgtagtttgatatcatctatctacctcaaatacttgagtttatcacacatgactgtcttaagtagtttgacaattctaagcataatactaaaaatggatccttttatctgtatacgatatcactaaaatctcattaaatttaaatattaattaggggttacaaaaataaaactaaaccgtaaatctgtatttgttatgcaaagttatgtgcaagttggtcaaagagtatcaatgattcgtccagttgcaattacccatcaaaaagtttggtagatcagatcgtctaagtgattaaattaatgatttaatcatgtgtgtatataggagtatttaaaaatggtctgaattgattactatctatattattcaaaagaaaagattctatctgtctactattccacgttcatggattgttgatatattcatctgctttttcactttgagcaacagtggaagcaataatgaactttgactttcaaaatttgttcatcttaatcctcctctgcctactttcagtcctctgttactctctcttcttcaagaaaccaaaggatggcttcaatttgcctccgagtcctccgtctctaccgatcattggccactattgttgattaaattattgatttaatcatgtgtgtatatagtatttaaaaatggcgtaaataaataatatatatacatcttaacaccatcaaattattttgtatattacaaaaaatgaattgaaattgcatatctataaatttaaatttatgaatgatgtaaatataattttatttgtgtaatataaatcaataaagtatttgaaatttaatttttaaatttatttataagttaaaaagttatgttattgtcatatataacattttttagtttaaattatttaagcttatttacaaaatttatttataatactgcagaatccaaaaacatattttatgtggggaatattttttttatatatacatattttatgaggttttaatcgggtaatttaatatttttctatttacaaataaacgttgagtaaatttagaaacaaatttgttaagttaacgataactcgaggattaaatttgtgcagacgatagttaggaaacaattgtattaattgcaaataattgaggaataaaatgattattttctcatccattatttaagtactccttttgttttacaatataagttgttttagctaaaaacacacaagttaagaatatttacttttaaaaagtttaaccaattataaaagagactgcattatagaaataatcataaaatattaaaattatataatttgtatagaaacttgaaaacaactaatattgtaaaataaaaaagttagtccaaaacaaattatattgtgaaactgagggagtattaatatataatcttttgattatttaaagacaaaataatgaaataaaattgacgtttaataaaaaagcctccagattctcatatggattcccaaacacgtggtagacatatccacgaatttgcaccattgatttgagtcattatttcttgagatatgttactttaatcggtcttaatcgagataagaactttttttggagtgggagaggggaaagttcgagataagatctggcgacagaaagataaattatataattgcgtagatttatataattaaataataaaaaatactggcattggaaaatgattatataaaatgttttgtttcctgatataaagaaatgttcgagttttagttctagaatattttagttattcaaaaaaagaagaaaacaaaaattaacgagaaaaacaagagattaataatactataatattttaatttgctatcttgacagtaatttactattatattttgctattgacagtaattttacttggtagcatgtttaagatcggtcggaaatttaaccgttcgtttgattaccaatcagataagccgttgaaatgtaggaataaaacgagttgctgaaataggtgatcaaaagtggggttatgaaccatcaaaagataagtgagcttagaaccatcttgtttataaaaacgggcagttgaaatctgtgtaattatttaatattttaattttcttaacaataattttatatattattacttttggaaaaagtttaaaaatgaaaataaatttaaaagtttatctttaaatttaatgtatttagtattacaattataataatgattttgctccaccacttgttactaatcataaatagtattaaattttaaccaccggtacagcgtgactatttatttattaaaagtagtgattttaaaatttaataattatgtattgtatataaaagtttgttaagtgtaccattttataaaacataaatatattatataatttttattaagtaatggtatatcatatgacaatttttgttttatataattttatataaattaggttgatttgatatgtctaatattaatactattaaaaataataaaatgaggatttagccagtcagtattagtatttagctgtcaatttatttttatattaatgttgatttaaacctgtccacatacccacatacgctcgttttaactcaatcgtcatttctgttccatatttctaaccgtcttttctttgaccttcatcttaaaaccgcagaaactttttaaatgatgttaccaatccaacttaacaatgtttttaccatttagtcgcttgttacctatcataactattatttaaccactcatttctcgtctgctatcttttaccatcttctctttaactgcctttaattttgcacaaccgctaaaaaacttttaaccaccttgtttgaacgatgttacgatcgaaccctatgtcagttaaacttgtaaataactctataaagagccttaagtttagtttgcttctccaatccaaagttcgagaagaaaaatg

SEQ ID NO: 1763 - DNA, 3000 bp, Unknown
  misc_feature (1)..( 3000): cDNA_ID_2143560_gDNA_ID_1620445_Annot_ID_157288 3000 nt of promoter + ATG
tgagttccatgacttcatcgagattcttactgcggaaaactggtcgtcagaagattatttggaacaagctaataatgtgaaaattgataaacgaaagatcaaaaataagaatgtgattgatagttttatatcactaacaatgagtttaaaatagatccaaatgttttcatgacaacaattagattgataaaagaaaagacaaacaaaaacagttagattgactaatgaattggtttgtctctggaaatgcagcatcgcgtaacatattatattaattattatttttggatcaactaacatgttatattaattaaaacaaaattatatatatatataccagaatttctattaactatttcacttattcacttgtttgtttatgttgaatatttttctcataacatgaatggctttttcaaatctatatatacatttttcagccattttgtgaaataaatcttggagttggaacttatttacaatggctgccactggcttttaattattgtttttttcagcaataaattgattaacaaactaaaaacattccaaatatattccaatcccatatatcacgcagatttttccaaaatttgaactagattttggcaactatttaaaacaaaaatgtttgacaacccaaaagacaattgcaatcccttaaaatgagcaaaacgcaactaaatacatttattatcaattcactaaatcttatttctccaaaatttgaactagatttcgacaactatttaaaacaaagttttgtttgacaaactaaaacacaattgcaatcccgtaaaatatttattttaattataaatttaaattagcggggtaccgcggttttttcttacagaacgggtttgacggaacgggtttggaaggacgttacttaataacaattgtaaactataaaataaaaatattttatagataaatataatttgcaaaattttatatatactaatttaaaaaaataaattgtcggttaaaatctagttttactattatattctaaacaaagcgatattcactgattttcaaaacttttccggatattcattttttctagagaaaagtggctcacgaatattggtgtttcgcaaaatatctataacacaatcctactatgtcgtgaaagattaaaagaagttttaacatacgtttatgtatgatatattatatgtacttttgtaaaatatatatatatatatatatatatatatatgtacttttgttttatagatttggaataagataatcaactctatttctcttttggtagttcttaaacatgatatgctaattcagattacaacttctattatatgtacgtacatatatacacatcgatgtatattaattttgttagtaaatagaatgttgaaagtcttataatattttaaaacagaaataatacatagaatgattatgaagagatagtggagaccttgaagtttttaaccgacaaaattttgcaaatcaaaatatcaaaaggaagaatgctttcctaaaaaagaatgattactggtcaaattagtcggcaaccggtaagtaagcaaacaatcgggaacgtgttactgttacagtgttaccataacgtgtaggttgggtaacacaaaggtaactgtgaattggcgggaacaaaaaaaaaacttttgtcgtaaaaaaaacaacaacaaaaaagttaactttgaattcttaggacatgttaagaaagccttcataacatatttgtttagttctcaaataatgtccgtaattataggaaaataaactttctggtttttatcaatcatcaaaatagaacacaacatagctctttaacacatagttgtaagaaagatagtgctccgaatcttcatagatttcataatctatacagtgttgactgtttgagaatatgaaaggatatgcatcaaaatagtgaaactctaaacaccaaaggtcaaaggaaaagacttgaaaccaaaaacaaagagttatatacactgcgagaagctgatcgagttaacttcgtcgctggcgatggaaccttttactcatgtcaccaaaaatcatgcaacaaggacgttttctaacgattgcatgtatattgttttgatttgaattgttaacgttaggcatttcaaacatatatattatcttctaattttctgatagcatacttattacgttgttatatagtataattattcaataaactatatcttcagtatattctaaacactgttttataatgtgaaatatgattatttttgttgtttataatatgattttctaagatatgtatttcttactatacaccattaattggatgatttatgtaattatcatgcaatttgtagcttgacgtttatagagcctaattttcaatcttcgaaaacttatatatacttctaattgctagcttctgcaaactcgattctgattttacgtaacatatgctaatttatgaacactgactgtcgagaatgattttatattttctttctatatacatatttaaacaaaaagttttttgaccgacaaaattttgcaaatgaaatatctaaatgaataatgctttcaatataaatatgatttatggtcaaaatagccggaaagtataaaacaatccatagggcactcatagttgtatgttaccatttacgagtaggtggccctgattctaaattaacaaacatatacttaagctctttataaaaaacgcgacataccaaccaaccaattataaacataagtgtttctcgtattaattttttcttatgccggcatacaaaccaagtaatggagttatatatcttggtttcactttctaacaatcaatatactatcaaataatgaatatacatattatcacttgtcagccttattagtagacccacacaaattccttttcatttccaacagctatatatactaacgtcctttaccttcattttcacatcaccaatccatctaagatactataactactctttccaaaagcaattttaa

SEQ ID NO: 1764 - DNA, 3000 bp, Unknown
  misc_feature (1)..( 3000): cDNA_ID_3064138_gDNA_ID_1620445_Annot_ID_157280 3000 nt of promoter + ATG
atgaaagaataaatgggtggtcagccaagtatttgtcaaggggttggaaaatagacaatgatcaaaacagttgcttttgcccttccaacctatagcatgtcttgctttaaactttctcaaaagttaacatgtaagttaacaagtgctatttcaaattattggtgaagtttcaatgggcgagatcgtggaatccttctaggtatcatactatcataggagaaactgtgtaaggataaggaaaaagagatttaggatctcattaccaagataaatttaatgatgtcagtattggcgtttaatacatttttccaaactctttagtagctaagtgctaaaacataaatattttaggaatattcatcatttacaagaaaaaaataaaaacacaactctccatcgtttgatggagagtattttttcgacaaagaaaaaactaatgaaatgggagcgagatggtctctaggtttgggggtcaatcttttgttatggctagatccatggactctagatattatccacttccagcaaacggaataggaaaatttctccatctaaatctgatagttaactacttaattaatctagtatctaaagaatggcacctacccattttacaaaagtttatagatccggtagatatacaaatcattaggggtctggctacatgttttttcttttctaaagcatctagaaatggaatccaaataatccagggaacggaaataaaggatatttcaatggataatgtctatatacacatttatctacaaaatttggtgaaatagggtttttaaaaataaaacccccaatgttacctctttttgtcgaaaatttaattaacaggattttgaatttatttaacagaaattttaacaaaaacaatatttcctaatttatttacaataattcagataaatttatggttttcaaattctctagttgaaatggagtcttctcctacacccttaaggccttaattaaaacctgtttttgcttttttcaatctcattatctgaaacttgaacaataaaacactcatctctttccgccggtgaagtgtttcgtggctaacaatataccaattcaacgtaagcttaacaaacaatatactatttaaacgtaatatttacaatattactttttcaaaaatacactttttgtatctaggaattctaaactttttagaatctaaaatctaaattcttttagaaaatgaattctaaaagtagaaaacattttttagtgtttttagaacatatagataaccgtaaattacattttcacacaaaaatgagaaaattaaagaaagtgtagaatacatggaaatttgttatccagttttctaaatttgttagaaagaaaaactagtctaaatatcgtggaacatgcacaaaagtttagaataaaaactctaatattagtagaacactaaaaaacattttctaacaaatttagacaaaaatttctctataaaagaatcatcttttgtcaactaaatcaccaattgctttttttacaaatcaattatattcttgtacatctacatgttttttttttctttttttaaaaaaaatcgtacatatatatagtattctgcaattacgcaaccttttagtataaaaataaacttttaaattaaatttcaaatattttaatgatttatatatacaaacaaaattgcatttatgtcattcataaatttagacataagtttacggttttactgtaaaatgtctataatatataaacgaatttatggatgttgaaatgcatatgttatatgtttgtatatattgtttaattttcaattggaaacacattggatttaataaataaaaaacattatatagaagttttcttatttaaaacttcgagatatttaagtttggtaagtttacttaataagaataaatagtatatgaattaaaagtgcttggcaagttgaatagtagaattaattaaatgaaaaataaaaaatgatgataataattgtgtgtttgacacataagtattagagtgtggggttccaacctaaaatcaattggcaataggtggagagactcatatcttatatataccacttaagatcctactcaacttccgatgtgggacattgtccctaatacgccccctcgagatgatggctcttctagccattgatctcgatatgtttgggcatggatcgacggggcaagtattgggccggaccgatgtggatcgggttgagtatgtgcggatcgggctctgataccatattagagtgtgagcttctaacctaaaatctctcttttttttttttcgaagtatactatacatgttaacgtaaataagtatattggcgtgtctgcactctgcaaaaaacatatattatcttctgtttttttttttttctttttgcaattacaaaaggtgtttacaaccttcttcatgaaactattttatattgaaactatatagtatcatgaaaaaggtcatcagacaattaatttataaaacattttgaaaatgaagaggtaacaactagcaagaggttccagtacttaccaagttttaaaactttaattatttgtcatttgaataatgatttgtcaaaagtggggtgctatgtgtcaaattcttgtgagacacaacttttcttcatagaatatattgtagaactaatatatattgagtaacactatcctgaagaaatatattaaccaagaaatgtataggttataagagaagtgtacttgatattcggaaaaaaaaaaaaccaaaaactaggtataatttgaggtaaatacaaaaactaggtctaagttgaggtgaaaaaaaacttaagaaggtctagtataaagttatttgtaagtatgactttctctatttaatccaaaggtaggttaagcagtcgttgaatgttttttgtttgttatattgagttgtttgtttgtaatgactttctctatttaatccataggtaggttaagattattcaaacttcaaaggcaaaaccaaatg

SEQ ID NO: 1765 - DNA, 3000 bp, Unknown
  misc_feature (1)..( 3000): cDNA_ID_2143537_gDNA_ID_1620445_Annot_ID_157282 3000 nt of promoter + ATG
attttctatgcaatatttattagttattattcataaatggtaaactttaataaaaataattaaatattattggtgaatattattggtttaaagttataagaaattgtaaattacaaaataatacattttaaatcaactttaatatgtttaccttaatatgtgtgtttttcctaaacaatcaaataaaaaggaacagaggaagtaagacttttatatctcgttgcttctaattcttaacattaaaaagatacgcccatcaactttcttattgaagtctagatagcttttaatatttttgaattgaaaagtaattgaaaacaatgaatataaaacattcacgcatcataatcatacgacaattagtcaaatttatgccatgatgaaactaccaaatccaaaaatttaaatttggaacccgtttggaaaaaaaacaatcatagaaaatatccaacggatcttagatttaggaattttgcacatcggataatacttgaacaaaacccgaaaatagtacagtaaaaaactcaaagctaagttaacttattaaccatttttatatggaaaaagttaaaaaaaatttacgtacttttaaatttggaacgtttaaatcctatgtaagaagataaaaaaatcgtaatgcttttgttaactttaaatttaaataagaaagtttggttaacaagccattttagtcatgacgttatgtaaactaacagaaaacctttacggtgttaaaatctcgttagtcttctttattatttctaaacaacatcatttatcgtatagagaaaacgacgtcattttgtcgatttaaaaaaacaaaaaccttaatccctaaatcgaaactcatttttccctaatcgatttctaatcctagaatctttatgtctctcttttgaaattccgattgaaatggttacaactcgtgggggggggggggaaggggggaaggttcgtcttcatcggtcacagagactaaatgaaacagcagccgtacaaaatgacgacacatgatgtgacagagcttgaactcatcaaaacatactgaaaggaagaagtctcgagctaatttcaacatagagatctttggggattgtgttttcgatttgggaaatttttagctttcagggattgttttttcgatgtggggattttgtctattttcatttatcaatacgacttcgtttagtgtacaataaaccgatgacgtttagccataacagaaacgactaacgggattttaacaccgtaaagtttttctgttaacctacttaacgacatgtctaaattggcttgtcaaccaacattgtcatttaaatttaaagttaacaaaaactttacgatttttttgttatcctcgcagttcatgatttaatcatcccaaatttgaaagttagtgatttttttgacattttccccatttttatatagccttaagtaattaagatattttcgagtatttttggatagctttttcttatcaagtttttcggttaattcaaatattttggagtactttcgaatacttatgagtagtttggatttctttttgaccaaattttccggatgacagatatttgaatgctcgcttgggttagcgggaagtctaagtaaagaaggaggcaagcaaatgaaattcggatatgttgtagagtatttttgatatttcctcatagttcttttaaccttaaacatataaaaaaaaacacaaaaaaatatctgaaagtttgaaccctatctgaaacaaacgtaaatattatagatacccaaacggggctatgagcctcacccaaaaacccgaatcgagtccaaaccccgaaccctagtgaaaagcatttgcagtaaaagattataaacatgaagtaataaattagttggaacttataatattgatttatatcaccagttccccacacgcaacgtggtttctttcatcaatctatatagtattataagtagaatgtgtactctctttccaaataaactaggaggattcaaaatagatgtggaggctaagacttggaccgaaggccggtgaggatactcgcttgttcaccaccaacaactaattaagccaggaggcagatttgggtgttgaataccaactcaggatctccacaagaaattgccgagatagagaacgctcgtcagaatttttcaaacaacatgtcacgtttcaaaacgatgcagatatatatgtaccttaaaaaatcctagatatacgcaacttgcaaacaaagcaataatttgttatcaaagctagttagtttttttttttttgtaattccatatgccttgtttttgagattaacaagaaaacgacttcttttttttcttaaattctactttccatttctctcaactctcggaatcacctatgctgattctactcgcacattgcatatagttcttaatcttaaactaggtacggcgaacaactttcctatagatgtctacttggcttataatatttttgtattgaaaaactaattagaaagatatgaatatcgttaagcaaatataaaacaattactaatacgtcaagaagtcaaagtgatgacaatgcgaaacgtagttgcttacgaaataaacgttaaggaataaaattatttgagaacttataatttatattcacacccgtttctcacatgcatcgtgtttattaacaacaatctatataatattcttttctacgtatttttgtggttgatgtttaaaatttttacaaaacaatttttttttttttaatttttgtttttctcaaaactaacacattgtttataatctattataactcaaacaaaccaataataaaatcatttacataatagaaatcatcaaaaataaaaataaaaattaattggtttgtattaaaatttgaaaacataatttaattgcaagaaaaaaaaattcctaaaacatcgactataaaaaatacgaagcgagtataaagtataatgtgtcctccttgtccaagtaaacttagagcaaccttacaaa

SEQ ID NO: 1766 - DNA, 3000 bp, Unknown
  misc_feature (1)..( 3000): cDNA_ID_2143584_gDNA_ID_1620446_Annot_ID_157299 3000 nt of promoter + ATG
atgtctagtctaaatctggtccaatattataacggttataaagtgaaataattggaaataattagcatgtcccatactcccactagaatgtcacacaacacgattgttgagatgattaatttgctatatgcctgatcttgtagctcatctgttttaagggcttagatgtcaattcttgtttggacatgtctagtaactatgatttttaaaataaatttatataagtctataattaaattatataatttcatttaggaacataataatatattacaattaaaggaatactttagaaataaaaaaaattggagcaacaatactatttatttctctattttttgaagcaaaatataaaacaccatagtaaatggttttatatcaaatatagagtttagagcaaactttgaagcattatcggaaatgtttttagtgctaaacaatctaaacggcgacactaggtgatccaaacatccgattatcacctaataatctgtgaaagtaaagatgctcagaggctatatatgaagaagataagtttcatttctcttatttgttttccttaaggtttgaggttacatcatgttttccttttacaggagttacattgtcagtgacactagggtttattctgacacatgtcaggtctttattgattctaaacagtcaaaacggttttgtaaaaccactccatctttgccagcacagctcgtggttttggtcacttgatccaatcctgatttacttttggttttgtcttcttttgtaggtggagatgatcgttggaactgtgaactgttttgggtctgcgcttggatcttctgcttgttgggcttgatctgtgttggattctcaatttggcccaatcgctaaaccttcttgaggatgtcgtttggtaagcttgtctatacagcttcctcttcttcatgtccgatcacagctgtggtttgattcttctcttctctaatccgagccgttatctcaatgtaagctgccttctcactaataatctgaacaacactaaatattatttcagcttatgaaaaaagacataaagtaacatcaatggaaataattgacatgtcccacacagacacacatttgacagtcccatcaatatatatgctgacgacaaaaagtaaaatgacccacctgaattttcaaagtaattcttcaaataattgacatgtctaattaagaccaaattagttgaaaacgtttgcaatggactgatcgtaatagttagtcacctgtgaacgagtttgttatttatccaccaaacaaaaacaaattgacggatttggtgggtttgggcaaaggtatatctgatgaattttttctacatctcattccaaaaagtcgacctaacccgaaaagtcgacataatagaacaagatagtgtcggtatatgaaaaaaagatgaaaacaatagttaaattcacaaggacaggcacgaaatgaatatgttgaatttttgtgatatttgtgatttgtttttactctagaagtgttttcttactaatatatgttctaaatttaactagatatccagtgtcaatccatacattttcgtcaaaataagatttttttatttattaaaagagtacatacatttggtcgttcatccacggtttacagaatcaaagtgaaactcataagtattacaccatacatttctagattatgagctagtatattacattctatcttaatgcatggataaagtgaatatttgaaaattttcaagcccaatacttgatatggtgaagaagattcgtaccagaaatattttctgtagtatcgttgaaaacaaattgatgaacaacctcggatccacgtttgatgcattgctgccaaaacataaaattttaaatattcatttaaaatcaactaaatttctttcttaactttcaaaatttttaaacaatattacacaatttaagttacacaatatatgaatctatatataaaatacatatatatatatatatatcctcattttaaattttgactttttaatattttactgcgtttttcgaacaaatgttgtttttgaagatgacaattacgttgtcgggaattagcaaattgcatctaaatctaaatttaaatttaaaataaaaacagcttaaaattacggatatatataacacgaatattttgctacctctacttaacgtatacttccagttttctacaaacacaaactgcaacgtttttgaggctacgagaagaaaaaaatgtccgtcacgttgcgtcacttgagacaatggctgtcgtcacattcacgccatagaaaattttggccatcttacccgtggtcgttgacctggaaagatatcaatagtctatttcatatacattcacacctatgtcaaataaaatttgactccaaaaacacttgaatataatagtgaattagttacaaataagcaaattttagttaggtaaagaacaaatagtaaatttgacaaatgagaatggagaagattaaaggtaaaaatatattggaacgactctaaataaagttttgtatttctctttttctttcttctctattactatatatttctcatagtcttcattaccctaacaccacactagtcacacacttaaatgttcttccgcctttgacgccttaatctcatctccacaacccttgcagtcaagttggtaagtctcttaaaaatgactttcttttgtttaaactttaaatggcactgagtttttgtggtatcactaaaatcaaacgattcatgatgaaaaacttgacttggttcaatatttattataatcaatgactactttatgtaaaagagtttaggcctttgagcaatgattttcaaagagaagaaaataaagttggacatttgtggaaactttaagatagaggagaaggtttagattttttccttattaatacactgaattttgcagatgctgttgggatcaaagagtagcaaacaatacgagagcagaagaacttacttatagaaaaaaatg

SEQ ID NO: 1767 - DNA, 3000 bp, Unknown
  misc_feature (1)..( 3000): cDNA_ID_2143659_gDNA_ID_1620446_Annot_ID_157319 3000 nt of promoter + ATG
ataacgtggctgagaaggcaagtaatctcagccctaagagtattttgcagctcttaccgctcgtagcagccaatgtaagctttgaaaccgccattgtttgaagatgaaaatggtcaaattgtttttgttttgcaatgtgtagagtgtttgtgtctttatatatattgagtatttgagtgttagtgattggtcttttgtctgaccatctaacttttggagggttaattttaggttttggtggttgtgaagattcagtgaaaacgttagatttgaaccttttttttttttttttaaaatgttttgtggcaagttaacttgctcttgggacagtctcatctacccaaaacttaaaccagtttgactttttgacattttgtggaaatataaactcaattagctgattgcgtttactgtatatctttttaatgaacctactaccactttctatattttaagaaaaaacatgttacttaaatgctaaaaaaagcaatattattttttgaaaaaacttcatttaaataaaatatgatgtgaattttcaatttttttttttcaaataaatgcaaacttaaaggctaaaattgcagttgaaaccatgtgaatcttatgtgattttaatgaactagttggaactttttgcttgccaactcggataagttcttttttgtcttgttttattattatttttaaaaattttaatcccaaaaagtgtaaatcttctgtaaatcttctgtaaacacacaaacacaaaaccggaaattgaaagtgaaagcagtctatatagaagaaaagtttctgcattgagttgatttgtaaagtttagagatttaaatgaaaaccagagttctaaactgagaccggttaaagtcaacacagatgaataacatgttggatatgataaaacattatatcaaatgtgaaaagtgctgtgtaagctcaagagtctaaattcaataaaagagataaaatccatatgtttataaacacatttttttttttttttgtgcgaaatgtttataaacacattaaaacaaagatttttaagaaataccaatatttgtggttctgaaaaaggaaccctgaggttttgagacttaattatgaacagatgctttgtaggtgttacgtaaacatgagaagaatacaaacacaacaaaataggaagaaatcaatcatttttcacacatatatccgataagttctttcgattagtttttagtttttatcggttgttactaccacgacattgctcaccttaagtgttctatatcactccccacagttcttattcgaatgaataatactttagtacaagatatgctaagcaatacactcaatacataccagtttctcactctcgtccacggacaagggattctctacaacgactgttttggtttgagaaaataatgaatagagtctaataatgaatagagtctaagtagtcaatattttcttactaatgttactcgtctcatgaaggtggttgtggactctcttttaattttagtaactgctcattcgatcaaaacataagaaactgcaagtttattgaatacttaataaaaatttgaaagacgtttgtataaagacaaatactattagtaccaccataactcatttcttcccctataaataacaactgatctttgtattgttaatcactcaacaacaaacacaagaaagaatcataaattggaatacttcaaacatcttttttcttttatcatggcaatcaaaaacgtgatttttcttctatcgattgtatgcgttgcaatgtctgcaaatgctcaattacctcaatttccggcaccgtttccttttccatttccattcctacccattcccggtgtactggtataacaaaatgtttatcatcctttatgaatattgcagggtgtatcgcagagttttcacaatctatactcactggaaagtttggcaacataggccctgtttgttgcaaagcaattttggaagctgaaaccaactgtattccgcaacttccattcaatccattttttcctcctctgctaaaggaacaatgttcaaaaaccgttggcgcaatttctcatacgagaaagtagaattcaaaaaccaataatgtaatcgttgctcttttttcaaaattagaaaaataaggttaggtttacgatttgtattcaaaattttcaaacatctaataatagcattataaaaaaataggcacatttttgtgaacagtcatgaaatagttcaaagtgctagccatctacatattgaaaaaagaagcaattcttatgcaaattctaacaatattgctattttgatactcactaagtggatattcacattaaaaatagttgagcatcgttctgtaatattcgtggtatgattacaagatctatctatgtaattaaactgaaaacggagcagatatccgcttttaaaaaattgtagtgtgtgattattttttatttttttacgaataataatttttaatatttgttttgcatcatagaattacatatatccagacttttaaaatcaaaatgaaacagataacaaattgaagcgaatttaacagataatttgtctcatccctaatgtaatctacatttccatcttctatttacacaatgagattttagatgataaaaaaaataaaactaaccagagtttttgtaggttcatacaatatacaaaaacaaaaacaaatctgaaaacaattaaaattaagaaataggtttttttttttgttggacacaaaaattaagaaatggataaaaagaaggaatattaggaagatgtggacttctgtaacggctagttccaaagtaccgttctttttttggttttaattattgtattaaggcacgctctgacacattcacactcacacatagcgagaagaaaagaaaaaaaaaaactcaaaacttttgcttctactcaattctctgatttagggttttttcttgactttacactatctcgatttgagaagtgagaagagaaatcgcc

SEQ ID NO: 1768 - DNA, 3000 bp, Unknown
  misc_feature (1)..( 3000): cDNA_ID_2105664_gDNA_ID_1620446_Annot_ID_157305 3000 nt of promoter + ATG
taactaaaaacaagtttcttcaagcgcaagcaagtgaaactaaataaaaagacatcacagaaacaaagattaggtgtgtaattaatcctctcctcgttaaaaccactgtttcttcaagaaacatttatgctggaattaggtcaagcaacgaatctcgaaccctaatggaacattaacggaatttgatagttgaacaaaaacagagattagatgttttgacctgtatgaatcttcttcctctatttggtcttagatctatctatggtaataatcttaatcgatttaattttaattttaatctaaatcattcattatcttaagtaggtcgacataatgtactcggaacactgtaattcaccatctcttatttttatttttgtgtgtctagtgataattttgaaattatttttttataataaaaaatcaaaaacattattaaaaatagttctaagaaaaacattttgatgatagaaagcccaattgtcttttaacccaaaggccaatttgtctttctttaggcggggctggtatccttaaagttctagtttcctcttctacctttataatctctcattcaacgaacgtcggaaaatctctgccaatcactacaacttatgttaataagacttgggctcacttgcaaaaaaaaaaaaaaaaaatcagagataaccttcttaattatatttttttcatcgaaaatagaatatattgagtcttgaacaagtcaaattaaccagcagcccatgtgaacaatcgaacgatgaagcattacctcaaagccaacgcagcctcccgcttaagttacattagatagatgatagatcaggcagcctttcatatgtaaagataagtggtggagaaaccagccatcaagtattgattagtcaacatcatgatatcttctattattagctatttacgatttaatatctactatagattacagtctgtgtttactacgtggggttgacatgatgacatgtaaaagactaactcttcttcatcagttcactataaatagaggttgatcttatgcttatttcttcacatcccacattcaaacatacaaaagacatacattgcaaagcaaaagtataatagtcatggctaagtctgctaccatcatcaccttccttttcgctgctcttgttctctttgctgcttttggtgagtaaagatcttatataattgtcatatatatgcatggaaaaaaaactttgatttttctttctcttttagattgattgataattaacaaggggtgtatatatatgcagaagcaccaacaatggtggaagcacagaagttgtgcgagaagccaagtgggacatggtcaggcgtttgcggaaacagtaatgcatgcaagaatcagtgcattaaccttgagggagcaaaacatggatcttgcaactatgtcttcccagctcacaaatgtatctgttacgtcccatgttaatctaccaaaaatctttggtgcttgatcgtgtgtgtattttactttaaataagtcggtgtcactctatgagtgactttatgacatgcatatatgtttatgtttttatgtttggtttctccttgttataataatactaaaaaattatgtacgacgttggactgtttcatcatatcccataaaaatacatgattggggtgaaaatcttgaacatattaaaaaaatattaaatcaaaatgataaagatagggatttataaatgtaaaacgggcgtgtcgagaattttatggacattgggacaagctttatatgcagcatgcatcgccgcatcgatatcccgaggtgcatcgtttctactttcatgtccaaatttggggttaactcacaatatatatcatgttgcctatgtaaatttataatcataaatctaaacccaaattttaatcctcattccaaagcaaaagttctaagccctacaaaaatatgtatttcccaagtttaaaaagaattaatctatacttttacaaatttaaattctgatctcttataatgttcggtttttccttttttatttattaagttagttaaaatttgcagttattttgttgaatgtcgttgtttacgaatttacgaataatacctttatagctaatctacaaaattttgatgactgacaacaccgttaatgtttttttttaaattaccctgagcctctcacttgcggtcagaccatgcatgtcgatagtccattacgtttaaggccacaatcaactatagtttgtttatcaatagccaactaagctaacttttaggttcctgccctctccgttcctccggtaccaatcgtttctttgtcccttcgatagtttgaaaacctaccgacggtgagagcaaaatattgatgaatcatccaattttcagtaataggtgtgtcccagggatatataaatggcgaaactacgcgagaacggttccttgttctgcaaacttggcggaacaatgctgctcttgagatcaaccaaaccatatgtttagtccacaacgatctatatgtctaggggtgatcctctaatcgaaaaatgttgtatttgttcgacgatgacgaaggtcagactatgaactgcacagtctgcacttgtcctaaccgcgagaatctctgacatcaatatacttgtgtaactatggcttggttaagatattattttcttgagtcttaatccattcagattaaccagccgcccatgtgaacgatgtagcattagctaaaagccgaagcagccgcttaggttactttagatatcgacagagaaatatatgtggtggagaaaccagccatcaacaaacaaaaagcaagatcttatcttttgatattggctacgggaagatgatgtctgtttaatgtgtggggttaccacgttattgtacgatgcacaagtagaagattaacccactaccatttcattataaatagacgttgatctttggcttatttcttcacacaacacatacatctatacattgaaaacaaaatagtaataatcatcatg

SEQ ID NO: 1769 - DNA, 3000 bp, Unknown
  misc_feature (1)..( 3000): cDNA_ID_2143607_gDNA_ID_1620446_Annot_ID_157306 3000 nt of promoter + ATG
actcttgtcaaaacttgaaagttttcttaatttttaaaattttagggttttctttctcgacgtcaaaactctgtagggtcgaaaaactttttccctataaaatcactcaatctttacattctcaatactatccacctatcttagaaatggagttctcaagctttttgtttactattttactcttttcactgaatatttctcctcttgtttcagctcatggctccaaccatgaagactttcttaagtgtctttcttaccgaatgaacgacaacaccgtcgaacccaaagtcatacacacttccaaagactcttcctttttttccatattggattcttcgatacaaaatccaagattctcggtttccgaaacacctaaaccggtctcaatcatcactcccgttaaagccagtgacgttcaaactgtgatcagatgcgcacagctgcatggaattcatgtaaggactcggagcgccggtcactgctacgaaggtctctcttacattgcgtacaacaaaccattcgctgtcatcgatttaaggaatcttcggtctatatcattagacgttgataaccggacaggttgggtccaaaccggagcaacggctggggaattgtattatgagattgggaaaaccaccaaatctcttgctttcccggccggtattcacccaaccgttggtgtaggcggacaatttagcggtggtggttatggcacattgctaaggaaatacggtttagctgcggataacataatcgatgcacttgtggttgacgcgagtgggaggattcttgaccgacaagcaatgggcgaggattacttttgggctattcgtggagggggcggatcaagcttcggtgttatactatcgtggaaggttaaattagtcgatgttccatccacaattaccgtgtttaaagtccagaaaacatcgaagaaagaggccgttaggatcatcaagaaatggcaatatgctgcagataaggttcctgatgatcttttcattaggacaacattggagagatcaaacaagaacgcagtacacgctttgttcactggactatatattggtccggtgaacaatctattggcgttgatggaagaaaagtttccggaactaggtcttgagaaagaaggttgtgaagagatgagttggattgagtctgtactctggtttgctgatttccctaaaggagaatctcttggtgttctcacgaatcgtgagcgtacatctctatctttcaaaggcaaagatgattttgtccaagaaccgatacccgaggctgcaattcaagagatatggaggcgattagaagcccccgaggctcggcttggaaagatcatattaactccatttggtgggaaaatgagtgaaatggcagagtacgaaacaccattcccacatcgaggagggaatctctatgagattcagtatgtggcttactggagagaagaggaagacaagaacaagacggagacagataaatatctgaaatgggtcgatagcgtttacgaatttatgactccatatgtttcgaaatctccaagaggagcttatgtcaatttcaaggatatggatttgggtatgtatcttggaaagaagaagacaaagtacgaggaaggaaagagttggggagtgaagtatttcaagaacaatttcgagagattggtgagagtgaagactagggttgatccaacagatttcttctgcgatgaacagagcattcctctggtgaacaaagttacctgaagatatcatttgaagttttttattagtcccttttctctgtgaaatcatctgtgcgtgttgaatattatgcgtcaagtgtgtaacttatgtgtgtgattgtgaattgtgatatgtgtgttgaataaacttttcatgtttgaagtgtgtaactaaaaacaagtttcttcaagcgcaagcaagtgaaactaaataaaaagacatcacagaaacaaagattaggtgtgtaattaatcctctcctcgttaaaaccactgtttcttcaagaaacatttatgctggaattaggtcaagcaacgaatctcgaaccctaatggaacattaacggaatttgatagttgaacaaaaacagagattagatgttttgacctgtatgaatcttcttcctctatttggtcttagatctatctatggtaataatcttaatcgatttaattttaattttaatctaaatcattcattatcttaagtaggtcgacataatgtactcggaacactgtaattcaccatctcttatttttatttttgtgtgtctagtgataattttgaaattatttttttataataaaaaatcaaaaacattattaaaaatagttctaagaaaaacattttgatgatagaaagcccaattgtcttttaacccaaaggccaatttgtctttctttaggcggggctggtatccttaaagttctagtttcctcttctacctttataatctctcattcaacgaacgtcggaaaatctctgccaatcactacaacttatgttaataagacttgggctcacttgcaaaaaaaaaaaaaaaaaatcagagataaccttcttaattatatttttttcatcgaaaatagaatatattgagtcttgaacaagtcaaattaaccagcagcccatgtgaacaatcgaacgatgaagcattacctcaaagccaacgcagcctcccgcttaagttacattagatagatgatagatcaggcagcctttcatatgtaaagataagtggtggagaaaccagccatcaagtattgattagtcaacatcatgatatcttctattattagctatttacgatttaatatctactatagattacagtctgtgtttactacgtggggttgacatgatgacatgtaaaagactaactcttcttcatcagttcactataaatagaggttgatcttatgcttatttcttcacatcccacattcaaacatacaaaagacatacattgcaaagcaaaagtataatagtcatg

SEQ ID NO: 1770 - DNA, 3000 bp, Unknown
  misc_feature (1)..( 3000): cDNA_ID_3064164_gDNA_ID_1620446_Annot_ID_157311 3000 nt of promoter + ATG
atgttattgtcaaatttcaaagtctactcccattttggttattatggcgaatcttgaaatgcagaaatgatctagtatttaatcgcaaaatgatcgaagtaacggaagctgtagaacaagccgttattgacacaagagaatggattgaaaacattgctacttcggaacaaggtcataacgacattcaccatcaccgatctcctagagtgaaatgaaaaacaccacaaagaggctgggtaaaatgtaactatgattcatctcaccataaaggaaccagtgggtctggattagggtggataatccgcaactcacatgggactttcatggaatgcggtatgagtaaattccaaggtagggcaccggttgaagaatcggaatgtacggctctgatatgggcactccaatcatcatggaacctaggttacataaagatcgagtttgatggggacaacctctctatcatccggctaatcaacggcaaagctgtaaatcctcgacttcgacattacctttgatgaaatcagtcattggcattgcatgttcacggaggtgaagttcactttccatcatagagagcagaacaaatgtgcggatatactagcaagacaagctctcactggtccaattcactacacataatagttgttgattcttctaattcgaatacatttttatccaaacaaaattattaatcggaaaactaatcttcttctttttcgttttaataactttagatttatattgtaaatacactagtgtcgcactttaagtgttcactaagatgaacaaacgattacatatataactaaactccaactttgtagttgtatatattttttgtatatatgttaaagtgtcaaacgaaaaaaactccaacttagtagttgcgtatatatgtgaaaattgataaaataattgcatgcaaaatgtaggatcaaataatttgatttgactacgatggccaaacacgttagatagttgggcagtcgctacaactaagcagccacacttattttacttccatttatcatcaataatttgtattatagttatttttgtttaatatccaagagagattcataactctttgtttgactttgattaaactatagggtagttagccactccacattggcttctaaactatatttgtcagcctttaaaattaggttaggtggccaaacgaaaactttttaattatttttcttttattgtgagacatactaagttagaagaagaaaaaaatcagttacttttcaaaaaggtaaatattggcttaaaaagccaaactatctacgtttatattttttactcaggatttgattgtatgttgataaatattttttttctttttctttgttaaacaatttcttgttggtacatttaatattttccaaaattattacgtctacgaagaaacctttttttttttgtaaaataaatctatacgtacggaagctttagaacgctagtatatatactttatagtaacgtaaataatttgttcaagtgagatatatttttacaccaaacaaccactatatttacaaaacattatattatctttcttttattgcttgttaccttttataattatttttagttcaaaataagtagattcataaattatttgcacatttataaaattaaatcctaatagtgtccatttttagagtcattttaactatttccaaatttatggatatgttctatatagtctccattgtataagccataatgaaggttcttaaaatttatgcatatataaggagataaatataacaaccttataaaaaggagattcttaataagagataaatactaaaaattatttccatgatctaaaaaaataactatattctgaataccaaaaatatattaaagaagaaaaaaaaaacgcttatagagagaaagagagtgcgcgaccaggtcgtagtcgtgctctcgttttgcaattcacgtttcctctctgagtttcttcgtcttcttcctctcgtctctctttctctgattctctcgtacgttattcctcttcacgagtttctctcatacttcgttattaacatcgcccgttttataccccaaaccttcttttaacgccttcctctgtttctctcgtcttctcacaattctcaggtgcacaaatctctctctctctctttctccatgtgttgtttctaatctgatcatgatcatcatattcatattcatcatcatcatcaccaatcttctacataggtttttaactctgtttttactgattaggaccattttgtgatttttcctatttttataaaattgaatcgaaatcggaatcggaatttggatcaaaatgttttcttgaaactgatcggcgttttagtcaattttgatgactattgttacattttcaagactctttctgccactttttgttttactctgttctgttctttttcctaatgcaactttttttgactaaagtattttgttataatcttttcattatttttatataatatatttataatttatcagttgaatgtaaaagtaactccctatattctcacttttacataaatggtttcataaaattcaactttttctaactgattaaggtcccacttgcaacatatattattatctctctgttttctccatgcatataaaaatgtatgcagaatttggtagctttgaccttttatatttctgttagcaataattttatttttttggtaaattcttcctttgttttgcagcaatctccagcaacatgatcttcattgttgctagatactgatttttttttgtgggattttctatgttgctttggtctcaagtctatgtttcaattctaagaccagaacaaatttgaggtttttttcaatgctaaattcgtctggagtaagaactcaacgaagaagcccaagacctttgtctctaggaggtagaaagattattactccaacaaaatttgcttatgatcatcataatcctgataaagttttggattttgtagaa

SEQ ID NO: 1771 - DNA, 3000 bp, Unknown
  misc_feature (1)..( 3000): cDNA_ID_2143645_gDNA_ID_1620446_Annot_ID_157316 3000 nt of promoter + ATG
cttttaccgaggcttcgaatcggagttgtaaatataacatcaagaatgttgtgaccatcactggtaactataggaaagtctcctccaagagggccttcattttcaacagaagctcttctccacaccttttccaccaagtaaaatacaatgactcaaacaaggcttgacacaatcgatagaaccaaaagcccgagaaagcatttatgaaagaagcagattcacacctctgcatcgcctagatacaagtcatctatctcctcagctatggccaaccaattaagctgcaatcaaagttcaaggaataaaagttttgaatcatatcaccaagggattaaaacgaagttcatcagtagaaatttacttacagattgaactaaaacagggatagaaccttcaagaccggctttgtattgttcttcctttatcatgaagactgcctcatcagctacttttacaatagactgtattgtaaaatctctcttttgtcagcccaaagctaagcaatgagtattcaaagactgcaaaaagtacacgaaactgcatacaccttttgtttcagaatatagtcatcttcctgtgaacttctccgccgtccaataactgcaataagcgtattctcttctacagcatcagcatcatgaaatgcaaaatcaatctacaaaagtgtcacactgcaaacattacccctagatgcagaaatagatcaaaccgctttagaaaacacagagaagcagctacctgaacaccatcccggtaatattccaaggggattccatactttgctgcttcactcgcacttcgagcagacctgaaaaagggtcaggacaaatcatcatgaagcctatcaaaactcaactcgtaacataaaagattgaatatagagagatcaacaactgaacaaacaaaaagattgatactttatttggagtcatagaagataaccagcagcagaatcagaatcaaaagactcacattggtacaccaacaacaaaatcattatcgaagaactaatgaatagggaaattcaacaactgaacaaacaaaagattgattttttattggattcatagtagataaacatcagagagagaagcaaaagacttacattggtacaccaacaacattatgtaaagaaccagaaccaagttgttgacccaaataacgtatagcaaaatctgaagcttctccagatcctaaaccaataatcatcccactctttacataattatccacctgaaaacattaccagacaaaagttttgtaatcaagtatcaatctttcttcaattttatgaattttcaacacaatttcaaacaatacccatttgaaattgagtttcaaggattcaattttcccgatttaacccttacagtgtgatgagctgctctgagaagaggagaaacctccggagaaagactggcgcaaactggaaaacgtttgaaattacgacggcgcgtgaaaaccacggacgacgagagtgaaaatggagttgatgctgtcgcagtaaccattttttttgtgtgggaagaacgatttgagtcactgagtcgtgactcggtggtttttaccgctcttatctcccgatcagttttgtggtgcatgtggagtacgaactacgacgatattacacgaccattttctttttggagaattacgaaaataggctaaattatatatattttgttccaaaaaaaatgataaaatatatattaaatatttattttcatataattttataattttaaagcaacacataaattactaagttccaaatattatttttgaatttttaaacctaaattttaaattctaactatatccttaaattttattttatggtctttgagctaatccgtttttttttaatctaatgttaaattatattagaaaaaaaacatcggtttttacaacaagtacgacaaaatttgaatttgagaaaaaactgaaatttgaaaaattaaataaatttttaacttctagaggcaaaccacatttagagtcctctatgatatctcctatctcctaaagtctgataaaggaaagagtgtttcaggtttgcttatcaatccaacgaattagtcgagctgtctgtcgtattagaattctccccatgtcttctaccattttgttctcgccaaatggtgtagactgacactacatatcacatttgtgacgtattaaaactatatatcacatttatgattacgataaacagtacctatcaattttacgatacagttctctgcaacattaaaatccacaatggacggttatgcatatacgatatattttgatgaaaatgtttttctcaaacggttctacaaatacgacattctctagatgaacatgttctccatgaaaacgaataactctacgtgccacattctacaacctttcattaagtatacatccactaattggcaagaatctacactttttgggaatcaaaaccctatcttgtatcattttggatatcttattagtattgacgatccaacgaggaaaaaaataaataattgaaagaaaacaaaaaggagagtcatttaagtttgatcgcacttatgagtgttccttgcttcctttctcctctactttaagcacatgtgggaaccaaattcttcgtaaccactcaatttggctcacaatttttcaatatccaataaaaaacagtttcatatattttctcgtgagattattcagttcttcctaatatctatctatctctatattacatatatacaatattatataaatacgcactcttctttcaccgacctccttacaccaaaaaggtgtcaattccacttgttcaccatgaatatgatttaatgggttcttcttcttttgcagctttctttcttttccttaaattatcattgttttaggtggggttttaagtgctttcatgactcattcattctctgtataaaacctagtggaaagtgttaaatcaaaaacccttttttcccactttcttaatttagaagggagacgaaaaaa

SEQ ID NO: 1772 - DNA, 3000 bp, Unknown
  misc_feature (1)..( 3000): cDNA_ID_2143641_gDNA_ID_1620446_Annot_ID_157315 3000 nt of promoter + ATG
gcttggactacgaagattccggcttttacagcggaaagtaatgccatgtcgataggattaaagaaagtggcaacaccgggaggtttccgattcggtgtaattgataggcttaatatatctactccatcttgagctgcctgaaaaaaaatcacaaccattatattaaagtcttcatatttgaaagaaaagctaaaatgtttattcacatttagtttcttgatttgtaaacctgatctatagctgctacaacatctgcagcaaaacctccaaaactcttatacaatgccttgtaaacagaaatactgaaaacaaagttcaaaaacataaaagtttaagttagttttgtatagatttcgacattgatctaagtcttattattttacttacaatgcacgaggagcgattccactagcgtatccaaagttatggttagaaactatcactggaactccgtggttacccgctgcaaccgaagctgtgtgtctgcatatatatccaaagcaacaatctataagcttcaaactctgtttttatatgatacattcaacagttacacttacgttccatgtccatctccatcgaaaggagaagcgtaatcttcagatgagttaaagattcctctggttacagcggattgcgcgaaatgccgtgctccaataagcttcttattgcaagatcctgatggaaaatccggtgtaacttcacaaacacctgagaaatgcttagggattggatatgaacgcttagagtcattgtcattgaaactaggatgattcggatcgatcccagtatcgataaaaccgattataactccttctccagcaatctcaaatccaccttctttgacccatgctccttgtggtaaacccataaactgtggagtataagttgttgctgtcctaacagagtaatccaacactatgtttgctacttcttttctcattgaaagcttctcagccttaaaaaaagaaaaaccataacacaaaaaaatcaagatcaagaactcaagattatttctacaattatcaataactcaagatttttacctgttgtgagttaataaacagagcaaatccattgataagataatggtaactataaagctttatatacttctctccttttagagtctttctcaagaaagagtcatgagattgaacaacagatggtatctttgacttcccatgacgtttccttgaattgttcctataataaaaacgcagaatacaaaaagggtttaactaaagcttcacagagaatctaatgacaacaaaaagaatagaattttatcagtaccttggtcgcaattttggtgtaaactttgactttttgtgtttaagctcttgttcttcaaagagatggacaataggaggttgtttaagtgtgacaatgtacacagcagaatcatcatcatcgtcttgttgttgtcccaaagtgttattagacaaaaacacaaaagagatcataagtaataaaaacccaaacctcaccaacattactctaaccatttttttcgtctcccttctaaattaagaaagtgggaaaaaagggtttttgatttaacactttccactaggttttatacagagaatgaatgagtcatgaaagcacttaaaaccccacctaaaacaatgataatttaaggaaaagaaagaaagctgcaaaagaagaagaacccattaaatcatattcatggtgaacaagtggaattgacacctttttggtgtaaggaggtcggtgaaagaagagtgcgtatttatataatattgtatatatgtaatatagagatagatagatattaggaagaactgaataatctcacgagaaaatatatgaaactgttttttattggatattgaaaaattgtgagccaaattgagtggttacgaagaatttggttcccacatgtgcttaaagtagaggagaaaggaagcaaggaacactcataagtgcgatcaaacttaaatgactctcctttttgttttctttcaattatttatttttttcctcgttggatcgtcaatactaataagatatccaaaatgatacaagatagggttttgattcccaaaaagtgtagattcttgccaattagtggatgtatacttaatgaaaggttgtagaatgtggcacgtagagttattcgttttcatggagaacatgttcatctagagaatgtcgtatttgtagaaccgtttgagaaaaacattttcatcaaaatatatcgtatatgcataaccgtccattgtggattttaatgttgcagagaactgtatcgtaaaattgataggtactgtttatcgtaatcataaatgtgatatatagttttaatacgtcacaaatgtgatatgtagtgtcagtctacaccatttggcgagaacaaaatggtagaagacatggggagaattctaatacgacagacagctcgactaattcgttggattgataagcaaacctgaaacactctttcctttatcagactttaggagataggagatatcatagaggactctaaatgtggtttgcctctagaagttaaaaatttatttaatttttcaaatttcagttttttctcaaattcaaattttgtcgtacttgttgtaaaaaccgatgttttttttctaatataatttaacattagattaaaaaaaaacggattagctcaaagaccataaaataaaatttaaggatatagttagaatttaaaatttaggtttaaaaattcaaaaataatatttggaacttagtaatttatgtgttgctttaaaattataaaattatatgaaaataaatatttaatatatattttatcattttttttggaacaaaatatatataatttagcctattttcgtaattctccaaaaagaaaatggtcgtgtaatatcgtcgtagttcgtactccacatgcaccacaaaactgatcgggagataagagcggtaaaaaccaccgagtcacgactcagtgactcaaatcgttcttcccacacaaaaaaaatg

SEQ ID NO: 1773 - DNA, 3000 bp, Unknown
  misc_feature (1)..( 3000): cDNA_ID_2143603_gDNA_ID_1620446_Annot_ID_157304 3000 nt of promoter + ATG
taataataaaattgcgcttgaaagatatatgggctaccatacccaacttatattctttatattttttttttgcatcttttctattccttatcatgttcttatcttatgagttatgactcatcatataggagtacttcttcatcaaaaaaataatcatatgactcatcatagtagtactaaatagtgatatgtatactttaaaccaacgtttctggacctgactacattttatatacctttcttttaatttgaaatattcgtttttagaaatgaaaaaaaaatatatagttcaatctactcattttgtgattgaatgacgatttatcaatttttatatttgggattttctttgacgtcaaacctctttagggtccaaaaagttagggcttctccctacttcttttttctataaattcagtcaatcttcacacactctctaccatcaccaatctttacaaaaatagagttctcaaactctttgctctctctcttactctttctactgtatgtttctcctctctctactcttgttttagctcataccaataaccacgaagactttcttaagtgtctttctcaccggattaacgacaacaccatcgtatccaaaatcatacacacttccaaagactcatcccttttttccatcttggattcttccatacaaaacccaagattctcggttcccgaaacacctaaaccggtctcaatcgtcactccggttagagccagtgacgttcaaaccgtgatcagatgcgcactgcttcacggaatccacgtaaggactcgcagcgccggtcacggctgggaaggtcaatcttacattgcgtacaacaaaccatacgtcgtcatcgatctgaggaatcttcggtctatatcattagacgtcgaaaaccggactggttgggttcggtctcttgctttcccagccagtatccacccaaccgttggcgtcggaggccagtttagcggcggaggttacggcacgttgcttagaaaatacggtttagcagcggataacataatcgatgcacttgtggttgacgcacgtgggaggattcttgaccgacaagcaatgggtgaggattacttttgggcgattcgtggaggcggtggatcgagctttggtgttgtactatcatggaagattaagttagtcgatgttccgtccacggtcaccgtgtttaaagtccagaaacatcggagaaagaggccgttaggatcatcaacaagtggcagtatgttgcggataaggtccctgaagatcttttcatcagcgcaacgttggagagatcaaacgaaaactctgtgcaggctttgtttactggactctatcttggtccggtgaataatctcttggccttgatggaagaaaagtttccagaattaggtcttgatatccaagactgcacagagatgagttgggttgaatctgcactctggtttgctgatttctctaaaggagagtctcttggtgttctcgcgaatcggaagcgtacatctctgtctttcaagggtaaagacgactttgtccaagaaccgatacccgaggctgcaattcaagcgctatggaggcgattagaggcgcctgaggctcggcttgcaaaggttatattaactccatatggtggaaaaatgagtgaaatcgcagagcacgaaacgtcattcccacatcgaaaagggaatctctatgagattcagtatctggctttttggagagaagaggaagacaagaacaagatggaaacagagaagtatctgaaatgggttgagagcgtttacaatcttatgactccttatgtttcgaaatctccaagaagagcttatgtcaacttcatggatcttgatttgggaatgtatcttggaaaggaagagacaaagtacgaggaagggaagagttggggagtgaagtatttcaagaacaatttcgagagattggtgagagtgaaaacaagcgttgatccaacagatttcttctgtgatgaacagagcattccgctactgaaatccgttgacgacatctaagaatatcctttgaagtttcatgtacgagtccttttcactgtgaaatcatctgtttttgtttgaatagttatgcttcaactgtgtaacttttttctgttgttgtgacatatttgcgtacgttgaataaagatttcatggtttttatgtttaactaaaagcagtttaaaaaaagaaagaaactaaaagcagtttcttcaagaacaagcaagttgagttaggtcaagaaatcaatctcgaaaccataacccaagtcaagatgaacttttatcacttatgccacttttttaaaaaaactgatctggactgccatcagttaatctgaatgccaccgaaaatgtgatataccagttgtacccttaatgagttgattaaaaaaatgaaaaagaaattcaaaagctaaataaagaatcgagatcctccgttctctctcctcttcgtcgtcgtgttcttcttctttggtcgacgttcatcttcttcgtcggccaccatcgattccggccgccgccgacttgaaatccggcgtaaaagccaacgaattaggtcagtttcttctcatatttcctttgacattggtgcattgtgattttagattgggattttgaattctatataattcccagattcaatttgatagtttgatgattggtttgcaaagtaaagagtaatcgattagaggttgccgaaacgttatttgaggtgatgagcaaaggaatgtaggttgaatgtgagttgaatttgaattccgagatttcatattaaagatttggggggtttgtgtttgcaaagtttagattaaccaattagtttaacgaataggtatgtattaacattggaaatcaattgaaaggtaacgaattaggttcagtagaatcgagtgcgacgagagattgatttcaacgtatgataagagtacatgtggtataactattaaaatgtttgattggagttgaactggttatattttcaggagcgatg

SEQ ID NO: 1774 - DNA, 3000 bp, Unknown
  misc_feature (1)..( 3000): cDNA_ID_2143588_gDNA_ID_1620446_Annot_ID_157300 3000 nt of promoter + ATG
catagcttccttgaacgagagaatcgatgtcccagggatttcaggttcaggtacagctggaacatcatcaacagtttcaatacgtctaccatcaatgtctgcttggtagagactacgccagaaaatcttctttttctctacgataagcctctctctccaactatcaacaattggatcgatatatccaataccatcatcaacatgcttctctacaacgcgtgacaacatttttctctcatccatatcaggttccaagatgcttgaaatatcatgtcaagtaaacatatatttcaaacaccacaaagattataaacatagatttcaagagaacaaagctaaccgttatatctccaagtgcttcatttatttcttccaaagtaaatcccttcatgcaactttcactgaacttgtgcttgcacattcttggacattccttgtctgcacgtacaacttctctaaatctcttcccaagctgcggaatgcactcaaatgccagaatctagacacaaaaacataaaagtaaatgaaagttcacaataacaaaatctagccactcatataatttactcgactacttacctcaagtggagtaataaatccataaaaagcagtctgtgccttttgtttcaccacacctttcatgttcttcattactctctgcaccccttccatacactgctcaaaggaaaaacgtccccacgggaatgtctcacaagctctgacattatccacaatcctaagcaaaaactcctctatcttcgaatcccctttagaatcagctttcataaccttagctaagaataacagaattgccaacttcaacctagcagtagacttctcactcttaaactcttccagcttctcttccacgtctttaatcttgatgtcctcagtcctcttaaacaacttctccacaaacttcaaactgcctaaagtcttatagttttttgggtactcacggcagttcaaaccggtcaacaatgcatgctctctaattgagtaccttataggtactccattgacaacaaaccaacactctctcgccaattctgtcttagccgtgcgaaccataagcatccacatgccttgaatcatgtgattgggctccttaggcatgtggaatatgtgcttaaattggtcatgattcctaaaccacttcagttctgcatccaaagtctctataaattccactgtttgtaccaactgacacctcgttcctatcttacacaccttcgtgtaggtagttggatcaaagtacataacttctggcggcaatggttgattatcatcatcatcatcatcatcatcctgcatattctgcggctgaagatcatcatcaccatcctgcatattctgcggcaggttatcatcatcaccatcatcctgcatattcaattcaaaatactttcaatttcacattaactacctagttgtactacttgttcctgaatgaccattcacaaatttacgacctagttgtactacttgttttatctgaagcaccattcacaaatccaatcatttaccaatgcatgcataatatcctaaaacgagcctaatcaaaaaaataacggtcttctatcataccttatttgctccatcatcatgttgaacaactgcattcgttgcctcttcttcttctgcacaagaatcggcatttgggtttgaaagatcgtcaattgattcccatgcgacggcgtttgaattacccaaatcggcggcgtcacaatcgccggttgtaggctggatttctccggcttcctcttctgttgtaagaagctctgcgccttcttcatctctttggggaatctcggcggcggtctcgtcgactgatggaggaatttcgccggtcgattcaaccctagttgattcatattctccagatgagtcttttactctagccattggaaaataaatttgcggatatgaaagagacaaagacgaacgaaaacggagaagaaagaagaatagaagagattgatttttccggtgaaagtggtatcgtcggagacgaaagaagacgacgacggagagaagaggaagaagtcgagaagtgaaaagggggaacttaggtttttacttaggttttttctgtaaataatacaactgagccgagtatttacatttttttttgggcccgagcccaacaaattaagttttcttgtagtttttgtggtttcgcaagggtttttcgtcctttcctcatttttcgatttaaataaaaatcaataataatattccaaacataagaatggcacgagtgattatttattctccaatagtggcataagaggtgagcttccagtcaagatcggcccataaccataacgcccataaccaagtcaacactaccaaagatgttgtcatgaatagatttatggttgattatgtagtgttgtgaatatgcattactattttctttcaagatgaattattaaggcgtaagacgaaactaattttactttgccactttactaaaaacatattttcaatcgtatatatatatcctaatagcactacagattttggtccaaaataaaataaaaaagcactacagattttcatataagctttttgaatgaaattataaaatcatcaaatgacacagacatttactactaaaatatactataatcatatccattaaacgataagagtggagtctaagatttttataatctttagaatcaatctaccaataactctctttttaagaacaaaactataggctactaatcatatactcatattataaaacatgtaatcatataaagtgacgtaaccttatgataacatttcagctgaatatgagccacataactgaatcagataggatcgatcatacatcaaaacataagaaacagacacaacacaacataagaaacagacacaacataaaaagtatctaacacatacccacttgatataaacaaaaataaaataaaagttctatagacccatgctttattgtcttctcaccgtctctgcattaagaaaatg

SEQ ID NO: 1775 - DNA, 1665 bp, Unknown
  misc_feature (1)..( 1665): cDNA_ID_2143670_gDNA_ID_1620447_Annot_ID_157325 3000 nt of promoter + ATG
aatattattattttttctcggcatcgtgcctctacgatatggtcttctttagatttgtgatgaatatgaaaatgcttgtaatggaatacttcggttctgtaatgtaaaccctaaatccttatcgtgtgctctaagattatagtatatatatagttattttgatagattctagttttggtaagttcgaatttggatttacgagttatggtcgactgctcaaaattgttatggtacagtatttccttgtctcaatatttaaaacgtttgatgacctttgatgctcaatgtaagcgttggatacaaagtttacttaactacatatctgacgctatccttttctttattttcagtattgggatacacatctagtctttcgaatgtcgattctatcccgatgctaagcggatcaaacttctcggaatggaaagaacatttgttacttgtcctcgcccttatggatcttgatctttccctcatgacagagcgtccaagctctcctaaggaactcaagcattgggaccgctctaatcgcgtgagtataatgataatgaaaatccggattccacaaggatttaggggcgttgttcctgatgatgttacaactgcaaaagacttccttgccagtttggagaatttctttgcgaaaaatgaagaggcagagagaagtagggtgcaagcagaaagttcctcgatgagttacatagaaaatgagaatgtaagggagcttattatgaggatgaaaaccctcggtgcgaagcgaaagagacttgggattaataatattttctccaatgacatgatgttagcgcattgtgcagtcaaaatgctgccattgcagtatattagccttaaaaacgtttacagttgtctcgaagggaaatttgttaatgaaaacggtagatggcacactggggagatatggtctactaaagagctcattagtcgttgtgacatggaagaagagactttaaggacggaaattgcagatgaagcaagaaaaagggaacaatgagagtgtttggttcaggagtagcaacaaaagcaatatatgcttaggaattggtattgaaatggtttgaagataagaaacaaagaggcctttcggagatttctatgaaataaatctgtgtgtgttgcattttgaagcatttcctttttttgtcattgtgtgtgttttcagatgagttttatttcaatttctacttaggatatgtaatattccattatgatcacttttcttattttcccctgttttgctctgttttaaaagaattgcctataattttttagaacttgtagacaatttgtttcttagtgatatttttccttagtttatttaaactctttaggagtccttgtttgactctgtgtcgccccttttataattagctacaaaatttctagtatcttctcgcaattcctatttgagatcagaatgcaaatattgtcctactacaaaatttctagtatcttttagaaatcctaattgagatcggaatgcaaatatttctctattctttatctaccctatgattgtgttggtttcttcttctatatataacacttttttcacacaccaattctctacataacacttttttcttctagggctcagattgttcgactttcttctttaacctttcttttactttccaaagagacatg

SEQ ID NO: 1776 - DNA, 3000 bp, Unknown
  misc_feature (1)..( 3000): cDNA_ID_2143699_gDNA_ID_1620447_Annot_ID_157334 3000 nt of promoter + ATG
tctaaggaactaactaaattcaattttgcaggggcatgagccgtttgtttcatatgaaggccttgaacagttgcatcgcttcatctttataatggcagttactcatgtaacttatagctgcttgaccatgctccttgcaatcgtcaaggtagtatctttcaacagctgaagttttcttttgaatttgaatgttaataacagtgtattttgtgtgtttatagtgtgcgtttttatctgttttgatatgggaagaacctctgttactaacaattttgtttgatctgcttctctatgcagattcatagttggaggatatgggaagatgtagctcgtctagatagacacgattgcttaactggtgagcactaaatggttatcttgttcttccaagtatggcacgaaagattccatctgctcctctatttaactaagagcacaagtgaagtgctgttacaagtagcattatagtttacttatttgatgggttgtatatctatcaagtggtaaacgatcgattatttgtgtggcagcggtggcacgtgaaaaaatattccgaaggcaaacaacgtttgtccagtatcatacatcagcacctctggccaagaatagaattcttatatgggtggtaagattcttagctctcttctctagaaaatatggaaaacaattacaaatattgaataatgggtggtatgtttttcacctccttgcagacatgtttcttccggcaattcggacgttctgttgatcgttctgactatcttactctccgcaaaggattcattgtggtgggtgatactatatgccgtatgatcattagctttttccactctcattttcaactatttatgaatgacaataatgatacaactacttatagttggtactgtttccttttcttctttaatgagcagaatcaccacctcacattaaagtacgattttcacagctacatgattcgttctatggaagaagagttccaaaggatcgttggtgtgaggtgagatacctcatcccatagaaacatagtgtgggatatccacttagcttatatctatcaggttctgagttcttaaaatcactaatcattttggataaatggatgcattagttattgactgaacaacttttgcttcaatgctcttctgcagtgggccgctttggggtttcgtagttgctttcatgctctttaacataaaaggtatgatcagttgatcactaaaccaaaagacagatgatcattctgttttcctttagttcaattgtgaaaaatattcatatttataagatttttagttttaaatctggcctcttgttactgcaggatcaaatctttacttctggatagcgattattcctgtaaccgtaagaactacattttcacagcattctcgctttcttgtattgtgtttgtaaacatcacaacttagtaaaactttcattctcattttatcagcttgttcttctggttggtgctaagttgcaacacgtaatagcaactttggcattggagaatgccgggttaaccgagtatccttccggagtaaagctgagacctcgagatgaacttttctggttcaataaaccagaactactcttgtcccttatccatttcattctgtttcaggtttgcaaaatcttaactaaccaccattgcaccgaaccaatatttctcggtcttggtaaaactaacagctacttgatttgcatttccaacagaattcttttgaactggcttcgttcttctggttctgggtatgacaaatgaaccatatattcttttaatctttcgcaaactttcgattcgggtttggaacttacaatgcatttgttattacttttcttcagtggcagtttgggtacagctcttgcttccttaagaaccattaccttgtttacttcagacttcttttagggtaactaaaccttcgtttttcgtctcgatttagactgttgtgcatctgcctcatagtgtaatgtaattcattcctctttgtaggtttgctggacagtttctatgcagctacagtacactgccactatatgcactagtcactcaggtaatttatcgagctttcgacttttggcagcttccgtaaactcctaggaggataacgaaatattgttttgattccagatgggaacgaactataaagcggctcttatacctcagagaataagagagacgattcgcggttggggtaaagcaacgagaaggaaaagaaggcacgggttatatggcgatgattcaacagttagaacagaaacaagcacaattgcatcacttgaagaatatgatcatcaagtgcttgacgttactgaaacttctttcgaacaacaacggaaacaacaagaacaaggtactactgagcttgagttgcaaccaatccaacctcgtaatgattgtgtacccaatgatacttcaagtagagtcggaacacctcttcttcgaccttggctctccatttcttcaccaacaacgaccatagagttgagatcagaacctatggaaacactctcgagatcgtcttccttgccaagtgagaagagagtctgaatataaataagttcgtaggagtaacagtagaaaacaagtatgtctcgatgaacatagattgaaaacttacatcaatcaagtgttagcaacactaatatttgtatgtgctctacaaaaaaattatattgcaatattgagaaacatttaaatttgttagaaccaaaaccaaatcttaccttttgtttaagctaagatttataaatcatcatggagataaaaagaggtataataagaaataaaacttttctacattggttaaaaatttggaaaaagaattactttaaattattttactcataattttgtttttccatttttctaaattaattaattaattattttgacctttgtttgggttctctgtttccgacataacttttaagttttgtagctcctcctcgacggcttcgaaaccctaaaccccaaagtttaagctgccgtca

SEQ ID NO: 1777 - DNA, 3000 bp, Unknown
  misc_feature (1)..( 3000): cDNA_ID_2143715_gDNA_ID_1620447_Annot_ID_157337 3000 nt of promoter + ATG
atatatatcggagcataagaacttgatgtacactacataatcgtcttcttggtctgggggataggataaggagacatttatgatgactctggaaggatcatacataggatcaggaagaggaggcagagtaatgactctaagggacccgagattgaacacgtcgcttagatgtacggttccatcatgtttgctcataaaagctatccagccacgcgagcttccaatgactcttgaatcttggtacaacaactttggaaatgacttgtggataacttcgatgatctcttccttactcagatcaaacaacttgaaactcatgatgatgttttcagcttctggagactctcctactttatcacctacaagtaccatatacggagtttgctttggagatgaggagaagaaacgagcagccttgtgatcactttcttcttcttcaacctgtgattgttcgtggaaggaactagaaaaatcatcataaagaaacacagcaaaacacttatatattttgttgataacgactagtaaaagcttacagagagatttgcgactagattgaaaagcagagacattgttatcctagaaaacaaccccaaactcacttgatttgttctaaattcgtaacaaccataaggttgtgatctcatgtgtttatgttttcacattcacgtgttatatactatttttgacgtactttccaagaaacatatcaaatactatcaaaaagaaatcaacagaaaagaaagtaattgacaaaatacatcatatgattcgttaaggaaacatataacaaaaaacagaagaaaaaaaaacagaaacaaatatgtaaactatatactcaccaaaaaaatatatacacttttctaaattaatagtatttatgggcattttgaaagtgtatattttataagttgaagaccctaacaacacgacatgtgtaaaagttataattcataaaattttgacacatgttaaataaaatttgttagtgttaatttcagacgtattgttcaagaacacatatccagtgatcaggataagaatctcaaaaattaagagaaaaggaaatctgaaaaagtctatataacatgtgtcgttgctgacttgaaaatgatagtgatcattcaaggttttgacattataatttagttttagatattagagcccatatataacatcttgcatttcttcgaggcccaactaggtgaaccatactttaaagtccgaattcatagcttatgttgcttatgtcacgtgggtcagccttcagccttgtttattagcaagattttacaagatattgttcgtttgaccacttaaccacttctttaatccggtcgcattagttaccatagtgacaaaaagcccaagtagtataaggtttcaagcccaattatattgttttagcaggccaggcttacttagatttaaaaccaaatttgtcttcattttttctctgaacgagaatcgaaagcattttttatacttgattcattacccattatttactaaattatttacaaaatttgccattaatattatatataaatatttcaacaacataaaaaataaaaagcaaattctaatttaaataattaaaaatgaaattccaatcaaaacaacttaataattaagcaagtaacatttcggaacttaatatttaactaccttcattttttttatataaacataaaattatatgttaacaactatattgatatcaattaatatatggattataataatttatatgccaaaaaatcctagttcaaataaaatagttatgtatattacattacataatacacaagtaaatttcagatttaatataataatccaataaattttgtaatacactcaatatatttacttaataattaatttgtcctgcatatagtaaatgtaaactatctaatgtattttagtgtatttttataaagtgtctacgcagcatttaaaatctcaccaacttatttattctcgattgtaaataattggtagtgtaatattttgtgtaagaaccagaaacttcgttttagtctatacataattcactctaaatcctaaaatcattaatgtacacaaaataattggggcaacgagcacataaaaatactaacaaggaaactatatgtaccgaaatctttaacatatttcacgttaaaactaacaaaatatgttttttatttttttttgtcgtcaactaacaaaatatgttagataattcgaaaatgatatcaaatataatccaaaataaagtaatgagaaaatacttcaaaaagtatagataaatataatcatctaaaaagtaaacatataacaaattaaagaatgagattaaaactatataactatgaattgtaaaaaaagaaacaaataaacattgagagtaatatatatactttttaaataaatattacttggttataagaaattaaaagtgtacttatataagtttaagaccctaacaacgcaacacgtgtagtaattataactcgtaaacttttgacatgtgtgttaagaaaatacttttttttaaaaagacatatgtgtcattttagagtttagactcacatatcattatcttttaaaaataatggtcacgacttatatttcagattattttcagaaagaaatcaacagaaaaaaaaaaaaaaaaaaggtgacaaatcccatttctgaaaatttgaagtataacattaaaaagtaactaattcgattttagaaagaaaagattgaaaaaaacaaatacattaaaataacatatttctttctaagtaaatatgaatagctatatgggaaatttgaatttatttttacatgtgtcacacaagttatttatacaaacacataattcaaaatcttaggattacaaaattacgtgtctgaagaaaatatatcagatttataaataatttatattatatataagacatagaggcatatagttgacgggtgtaaaaacaatagggtttaatacttgtagttaatttgaaaaca

SEQ ID NO: 1778 - DNA, 3000 bp, Unknown
  misc_feature (1)..( 3000): cDNA_ID_2143692_gDNA_ID_1620447_Annot_ID_157332 3000 nt of promoter + ATG
tagcaattgatgtgtgataaaataggttctcagtcttgtttctgagtataattatgtgcgggtaacaaagctatcttaacagccttatacgcagaaccagaacatgtgaaaacataacctgttagaacaagcaaagcagtatcattcatgtcccaataattgtttctttaagtgatttgaaacttttcttcctttcttggattacctttgatgaaacctagaacaattacagatgatagagatcattgtatataaataccatagtttgtgaatcaataaaatcaagtcagttcaataccttattctacatggtatcagagcagtcgatctttgtggatcataattaaagcttccgcattatagtttttgtaatcaagaaaagattatgaagatggtgatcactgaaggagaagacggtgcctccgacggtggaaatgaaaacgacgaagatgtcggcatgttaagggatggaggttacgtgattgtttcttaatcacatgggtattatttttccaaaactttaagtcgttggttttctatgtttttaataggattggttttggtttttctttttctttttatgttactggaattattcttgagttaagaaattttcagagtttttgtgttcttagtaagagagtttggtaatagttttaccgttacgggggagtttggttatggtttagccattagtagagtttgtggaacattcatgtttttaggtcatgtttagtcccgagttatagaccgtccaagataaagatgattgtttgtggagcagcataatttgtgtacacgggatgtattcccttttaccaagaccgaagacatgatgaagttccaccccaagaatgaagtttataccctaagatgtttatttacatgatttgtccgtcctcgacatattgtccacgacatacgtgttccgctttgtgattgcaaagtttgcgttttgcgtaccacgtttgtcgtgcgggggagtattggggatatatgttatccgattaggattagtacaatatctttgatgatagagtttctaacctatattttagggatttatgtttatcttttgatagaaatcattgtatataaataccatagtttgtgaatcaataaaatcaagtcagttcaataccttattctacatttacgtctctcagtgactacatggccactcgttagtaattaaatgcatatacgtacgatacacataaatttggctctatgtgcaatttgcaaattttaatgtcataaataaagcgttagaataatcatgcatgctctaaacatatagggatgatgttacttacctagaaaatgaaaataacttgcaagtagcaaacacaacacaaaaagaaatgttacaaaacttggccaacttgttccatgacgtacgacgttttaaggttttgaacaataaaacgtgtttttccacttcaaacgacatgaagagacaaaaggttggtaccagttacgaattctacaaagtacttattttggaattacttagccaaattagttaggctttttgtcttgacatcttttggcttaacataataagatctaattgagagttaagactaattatcaggttttacttacaatttggtagtttttttaggatctccagtaactaataaaatgtttcgtattggctcagaatatttggcaaaagagcatgagaaacgttaagaacataagacaattaattaagtccaacccggtgacagcttgttggagtaaaagtaaaattaaattcaaaagtggtgttaaaaatttgttttctatcattaaaagcgacaaaagtttatcattttagtagttttctaaccaaatagtatcataatcacataagtgtgttatgtatacatttcatgggtctcgattctcgaccaatagaaatctttcgttatcgtacctatcaaaaagtgaatatttttcattactttttataaaaacataactatcgagtatggacctttttatatgtatgttcttacaagttgttagatcacacctatccgcaaacaataggtcattatattttaactataaacattggggtcatatgtcctcgtattcatttagcttttgccccttatcggatatagttttagttgagaatcaaaatttgtttccctgattctctcaatatatatgagctagtttggtaaacttatgagagttttgtcttattatccatgtttaaatgttgatgtgaagattcgttaatagagtttttttttttttctgaaatttgacactgtaagtacaatgaaatttgttctaaggattaagatcaagagatattcctcagctataatatagaagaatgaatggaaatgtaatattcttctataatttatattcatctttatctctttatctttggaaaacaaaagaaatctctatctctttattcattcaattcatacttaccacttaccagtttagatatgagtcataagagaaggacatgatcaaaataaaagattagactgaagaaattgtatttaattttcgttttttttttttgtaaaaagagaaataaaagtatagtaaatcagtagtggagtaatctatgatttcattgatgaataagagattacattaatcttgaatatacaaaataaaaataaaaattaaatcattttactgaaaattatttgaatactcaattctaaaatataaagataattttttctagcctatcatagtttaacaaataaatcacaaaagttttcttagtcagcatattaattaaattcctaaacattatagtaaaaacaaaaaatctacctgtaataaacacaaaaaaacaaaaaggtaaaaaaaatctatctgtacacaaccctagaccaagtagttttgtgtttatgtactttaacaccgtacccatctctcttctcctttataaccacttcttcctctgtcttctctctccatcttctccttcacattctctgcaaaaaaaaaaaaaaaaattcttctttt

SEQ ID NO: 1779 - DNA, 3000 bp, Unknown
  misc_feature (1)..( 3000): cDNA_ID_2143695_gDNA_ID_1620447_Annot_ID_157333 3000 nt of promoter + ATG
tggttagattcatactaacttcgtaaatgtgaggggcaagtcatgattttcgaaaaagactcataacagaaaaaagaaaagattcggtaacttagacgagcattggtataatgatgatgtataagtataacactatatggtatatacgaaatgattcggaaacttatgcttggaggacattgtttctcttgcatagcttacataacctatatgaagtcgtggaaacaaaaaatatcacaaaacatctactgatctagaaatgctgaattgtcatatatatgtagttgcttctattattccaatgaatctattaggacatgtgctggatttccctaaagttggaccaataaggacacgcttttgtattttagacctcatgataactataaattctgatgcgtagtaaaacaccaaattaaagtggataattgtgtacttaattatgccctttttagtaccgatatgtggtcattgtaccattgttgattgattcaaagaagacaaattatttgaagttccaaaaaacaaataccgtctttttttgtttgttgattttaaacaggaaaagagaaaaacatgttatttcgattcatgtttgttacatattgcgtatgtacttaattatgccctttttataattttatttggtggtcctaaatttttgcttggacgttagtgatgggtctctttcacgagtctcctcaatgattgatgagatttacctctttcacaaattgtccatggaccctattttttttagttattcagaaaaaaaaaactgagaaggctaatattgagattatatgtttagttgtagttgacgactcaaactttgatgattctaaactatatatttttcgatttcacacgaacacgaagaagggaatgaattttttgatacaattcgacgatctacgttttgatggtgatatatataaagctgtttcacaagaattcactattctctaaggagcatccacattgtataactaacatatgtgtcttcccacactaattcaattattaaaatgtgaaagttgtttttaaatagagactcccttcccaaaatgttttaattgagacacattaagacattttgagagtgatatcatttaaaaacatccaaacattttaataattatatttttaaaggaagacacaaacattcagatgtgcaatgtggatggtctaaagaccttatagtgtatttcgattttaatcagaatctcaaactagtatgtactttttttttttagtgtgtcaatacttgatttcattcattcaaagacaaatgaaaaacatagtacaaggattcaaatatccaaagttttgtaaatgaaagtggaaaaacattcataaatgcaatataaagattgtaaagataattccacttttgcttcacaagcacttgaaggcaatatagcttgatagcttcttggcgcaagcggactcatggtgagtcgcgggcacatccacgagtacttggagaagtgagagattattcacggtcgagatctcaaactagtgctagatctctagctagttttacacatgcgacactcgtgacttgtgagttcattaaccaaagcttccaagcaaccaaagtgaatttacgggagctcaatctcttcatcatttgaagccctctaactctcccagtgtgaccaaattgaccgtttgcaaaaaagcaaattcttaattgggttgttcacgatattaaaattgcatcctcacatgcaaaacaaataaaatcacgaaatttcgttaattgttttccacaaaatcactcttcaccgtcaacatctacacaactaacaagatctcttccattatccaaaggatctcttatatcaacgagatgattaggacaacatatatagaggaactccatacacaattaggtaaacttatacaacaacatttaaaaaataacttttttttttttttgtgggcatgcacacacacacgcacacgtatgacttaaatctcatgtaactgtaaagactaatgtggagccctcctcgaaatctcttgcggattttcgctttttttcatgagaattaggaaaattctgactcatatgaaagcaattacgtcattcttgtctttataaaattgattaacaaaacaaaatataaaaaataacgagagtttcaagacctcatattccaatgcatttagtgcatttaggtaggttccaggtagacagcttatttaatcgtcattattttgctaatcaacttttttatacgatactttcaagaaagaaaataatagaataacattagatacaaacaaattaacgaaagtgagagagtatcagatgatcatgtggagaagtttgttttcggtatctgtcgaatcttccttctttccattttttcttgtcaacatttattatttatttttgtttggtcggccatttgtgtccaaaaataaaaatacgaaaaaacaagtatttttcactttgctcaagaccatctctgcacatgaagttatgaactaagtgagaccagaagaacttctttcgatcgatttctacagtgattctgtttgctcaagactacaactttgtgtactttctctttcaacgagctgtgtatcgtgtacttcatggtgtgttcctctgcttctgattgagattgaatctcctgtggtttttcagttgctccggtgatcggctccggtggattgaaatttcaaagcttttcctaatttcttggagtctacagatttcaaagtttctgggttactaccaaagtagaatctcagtttttgtctaagctaatcagatttctgcgattctgattgttaactaatccaagaacgatcgatgggggtttaaaggttagttttttaaacttgtagaatcaaggaatgtgattttgttactgggtttaccaaattttaaaacttttttgcattgtggatattacagttgaatttgggtctagaggaggaacttgttttgtttttgtgaagaatcagactttaaaagaa

SEQ ID NO: 1780 - DNA, 3000 bp, Unknown
  misc_feature (1)..( 3000): cDNA_ID_3064285_gDNA_ID_1620448_Annot_ID_157355 3000 nt of promoter + ATG
tttgtatttgtgtttcttcttttgcaattttgtcagatacataagctttttgttgctaaatctcttatcatcgaattcagaaatctgtttttgttgttataactctttctacaacccaagcaatgaagctattttgtttaagttctgcatcataaatatgcataccatgaagagttggatcgaataattgcagcctgatatgatcttttgtcttctggtccttattctaattcttggcatctcttggactgtttctgtatgtagtgatgaagtggttaagagtcttaggtcttctgatgtgtgatagaactccattgatactttcaattatttttaacatatatgaatataggacataacatgtaccatttagcctgtcttatttgttcaaagaaagctttttatcactacatttggtttggttttatgtaattttttttctttctaaacttactggacgaagttgctcattttctgctcatctacttcttcagaggaagcattggatcaccgtggtcactaaggagaagaaagcgagttcttcaacctaaacaatggaatgcttttttcacagaggaagggcgactcagtgatggaggtgtcaaatttctgaagaaagttcgtagtggggtatgttgctaaataagaaaaaaatctgctgtaatctgcagttgataaccttttgacactttgatatactaatttttatttttgtttcagggtgtacatccaagcatcagaccagaagtttggccgttccttcttggagtgtaagaatcagcatcttgtcacttttccttgttttttgtatacttttatgagttttatctttttcggctaccattgggggttttctgttcggccttatgttcatactcatgcatggtctattgatattagctttttctttggggatattgatgttatgtaggtttaaggttgaataaacagtgcatcagtaaagcattcattaactaggagatcagagagttgccttaatgtttttctatcaagagatttataagattagtcctagtttcgccataccaaactccaccagccgtcgccctacattccattaacttgataatgaaacctgtgcaagttatttgtagtctttatcatctcgacacattgtaaccttatgctacttacctctcacaggtatgacttaaagagcaacaaagaagaaagagactccattcgacagctgaaactgtatgtttgcttatacttattgagagtttaatggcttctcaactttctaccaaatgttacgtttcccatttatctctgttctcctaggtggcagctggttattaacttgctcaatgtgttgataaaactaggaataagaagtagtagtttggaactcctacactgagatttcgagtcagtttgtaagtaacgtcttttatatctgtaaatcctgcaggacggaatatgaaaacctgcggagacagtgtcgcgagattcatgaacgctatgaaaatgtctgcgactcaaaggagacagctcagagcagcaacactgaagacagtcaggttcttgaatcccatgatattgaggaagtcgagagttccacaagaaccatcaccgtagatgaatcagagaagttgaattctgaatcgattatgcaggatgagaactgtgaaaagagcgatgtcaccacagaagatgctgctggtaatgattcagactcaaccaatcctgaagaaaccgagacttcaccttttctagctaacgaagaagtagaaagccacaatactgttaaccaagaaaaagaaatttcgtctccatcatcaaagccaaaatctcaggcagcggacgaggatttcatgtcaacttggcagagaattatccgcctagatgctgtgagagcaaatgacgaatgggtgccctactcaccaactcaagctgctgtttctgagacaaaagcccggggaatagccattcaggttggtctcaatgactatgaccacttggaaccctgccggatatttcacgcagcccgcctggtcgggatccttgaagcctacgcagtctatgatccagaaattggttactgtcaaggaatgagcgacttactatctcctttaatcgcagtgatggaagacgacgtcttagcattctggtgctttgttggcttcatgagtaaagcacggcataatttccggttagacgaggttggaatcaggcggcaactctcaatggtatcgaaaatcataaaattcaaagacattcacttgtaccgacacttggagaaccttgaagcagaagactgcttctttgtataccgtatggttgtagttctgttcagacgagaactaacctttgagcagacgttgtgtctctgggaagtaatgtgggcggatcaagctgcaatacgaactgggattgcgaaggcgacatgggggagaatccggttacgagcaccaccgacagaagatttgttgctttacgcgatagctgcaagcgtgctgcagaggaggaagacgataatagagaaatacagtgggatggatgagataatgaaggaatgtaacagcatggctggtcatcttgatgtttggaaacttctagacgatgctcatgacttagtcgtcaatcttcacgacaagatctaagactacttatatctttcactcttgttctctctctttacttgtttgttgcattctttgttatttgttacataaaatgtgataaaaaccgttgtcctaaaacgcatgaaaatgtcttcactattgctaaaattaaatgtagaaaaacttagccaaacgagaacccgctgaggctaaaagaaggacttgactttatttggttttaagagcctctggttgagctagaggtgtataactgtaacaaactaactattcttcgttttcaatttccagatacatcagatctcttcttcatcttcttcctcttgggagacttgatttattttgtgatcagtctcggattgtaacatactgcgatcttttttcagcttctcta

SEQ ID NO: 1781 - DNA, 3000 bp, Unknown
  misc_feature (1)..( 3000): cDNA_ID_2143901_gDNA_ID_1620448_Annot_ID_157372 3000 nt of promoter + ATG
ctcattgatttgtggcaagaaaaggattagtgaggaagctgattcgaattcggggcttgttcggatgcctggaaggttatccttggctgagatcaaatccgcgacgtcgggtttcaatgagaacgcaatcgttggtcaaggagcttctgctactgtctatagaggctctattccttccattggatccgtggccgtgaagcggtttgatcgagaacactggccacaatgcaaccgtaaccctttcaccacagagttcaccacaatgactggttacttgcggcacaagaatctggttcagttccaggggtggtgcagcgaaggaacagagacggccttagtgtttgagtacttacctaacggaagtttaagtgaattcctacacaagaaaccctcatctgatccatcagaagagatcatagtactctcttggaagcagagggtaaacatcattctcggtgtggcttccgcacttacatatctacacgaagaatgtgagagacagatcatccaccgtgacgtcaagacctgtaacataatgcttgatgccgagtttaacgccaagcttggtgatttcgggttagctgagatatatgagcacagtgcgttgctagctggacgagctgctacactcccagcaggtactatgggttacttggcaccagaatacgtgtacacaggtgtgccctctgaaaaaacagacgtgtacagctttggagtggtggttctggaagtgtgtacggggcgtaggccggtgggggatgacggggcggtgcttgtagacctgatgtggagccactgggagacagggaaggtgctggatggggctgacatcatgctgagggaagagttcgatgcagaggaaatggaaagggtgttgatggttgggatggtttgtgcgcatcctgacagtgagaagcggccaagggtgaaggatgctgtgaggattatacgcggggaggcgccgttgccagttcttccggcgaggaggcctttgttgagaatccgaccggctaacgaagcggaagagatgattgtcgatggtttggttggggaggatcttccttggatgactcctaaatcgcactttagctgattcctttttttggggctttctgtaattggttacattttagtttgagatttggaaaatttgtaatcttttttatttgtctagttttggaaactaaagattataaacctcccggagtaatcagtatttcataactcaaataaatagatacatcaagtacattttgttatagtctaacaaaacattaattcatatttattacccaaacagactcatgatttgtacagcattacacggttgcaaaaaactgttaaattctattgacatacatacacgggtgaaacaacgtgcatgcaatggtggtaaatggtaataagtaatagcaatggattttaaaatactattctaatttactagttcaataacacacaaaaatggccttttggttgcatggtttaatactatactagtgataagcccgttattggaccaagaaagtcttgattataatatactgagttattggacaaaaaaaaagagataaataactaaatttgtatggtttgaaatatttttccattatatttgagataatttgatagttccacaaattgacccactagatgagtcaataaaataattcaaccattgaaaatagattatcgaacaactcgaatcaaatgcaccgttacgataataccacattccaacgccaatttgttttttttattaataagtacttctcttttttaattatttttgtaatggtggagaaaataaaaaggaagggcaatattgggtttaactgaaaatttgatattaagaaaagcctgaaacaaggcgcaacacgcagctccagagagtcggtggtggtggagagatccggcgtcgtcggatccgaagaagaagatgaaggtttcaagcggtgtggtcgcttctgtcattgccgtctccaccgctgctctctcttcttcctccattcttcctccagtctccccaaaggtttttctttcttttttaagatctgcgatttcgacgatttcaattgttctgtggtttgaaactgagatgtggatatgaattgatcaggtttgggaatcgaggaaaacgaatgggtcggacaatttcgagccgaggtttgatgggttaaggttcatagagacgctggtcacagcacacagatgataagattacaaataccattcttcttcttcttctcttgggtgatgcaaaagctttgttttttccattcaaagcgtgagtgcgtcacttaggtctttaatcttatcattctcatcttctcttttgttgtcttctattatctctgtaatgagaatttattaacattcttttgctttcaagggatatgctaaattgaactctttcttgttgtgagctaaactttattcatatgttggtgtgcttttactttatatgagacaaagcaatgtgtggcgatggctctaattggtgttttgaatcattgggttgtatctggttaaactttaaagagccgttcaaggtcatcaacctagttggatttagtcaaattctggtgtattggaaaaaagactagttgaagcaaacaggctgttgaaagacatgagtggtagatgttctagttggtgttctgtctccatgtagctgtctcaaatacctagcaagtgttgtaatgagagcaccgagagagaagaggacaagaatgatctgtcataagagaagtgagaatccgagaggaagcaaaacaagaaagatgctctctcctctactgcttgctccagagacactgacttccagctcatccaaaccaacattactctttctctttcttcttttcaattatttctttattactatttcactttgaaatttagtgaatcctaacgctctggtcccatcactgcctcctctatcatcttgctcacaaccactcactacgctctctctctctctctctcacttcatctatg

SEQ ID NO: 1782 - DNA, 3000 bp, Unknown
  misc_feature (1)..( 3000): cDNA_ID_3064247_gDNA_ID_1620448_Annot_ID_157379 3000 nt of promoter + ATG
tttttacgacggaaacttctatattcgtgaaattgaaatggtgaacaaatatgtgatagattgtggaagctacccgtgtgtgtcgtttggttgttatggtcttgacgcataatactaaattttataatccaataaaaatctctgctctctctctctctctctctcgtgatgcccatttgtttatcttttcaaaagcaggatggaaaggtcgaaacaattcggtggtttactttcaaaaggaattaattcctttcagttgtctttcaaatctcaaatataaaaaggtatacttaagaattattattcaactattcattagataaatttttaaattttactaaccaaatatcatcgcagttagctgaaagtcataaccttctatggaatcattttcttaaataatgataaattcagaaaaggaggagaaatgaaataaaaaggaccatggaataaagaataaaaaaagattggtctaaagagtgttcgagaactactcttttctagagaacatatgcggttatgcacatcattgatcggactttacattacttgtatatattcactactttctcattaatatattatatatatatatataatatgtatatatactaaatgaaaagtttttggaagtgttttgatctttgttgtattacttttaaaaataattgttttaattggtaattcataagaatgtaattaaaagtagaaattctttctaattaatatcataactaaaagttaataattaatgagaagtaaacataaaacatctaatgattttgaaaaattaaaaaattctattaaaaagttgtgatgaaagatattatgttaatacgtgccgtgccaagattttaattaactttatagatgttgtaattcagtaattaactttgaagatatataaacgcatatgtgataagtgcttgtcgatagtggctcgtgggtagcctttaagcatgggccagtgtgcttgtgcctacgagctcgagtgatcgagcacacacattccaaactaaacacaaaacacaaaggaaaaaaagtaaataataaaggcatatatatatgctccattagaaagcaatatatatagaaggcagatagagtttgaaccaaagaaaaaaagagagagagagagagagagagacaacgaggaagatggggtggtttattaaggaaagaagaggaggttcatggaagcgaggatggttagaggaaacactcctaacatcatcagctcctcctcttacactactagctctccttgccatcatatctttactactcttcctctcttcatatccgcgttacaagtacgaggttgagaaaaccgctgctaatctcaagctcttcatgctattcctcccaattctctttgtattcgtcctcgtctctctaagcttcgtccatcgacttctcttcaaatcctcttactccgttagagcaaaccaggctaagtccctttttggagaaggaaactttccgtggggagttttgcttatgctaattcttctacttcttttggtttctaaacaatcttactttcactccttatggtaccccaatttatgagttatgatcttccaatcattcatatatagtcttcaaatgtaatatttagattgatcattgcttcttgtaatccataattccacacatgttaaaagacattttgagaataatgataaaaatttatgtaatatataaatctcgcatatttgttaagaccaaaagtctaaacatacatagctaatttgcgacaaatttacaaatttatatataacacaatttttgttttgtcccaaaattgagagaaagttatgggaacacatatactgtaaacaaatcagtagtggtcagttaatctatataaattcacttaacacacctccattaatctatatatataaatttgtatttcttgaaatttgttttttttaattggtgtgagatatgtatataatatgatattcgcaattgggaggatggattatgcaagatagtaaaggcacaactcaaggctgaagttcgactaaactacgatcttggtatactccgatggaagcagaagatgcagcgttgttgttttcaatgcaaaaaacatggcctaaagggtttatacacgtttgttttaaaggcgattgcaaggtgctaatcaacatcatgaacggatctaccaacaacgacattgctatagaaggcttgtgtaaattaagatatccattattgggcatcgaagttcagagaattaaatttctcctttactagtcattcttctaatcatataagcccatatattagctaagcaaggttgcatagatttcagcttttactcatatagcccatactatactctcactcgaaaaaatatacaacagtaatgacaaaatctgtaaatattttagaaaagaataaaaatggtgtacttatttaaatggggtaagaatctctgtaagtgtgacacattaccatgcaattttgctaataacatatgataataatgttattaagaatatttcaataataataataataagggatatgaatgagaatttgtttggtaaaactgtttgagttattcttccatcaatttttttaactattgaaaatatttaaataactcatgaaaaaattagaagaatattatggaaatcttcatgttaaaattatataaactaacatgttataaactattctataattttaaaaatcgtaaagatttccaaatttcataagtttgaaatcaatttaatgcataaaccataaaagcccctaaatattttattaaaatgtatttttatacaagagataatttcaaagtcaaaataatttttttttttaaagtattttcgcaaacagccttacgaataatctaaaaggctctggaagtaaatcgtggacacagcttaaaccctaagaaccctttcgttgaataaacaaaaaatcaaacgccttcaaaaatcaaaatctcgatccagatctcatcttccgccacaagct

SEQ ID NO: 1783 - DNA, 3000 bp, Unknown
  misc_feature (1)..( 3000): cDNA_ID_2143915_gDNA_ID_1620448_Annot_ID_157376 3000 nt of promoter + ATG
gggacaaaacaaaaattgtgttatatataaatttgtaaatttgtcgcaaattagctatgtatgtttagacttttggtcttaacaaatatgcgagatttatatattacataaatttttatcattattctcaaaatgtcttttaacatgtgtggaattatggattacaagaagcaatgatcaatctaaatattacatttgaagactatatatgaatgattggaagatcataactcataaattggggtaccataaggagtgaaagtaagattgtttagaaaccaaaagaagtagaagaattagcataagcaaaactccccacggaaagtttccttctccaaaaagggacttagcctggtttgctctaacggagtaagaggatttgaagagaagtcgatggacgaagcttagagagacgaggacgaatacaaagagaattgggaggaatagcatgaagagcttgagattagcagcggttttctcaacctcgtacttgtaacgcggatatgaagagaggaagagtagtaaagatatgatggcaaggagagctagtagtgtaagaggaggagctgatgatgttaggagtgtttcctctaaccatcctcgcttccatgaacctcctcttctttccttaataaaccaccccatcttcctcgttgtctctctctctctctctctctctttttttctttggttcaaactctatctgccttctatatatattgctttctaatggagcatatatatatgcctttattatttactttttttcctttgtgttttgtgtttagtttggaatgtgtgtgctcgatcactcgagctcgtaggcacaagcacactggcccatgcttaaaggctacccacgagccactatcgacaagcacttatcacatatgcgtttatatatcttcaaagttaattactgaattacaacatctataaagttaattaaaatcttggcacggcacgtattaacataatatctttcatcacaactttttaatagaattttttaatttttcaaaatcattagatgttttatgtttacttctcattaattattaacttttagttatgatattaattagaaagaatttctacttttaattacattcttatgaattaccaattaaaacaattatttttaaaagtaatacaacaaagatcaaaacacttccaaaaacttttcatttagtatatatacatattatatatatatatataatatattaatgagaaagtagtgaatatatacaagtaatgtaaagtccgatcaatgatgtgcataaccgcatatgttctctagaaaagagtagttctcgaacactctttagaccaatctttttttattctttattccatggtcctttttatttcatttctcctccttttctgaatttatcattatttaagaaaatgattccatagaaggttatgactttcagctaactgcgatgatatttggttagtaaaatttaaaaatttatctaatgaatagttgaataataattcttaagtatacctttttatatttgagatttgaaagacaactgaaaggaattaattccttttgaaagtaaaccaccgaattgtttcgacctttccatcctgcttttgaaaagataaacaaatgggcatcacgagagagagagagagagagagcagagatttttattggattataaaatttagtattatgcgtcaagaccataacaaccaaacgacacacacgggtagcttccacaatctatcacatatttgttcaccatttcaatttcacgaatatagaagtttccgtcgtaaaaacatggtttctaacaaatttcataaaagtagaaaccatgttgaattttttgacaaccgagaatctaaactccatattcataaaatgaaattgaagcggtgaataaaatatgtgatatcttctaaactacatatgtgcattgtttagttattatgggcttgggccataacactaaattttataatctgataaaagtcataaaactgtaaaagttagcctctccgtaagagatcacagtttttgatgattttttgtatgtgatgattgtattaaaacttaacccaacaactaatccagttcattgggcgtgtgtatattgtaaattaactcacgttcttatataaaatgagatatggaggagactttagcacgaacgaaaaagaaacagactactaacctcctaaatttttttagataaaacaatcatgagacttagtacttcatttccaagctcatcgtcgtgtgttccatttttatagttctttaatcatttcttctaaagtcaccacttcgtgacttcctctaatctcaaggttcgacaagtagctttttaccgctacggttgaagttgaaatttccaattaatataagtcgattagacgaagtagaaatggttgaaagaatacaatgattcaattaataattaccaatgtgccattggattagtggtttttgaattactaattatgtaattttcttttgttttaaggtaagaaatataagctggaaagtaaaaaaaatatgtatattaccaaattaatgaatgaatatatatagttttctgtattatattacttttcaacattgactctttccgtacttggaattccacggcaaagactagtttcgtttgccggttgagacagacagtgatttcattctcgtgctcttcctcccgccatctccggtctctctccgaccatttcatcttctttaatcctccggcgaaaatttctcaagattagcaaaacaaaccgcaatttgcaagcacaccagagccgttaccacctgaaacaagtgataagctttttttctttggtttccgagcatacccaattcatcggaaacttcacaactctgaagctagggtttcaaatttcacctttttgttaaaataaaattgtggtttttttggagttagcacggaatttgatggttagaacggcggagacttcacgtagtcttgtttgcttaggatg

SEQ ID NO: 1784 - DNA, 3000 bp, Unknown
  misc_feature (1)..( 3000): cDNA_ID_2143929_gDNA_ID_1620448_Annot_ID_157382 3000 nt of promoter + ATG
agttctgaaaaagcaatgctaattattaatttaacctgcttaacttttttccaacaaaattataaattctgtttcttttaattattaatgaagaaatcatgagctatcgtattatacaatgtttgcggttgtatggccatttgtgttttgggccggtaaaatggaatttcaaagctagggtcgttgatttatttgcttttctgtgaccggtgaaatggaatttcaaaatttctctttaccttactttgagactaaaagtattttcttcttctatgcttacaaaaagtactttagtttgagagctgtataaaataatagcaatcatgttctaggaattagaggcgacggagaagtccaatccactaaaaagttaaagaagatagcacttgaagataatgcgttaaagtagttatttattttctaacaaataaatttcaattaaataggcgctatatttactagactggtttacattaatttacattaatataaagaacaatattaatttacattatgtattttttatattatttacattaatttattactaaaatgtttttattttcgtttctagaatcttttctacattcaaaatatacaacagaaattaaattaaaaagtataattacagaagcatcaatgcataaaatctctagagctgattatgtataaaataatcgacggtactaaaaaattgcaacaactgattttttcgagaaaaaaaattgactgctataaaattgaccatgtattcagttattcagacctggtcttgtcttgactccttcagcatagctgagaaaatccatgtttacggtctagtgaacaatatttgggttcacttattaggtaaatctttttatttatttcctcttatcttaagtttttaaccaatctgaattcgttatttaataaaagaaatttaaactcatttaattataaaatttaaatcataatcatttttttataaactcaaactcatatataatttagtctaattataaaatctaaatcctaatttttttatttcagccaatcagaatatactacctaataaaaagttaaaaaaacttatttaattataaataaaaaatctaaattctaaataaaaagtaaaaaaaaattaaattctaaccactttttaaaaaattcaaaccaaaatgtaatctcgtttaattataaaatctaaccctagttcttctttgtacacccaattcgatatttaaactcttttaattgcaaactctaaatctctaaccgttctttctaaacccaaaccgatatttaacattgtttaattataaaatctaaatccatttataaaaccaaacagacgttcaatctcgtttagttataaaatctaaaactgtttataactcaaatcgatatttaatagtaaaatctaaacttcaatcctttcttataaacccaaaactatataaaattttgttcttgtggcaaattagattttataataaaataaatttaatttatttattaggtataaattctaatttaatggaataaaaaggtgaataaaggggtgaatctaaatatattttttattggcccatattttttactaggataatggccgattatgctttggtgaaaatttagataacgcaagttagatttttctcactttatttaataagataagattttagcggggatgaaatttttacaagcgaatccctcaatatttcacttatgttcgtggatgatagcttcttttttgtaaaacgacaaaaaaaacaatgcgtcattggatttggaatactaaagaactatgaagaggtttttggtcatgagttgacaactcgatgatggacaaacttatggcaatcttcgaaatcactaatataggggacatgaacaactacttgagattatcgaaaagtttaggaggatctaagacaaaaaaaatttactcttttagaaaatatttacataatagaataaatggttggtttacaaaattcttatctaaagatggcaaagaagtattgattaaatcagtaccagatgcattgcttacttatgtattgtcttgttttagattaccaaaatcagtaacatcaaaacttaggaatgtagtaacgaaattttggtagagttccaatggacgaacaaaacgtttacagtggaaggcatgagataaattttgtcatagtgcctctctgctctccctctcctcctccgggtgcctctctgcttgctacttggttccgtctcttcagttaggtcctcctctgcggttcaggtttccttatgagttttttgagtccttgggtcgttccctcttcgttcttttggtttttgggcctgctatttttaagtttcagcttctttggttgttttgggctttgctcttgttgtcgggcctgcgcgccttggatttgagcttttggatgtgtatgttttcgagcctgtgtgcttatgtttggacacttgtcttataacttgttgtttgttttaatggaaatttaaaattaaaaaaaaataagaaaaataaaataaaaaataaataagttttgtcgtaacggtggacttggtttctagaatgtggatgattttaatacaacttaattagcaaaacaactgccgcaattgattatgattcttaactctttatttgcaaagatgttcaaagaaaaatattaccggaaatcaaatcacatgaatccaattaaattatacacaccatcctacaaatagaggagtttagtatctgttcaactactgattaatcaaaagttgatgaaaagagttgaattaattttcaggtgttttcctttgaaagaaaaaaacagagaaaatgttttaaaatgaaaatttataggtaaaaaaagtcaattgggaatcgttagatctcactggttcaatgtgtgagccgggctttaaaaacattttgatttaacccatacacacatctctctgttccacgattctcttcctcagcctccacgtcgtctctaaactcagcaaaaaccaatg

SEQ ID NO: 1785 - DNA, 3000 bp, Unknown
  misc_feature (1)..( 3000): cDNA_ID_2105722_gDNA_ID_1620448_Annot_ID_157381 3000 nt of promoter + ATG
aatagatatccatttgataaattaataatctacaaaaaaaatttagcatattatgagaaaatatcacatatcctgcaattaatactttaaggatattagaattcatctgataaatgtgatgtttatgttggaaagtaacaaattatagagaaaaattgctcaaactgtaatagttaaaataaaaatggataaaaccgtcttaattattctcttatgtttgcatggatctctatttcttatggctttgtctcgttatcgactatgtcaagtgatggtcattgcatttgtgttacatgtcgagacaacttatggtttttgtttaataatatatatggcagctgaaagactaggaatagcagaaacaataccagcatatttaaatccaaagctcaaaaatgaagatcttctcaagggtgtgaattttgcttcaggtggttctggttacgatccgttaacagcaaaactagtggtatttttaatatcgtttaaactttcttaataaattggagttttgattcttattttttagtcatctttttattgatatgtttttttttgttctgcgatgctccagaaagtggtatcgttatcagatcaactaaaaaatttccaagaatataaaaataaattaaaggtgattgttggcgaagagaaagctaatttcttggtgaaaaatagtctttatcttgtggtagccagcagtaatgatattgctcatacctatacggcacgctccatcaaatataacaaaacttcatatgctgattatttggctgattctgcttctaaatttgtcagtgtaagtacaaaatttgattatgttatatacctcatttatcttgcattttcaagttttttgatttttgattttatttataaaagtacaaatttgttgttctcagtcaatttaaccataaaaatgatatattgatcattcatagcaataacagcatttcaatcaaatttggattcattgtaatgtttacatcatataggcattgtatggacttggagctcgaagaatcggagtatttagtgcagtaccggttggatgtgtaccagcagctagaacacttcgtggaaaattgaagcgaagatgctcagaaaaacttaacgaagtggctcgcaactttaacgcgaagatatctccaacattggaagctttaggaaaagagttgccagatagcagagttgtgttaattgacgtgtgtgacactcttaatgacatgatagaaaaccctaaaaactacggtaagtatgaatacacatccctttttctcataataatttcatcaagttataaccgtaaagtaaaatagttgatcatttatgttgtgatacgcaagtacaaatgataattagtattttgaggattttgttttggtcccacatcagttaaatttaataagagactttgcaaattattatatgtgagacgtcacaaattattatatgtatataataaagtgtttagatggaaattttcaaaccaatgggaactacaaacaaattaacttacctcgtacaatagcacgggtcatcacttagttatagagaataagaacgaaagtcataataaccataatactaatataacttaatgcatatttataaaatatattatacacttagaattgatctaaatatgcatggatatttagtcattcaagatattgttttatggatccatgaatttaaatgttggatctagactcgcatacctccaatatcttggccatcgataattagtaccaaaaactaactttattacctactagttactatctttaacttctttcttttttattataggatttgaagtatcaaacagaggatgctgtggaaccggattagtcgaagtactatttttatgcaacaaaatcaatccttttacatgcaaaaattcatcttcgtatattttttgggatagttaccatccaacagaaaaagcttaccaaataatagttgataagttgttaggaaattacattacgaaactagtctaattctatatttttataatatactaagtaatattttttcctatgtaaaaacgtaaaaaaaaaaaatattttttcaataataagaaatagtatttaaatgttcatttagattaaatagattcaatatagtttgttaaaaatgatttatcaattaaaaaaacaggttatattggattagactagtttcgtaatggctaaaaaaaagaataaaacatacgtacgagaacaagacgaagaaatagaaggcatccactacacaattgtacatgtcgacaacaaagtcaacgacataccgtttgagacaccgtggctttcgcttttctctcaaaaaaaaaaaatcaatcatgtttttttggtttttatgtttcgacagtatttggtaggttgttttaatattattaaaaacatacttattatttgtgtgaatatgtttaaaagcaaacttggttgtttggaattgtaatatcaaatgtcaagatccatcaactttcataaaaattcgttaatttgtacgtgaacaattaataaatctctcataccacacatattattgctctagtcaatttgtttcctttgttttcagtcattttcaggaatcaaatattagcaatgctttaactctactccactgcaaccaaattggttgtttagagttatcaaatgacaaaactcgttaaaaactcgttaatatctattaaccaataaatctctagtgaacttttttcctttgttttgttctgtcattttcaggaatctaaattattaagtcttcaactctactccaccacaaccaaaattaaacgagtcttgtctacatgacctaatttgcttaacaaccttatcatctcactaacaactccatctcccaaaatttaaactcctttaactatgcctataaaaccttgatccattcttcatcacataagcaacccaacaaattcattctaaatacatttcttttcactcaagaaattaaaatttcgaaaagtttgttaaa

SEQ ID NO: 1786 - DNA, 3000 bp, Unknown
  misc_feature (1)..( 3000): cDNA_ID_3064244_gDNA_ID_1620448_Annot_ID_157380 3000 nt of promoter + ATG
atatgaatgagaatttgtttggtaaaactgtttgagttattcttccatcaatttttttaactattgaaaatatttaaataactcatgaaaaaattagaagaatattatggaaatcttcatgttaaaattatataaactaacatgttataaactattctataattttaaaaatcgtaaagatttccaaatttcataagtttgaaatcaatttaatgcataaaccataaaagcccctaaatattttattaaaatgtatttttatacaagagataatttcaaagtcaaaataatttttttttttaaagtattttcgcaaacagccttacgaataatctaaaaggctctggaagtaaatcgtggacacagcttaaaccctaagaaccctttcgttgaataaacaaaaaatcaaacgccttcaaaaatcaaaatctcgatccagatctcatcttccgccacaagctatgaggagagtcaccggacttgccgcgcgcacaatctcatcctccgtcgccatcaattcacgtctcactcaatccatggcgattacaaccatttcatcctccgaacctatctcccgaagattcggtggtcttccagagattaaaactccgtctttcgccggcggagtcgctggggttgtgttcttctctgccgctgctgtatcgtctcttggtcaagaagttcacgctaaggaaatggctcagaagtttaatcctaaagaagttgttctgtatcagtacgaagcttgccctttctgtaacaaggttaaaggtaatcttatcacactaatctaaaaattgctggatctgatcagaatttgatcttctactcatcgattcttgctttagacttaggttgaattcagtaggattgacttgaatgtgatggatttgaatggagaatggttctcattgtctatgattcagtaagagattggtgattgaatgaggtatctattgttgctggtatgatatttgggcgattgtttattttgtttgtagcgtttttggattacaacaagattccatacaaggttgttgaagtgaatcctatcagtaagaaagaaatcaaatggtctgattataagaaggtgcctattcttactgtagatggtgaacaaatggttgattcttcaggtttgtctcatgttctgtttctgacttgtatttttctcttcagatcaaaaatgtgtattagcttagttgagtaatcttttgttttatggtgcagtgataatcgatagcttattccaaaagatgcaccctgaaatttccaagtccgaagatgatgaagagactaaatggcgcaagtacgattgattttaatttattgactactgatattgagttcgagatttgtgtcactacaggaccttaggctgataatgtatctatgtgttgtaggtgggtggacaaccaccttgtgcatcttttgtcaccaaacatatacaggaatacttcagaggctcttgagtcctttgaatatatcaccacacatggtatggttatcgtcgatttagcttcttacttttttccctttctttatactcattttgtttttataacctttggaagatatgtatgggttaacattttaactagatgagttcatgggagtcccagttttgggaacctttatacgtcattacacatctagagaaagcttctggaggaggatagtcttcttgtctaagtcatagtgttgtgctctgtgcagggaatttcagtttcactgaaagattagtggcaaagtatgcaggagcaacggcaatgtactttgtatcaaagaaattgaagaagaaatataacattacagatgaacgtgcggctctttacgatgctgcagagacatgggtcgatgccttgaaagagcgtccataccttggtatgtccaacttctaatctaatactgaatctagtccctgctttctggattggtccatgattgtagtttctaatatcaggtgggtcaaaaccaaacttgggcgatctcgctgtattcggtgttctgaggccaataaggtaccttcgatcgggtaaggatatggtggacaacacacgcataggtgaatggtattctcgaatggagaacacggtcggagaaccttctaggatcaaagaataaaggatcattggtcgtatctcttagtggaaatatgaattgcataatgaatcgctgatttcacgggcgtaacaatattttaagctttaggactagagaaggaaacaaagaaactaaaggaaataaacgtctcttctttgtgaatgaaggattttgaatactgtgagtctgtgacatgcttggtttggtcactgttgctattactaaaaagtcgtttctttggtttctttcacattttaaaagattcattgatcagcttgttctctgttttctattgactgatgtttatatgaaaggacaacaactcaggtggtccgattggtaatcgtatggtcgaacaatgataatatattggtggaatgaataaagttttgcaattcttttcttagaaaaatgagtttgaatggtttatatacatatgtatgacccaatgatagttgtaacgtggattttctttgtggaaagatattatctacatatgtatgatagcaacaattttggcgtctctaattttgaaccaacctatgagaaaattttatagattagtacatcatcgttatgaaattgaatgtcaaacacaagcattaggccaaataatcggcacaattagacggacaggcatgcaattagtgaacatgtggtagtgccaaaactttggcattctattttcgaaaaatctcctcactatataaacatgtttcatcattcaatctcctttgatttttgctcacaataaaataaaataaaaagaaaaaaaaacaaaaaaaaaacaaaaaaagaaaaagaaaaaagaatctataaatatactgttcaattttttttattttttttttattaatatcccaacggtcgtggggaagaaaatattctgattttgta

SEQ ID NO: 1787 - DNA, 3000 bp, Unknown
  misc_feature (1)..( 3000): cDNA_ID_3064259_gDNA_ID_1620448_Annot_ID_157370 3000 nt of promoter + ATG
catcatcgatcttttgcaactgtaagacaaggggccttcgagtaacaatgcctacaaatagttaccgcaaatgcatattgtcattactcaaggaaataagcaatttcataattaaaactaagtaagaagtgttaacactgtatttaccagatccacggggtaaaaagtcctttcccacgatgctctccaggactgaagacttccctgagctctgtcaacacaataaggatacaacataaacttaatgccacatagaattatcaaagtacagaaacccctctccacaacaatcgtagcttaaattaaatggttcaagaccaactagtgaaaaaatatccaagtcaaagccaagtcaacattcctcaataccaattgcttgcaaagctagttcatagtagaagctattaaactataattcctcacgatccggatgttgataagcaaaaacaacgaagtttagggcaaatttatccgaatacctcagctcaatatcaattccgaatcgcaaaaaaaacgaacgaatcgtgagatagatcgtcaagcatataatggaaggggaaggagatcgagatgcaaacctgaccaccaacgacggcgatcgcaggcaaggaatcccaaagagtaggtaaagcgctggagtctccatggtctcctaaagccgtgcaagctctctgtatcttgttaaccagagagatcagattttccatcgtcctctactcctcgtttccccaatatcaaatgagaagcccaaaatacagtagctgctacaacagatcggcgagatctgatacctccgccggtaaaatttattgcggaaggagtagatctgcgatgcgacggtgagctatggaaccagagaaatagagatagagagagatgagtttttgaatttgagtcgatgaagaatttttgcttgctagtgttgggaaaaagtaaaggggaagaaagcggtttatataaaagccaatacagggtcttttcttttccaaagaaaatttgaaacggcatggtgtttatttcgagaattcaaagacgacgaggagttgaccaaaaacaaaataaaaacgacgaggtgtgtcgtatatattcaaccaatcccttaatattccacatctctctaaccaggtaaagtaatgataatactattgcatgcatgaccaaccatataaataaatataacaaggtcgattttcttgtaaaagaatgtaacgagttaaaattcgaataaaaaaactatcacttattagtagagtaaagtgatttcatgtggaccacgaacatcctcattacgattgcagttcaaacggtccatagattgaggattcaaaaaaaagataagagacgttaaggattatgattgtttattcaaaaggatgacactaaacaacaaaataactgtagttttgaaaatttgaatgtataaaataaagatcttttctagaacaaacccactaaatctgactagtaatgtcacatcgattttagatagcgtttgcattttggcaaatactatgtttggttggtgagatccaaacgctttttagaaatgtataaaacatagcactaacacatttttaaaccttatgtattgtttacgcaaatacacgttatttattttccagctaagtggtgaaaaaataaaccggttcacatttttttttttaaatgttactaatgttgtgtttgtctacacaatttttttaaaaaatgttactaatgttgtttgagacaaacacaacgtgtaactttgtatcctacatactcttgtatcaattgttagattttatgatgttcatacgttaacaaatatgtatcatgtgaccaacttctatccctcaaattagaattttgaagttagtgaaaacgtgatgtaaaataggtttaacatatgctttatgggaatatgttgagactaatatgaaatacaaatgaggttggagtgagacatgctatgtaatatatttaggtatgtagactgtatgtctccgtagcagctgcatgaatttagcttccaaaagcacatatacttgcacgggtcacacggtttatttgcagtgtaactttttcgaattgcgattcttgaacaaaatctctaagagtactcttctactactttctgatgtttttcgtcatatgtgagtggaagatgttggtttagtgtcgggttgtgtagagaggacaagagttagaccatagacactcaaacagtcaaaccaatctattataaatagataatatctctccggtttagtatttaagctttctttgtataccatttatgtttaatgaaggtttcgcgcttgttgatacaatctgaacgagatctaaagaaaccgtaaaaacatttagaaataatacatctccaaaaaaaagtcattcggaaaaacattttatgatttaaattgatggataatttgttctcaacttatacatccaatttccgaccaattcaaaacgaaattcatcaatactttaatttcttccttttttttttttttttttttttgtcaaccgatataaatttgaactcaaaagatccaatcccgagagatattgtttacatacgtgacatgatgcggtacggtacgaatctttcgtgccaacttatccgcttttacatttgcactacgagaaattaaagataaagagaaatttatgaattcttccctatcactctacaactccttcaaatacactggaaacgccggccattcggttggaatcggtgaattggtgaaatttttgtttctagaaatcaactaatccgtcaaagatggtttattcccttaatgatgaaggaaaatgggttctcttgttgctaataaaataatggtatttattttgtttcttagaaagaaaaaaaagactaatttaatttggttggtcacacacaaccgttttcatcggaagaagaacaagttggattgattttgctttggatctcacatctgagatcagattaatctctctgtgaagtcgaagaacgaaaccctagttccc

SEQ ID NO: 1788 - DNA, 3000 bp, Unknown
  misc_feature (1)..( 3000): cDNA_ID_3064269_gDNA_ID_1620448_Annot_ID_157361 3000 nt of promoter + ATG
tcctattttaatttaatgcttctttttaaaaaaattgtagaaaataaaaagcccagaaagagcccaaagaacgcagcagagaaaaaaaaaacaaagaagaaagaaaacttgctcaacgacgattcatcaatcatcatctccgatcttcttccaaatccctccggtgaaaaagacgatgtacgtaagagcacttccgacgacggatgtgaatcggaacacagagtggttcacatatcctggtgtttggactacttatattctcatcctcttcttctcttggctcctcgttctctccgtcttccattgttctcctggcatcgcttggaccattgttcatctcgctcatttcaccgtattattcccgatctcctccgatccaatttcgaaattgttggtttctagatttgaatttttgagtttttttgttttctaggtcacgtatcattccttccattggaagaagggaacaccatttggagatgatcaaggagtctataatagattgacttggtgggaacagattgataatggcaagcagcttacacgtaatcgcaaatttctcaccgttgttcctgttgtcttgtaagttccttctctcatatctcattaggattttgttttgcatcatcatctcttgttgatcttgttcagtatcgaaaaattgaatgccttaccttattttctatgattgtttctgtatttggtgtaatttttgcttaagttatgttttagagatacattgatcttcgtttccctacctacttgttctttatcttattgtagctcattttacatctggttatatagagatgctagtcaatgagcttaattacaattctattcctaggtgaagtggttgttttgacaatttgatttgcaattattactacacagaatacattttgacatgacaatcagatacacaagagtcaagacactaccgttcttctcattttgatttctgtttgttgactagtgcttcaaatctgttcactgattagggttggacctaagtttcctactatgattaaactcgcttgattattaaggtcttttagctagtgctcaagagccttggatttagatttagatttagacattcgtacaagacataaggtctgttatgagtttgctgaatctctcttaaaagaagcactactagattatgtgtagtggaatacctcaattgtgttgtgtgtgacgaatatgtaatcaatgattggatctttgtgacataaaagtctgaccaaactttgtatgtaggtacttgatagcctctcacacaacagactatcagcacccgatgctctttctcaacacactggctgtatttgtcatggtggttgcgaaattcccgcacatgcacaaggtccgcatatttggaatcaatggagaccaatgaaaaaacttgagaaaacaaagaaaaaggtctgtgtataatgcgaatcagagtatttggaatgtggaatccaacaacaaatgccatcatcatcattcaacatgtctgtactatacagacattgaatcccttaaccggagaaaatgtgttatttggtcacatcccatcatcgcatattcaaacctttctactctttgtttggggcttctaatcaattcatatttgatctcttttgtggttctcttagtttcttatttgtataatcccaaaactggttacaacagaaagttgtttagcgagcaatctagggtttgaatgaatagttggggaagatttatttatatataccgtttttgatatatatatatatatcatctttataactaaatccgatgattttgttgttgttggtgaattacgttagtgacaagggtaaagacattttagcacacgtgaggtaatgtattgagctcaaaagggaaattgacaaaatcgtgttcccaccacctgaaaacaatattttttttttatattcaaatttactgttagtgtgtaaatgaataattagatgacattaaaccaaattaaaaacaatagggaatttttaaaaacaatttgtccatttgtaccctgagttatcaccttgttcctaattgtttagtgaataggtgggtaacatatatcgatattgactcacacaaaaaagactagaatttgttcatctatcaataggcaaataactaaaacaaacaatgaccaaatcaaaacgtggaaaaacaaaaaaaaataatgggaaagatcaatttttcttaaattaagatgtagtataatgtcgtttatctcaaatcaagagaagaaaagtaaaaatacattaaagaaagacaaatcaacatatgattattgaaataaaagtgggattagaatattcatgttgactaagtaagtgcaaacaaatgtttgactatttcaaaattagttttttaataaataaaaaaacaagagagaagaaaaagacaaaagaagaaggaaaggatctttgttctgttttatttgtttctctcttcctctcttcttcttcttcttcttcgtacaatcgaagaaacaaaacctctcaatttccgaatatctcgctcttaaaccctctccaatatctttctttcaaaacccaaccttttgtttataaaaaccttcgcaaggatttgcgactttaagaaacgtgacccgaatcgtcgcaatgtttggataagagttttaaactcattcgtttcgatgcaatcattttgaccagacaaagactatttataagaaagagcagaattttgattcaaacccggtttgattttggtgaagatgtaagtaaatctctcataaactcttcgttttctctgttgggttctttgctttacccttaagtaatctcctttttgccgatggtattgatttgccatgagtttatcttactacttccttttggtgttacgtgtggattagttttattcgaaccatggttgcaaatttctgtcctttttcagcaattgtgtccgatatttgactttgtgaattctgacgaaatctgtgtgtttttgatcagaagctgtgag

SEQ ID NO: 1789 - DNA, 3000 bp, Unknown
  misc_feature (1)..( 3000): cDNA_ID_2105165_gDNA_ID_1620448_Annot_ID_157363 3000 nt of promoter + ATG
cattaattttccaactacaaatctttcttccgattttttcttgacttgtgtatttaataattgatggaatcattaataacttataaattaatttcttaaaaagcattttgataattgaaaagtgtgctctaaatacaatattccgggtcattatgttttgatttgtcgactgcttttttcaatttttaaatcctcgtaataaatttaatatattatttttcagtctttaatgaaatgtaatttggtattattagttactaacatttaaaagaaaataattggcttgtaaagaacgtatggaatgtgtcgagtatgtgtgtatagtgtctccacttggatctttcttacttactccattatcttcttctctctctttccctcatctcattaatggcgagctctacatctttagcgatagttcttcatcaatcttccaatcatgacgaactcttcatgaagcaaactcttcaattctcagaaaccctcaaggtttgtatgatcgttctctctatctctttctctcctcaaacatagattgatcaataggcaattgtgattttttgtcttcattcaagattcatcttctgttctgttttggtgttttaaggatttaaagaatctgcggaaacagttatactcagcagctgagtacttcgaaacatcttatggcaaagcagaacacaaagaaacgtaatcttacttgtctttcttgatactaacgatagtatttttgaactagtccatgtgtttgttgtggcgagtgattttgatgaatgattgcagagtgatagagacgttgaaagagtatgcagcaaaggcagtagtgaacacagtggatcatcttggttctgtctctgacaaattcaactcttttctctctgataactcaactcatttctccaccactcatcttcgtttatcttctcttgaacaagtaaacactcgaaatcttgaatcatgaatactcttgaaactgtcttacatttggtatgtgttgttgttgtagaggatgagactatgcagagattacatggggaagagtggcactcatcagcatttgcttctatttcaatatcctcgccatcataagcgttacttcttccctcgtatacctttttaacctcttttccccctcacacaattgatccgttcaatcataatccgcccttatatcgatggttttttttcacagaacaaggaagaggcacaagtttctctgcaggagatgactcacaccggttcacgagtggtaactaaatccgtttatctatatctgattgtttagtttgcttctgtttatacgatatctgaatctttctcctgatctgctgcttgaaagctgttcgatcaacaatactagaaaacctcccaaatactgcaaggtataatcttgattctcttcttcttcttcttgttttgttgtttgtaatacgattggtttgtgaaatgcaggaaagctaacaagacaggaagcttctcttttgcacctatcgtacacaacaacatcaacaacagaacaccaagtacttactactacaataactaagccgccatctttctttacttgactttaatcagaataagttcaatcaattaagtgtgtgtgtgtgtaatgttgcagataagagatcaaactctcctatgagattccctctcttacgttcaggatctctactgaaacgttcaagctccccaagccaaccaaagaaaccggtatatatagataatagcacttacaaagattattttacttcaaaatttcaacatctttggttagttaattacttttgctgctatcttttgtgtattgtaaaagcccttagcgttaccggaacctcaaagagctatatctgtgtcgagaaatacagagatagtggagataaagcaatcttcatcgcgaaaagggaagaagattctgatgttcaaggcattgatgagtatgagcaagtcgagaaactaaaatctctccttgtatttgataaatgaaaagatttgtacaaaactaatgtgaaataagagagagagatgcttattttgtcgatattagtacttttctttcagatgctttagttgcaattcaacagaaaccatacgaaaactattttcactgttagtttcgtcactttcttctacacaccgctctttttatctttgacttaagatagtcaaaatcacacgttaaggtaatctctctttatttctttaaggttacatccaaaaatatattagtacgagccatcaatatttttctaatagtgcaaataattatttcataatttcgaagttaattagtgaaaaaatttctttgttaacggtgatggttaggggtggacatccgggtacgcagatcggattcgagtaaaacctgattgggtacgagtcattcggatagataaatttatgatccaataaaataaatctaaaatattggttcggttttggttcggatcaattggctataattttcaggttcttttttggaatcgaaacccgaaatttcaagtaaatacttggattttcggattaaatttgagtatggagtaaaatttatatattcgaataaaatatttagatacgatcaggttcggattcgtattcgatttcaaatccaatttttcgggtcagttctgagtcggttactcaggttccggttcttttccactcctaatgatgtaatagaagaagactggcccaacaaaagctcattgtctaattaagaagaagaaacgaagtaaccaacggccacgattactccaacacaagaccaaatctgattggttgacattatagatcgtcgtaagataattggtccacgtcatctccgatgacatagttaaatttcttcgtcttccataaaaagcgactacttcaccatcaccttcgggcactggacctatttaagcatcctaacttcttcttcaaagcttaaaaaccagaaaacaaaaggaagctctctgttcaaatcaaaaagagagatcgtacgcaaaagtttccgatatg

SEQ ID NO: 1790 - DNA, 3000 bp, Unknown
  misc_feature (1)..( 3000): cDNA_ID_2143893_gDNA_ID_1620448_Annot_ID_157369 3000 nt of promoter + ATG
gttccagttttcttaatgtacgacttatcctcagcctcacaaagaaggttcaaagctttcaagacaacaactcccaacatgaagaaatggattgcgaaaacagtgagacgtttcttatagagaacgtagatccacgtggcggcgagagagaaatagataacagagaataagaaatagaccttaggaagaacagttcttccagcagagagataatcacgacctccctttttaccttcaaggttatacatagcggatctaacatccatactgattttgacctgttggagacaattagcgaagacgagagagtactgatccgcatcgttctcggtgaatacggtggagaatctgctcttatctcctcccttgagattgttgaaggtgaacacatgcttaacgagatctgattgtagagcgcacgtgatctcttcttcttcaagctgttggatcacatgaacccaagcgtctctagtgcagagaaagaagcccactttggagagatcgagatcgggattgctgttggaaagccagatcttggaagcgtcaagctcaagacgaccgctgtgagtgaaaccgaattcgtctaaagggatgattggacgatcatcggatcggatctctgatttacgaatctcagccgaagctatggagatggagatcaagagaaggataaggatcgatgagaagcgtgaagagagatccatgggaactagggtttcgttcttcgacttcacagagagattaatctgatctcagatgtgagatccaaagcaaaatcaatccaacttgttcttcttccgatgaaaacggttgtgtgtgaccaaccaaattaaattagtcttttttttctttctaagaaacaaaataaataccattattttattagcaacaagagaacccattttccttcatcattaagggaataaaccatctttgacggattagttgatttctagaaacaaaaatttcaccaattcaccgattccaaccgaatggccggcgtttccagtgtatttgaaggagttgtagagtgatagggaagaattcataaatttctctttatctttaatttctcgtagtgcaaatgtaaaagcggataagttggcacgaaagattcgtaccgtaccgcatcatgtcacgtatgtaaacaatatctctcgggattggatcttttgagttcaaatttatatcggttgacaaaaaaaaaaaaaaaaaaaaaaggaagaaattaaagtattgatgaatttcgttttgaattggtcggaaattggatgtataagttgagaacaaattatccatcaatttaaatcataaaatgtttttccgaatgacttttttttggagatgtattatttctaaatgtttttacggtttctttagatctcgttcagattgtatcaacaagcgcgaaaccttcattaaacataaatggtatacaaagaaagcttaaatactaaaccggagagatattatctatttataatagattggtttgactgtttgagtgtctatggtctaactcttgtcctctctacacaacccgacactaaaccaacatcttccactcacatatgacgaaaaacatcagaaagtagtagaagagtactcttagagattttgttcaagaatcgcaattcgaaaaagttacactgcaaataaaccgtgtgacccgtgcaagtatatgtgcttttggaagctaaattcatgcagctgctacggagacatacagtctacatacctaaatatattacatagcatgtctcactccaacctcatttgtatttcatattagtctcaacatattcccataaagcatatgttaaacctattttacatcacgttttcactaacttcaaaattctaatttgagggatagaagttggtcacatgatacatatttgttaacgtatgaacatcataaaatctaacaattgatacaagagtatgtaggatacaaagttacacgttgtgtttgtctcaaacaacattagtaacattttttaaaaaaattgtgtagacaaacacaacattagtaacatttaaaaaaaaaaatgtgaaccggtttattttttcaccacttagctggaaaataaataacgtgtatttgcgtaaacaatacataaggtttaaaaatgtgttagtgctatgttttatacatttctaaaaagcgtttggatctcaccaaccaaacatagtatttgccaaaatgcaaacgctatctaaaatcgatgtgacattactagtcagatttagtgggtttgttctagaaaagatctttattttatacattcaaattttcaaaactacagttattttgttgtttagtgtcatccttttgaataaacaatcataatccttaacgtctcttatcttttttttgaatcctcaatctatggaccgtttgaactgcaatcgtaatgaggatgttcgtggtccacatgaaatcactttactctactaataagtgatagtttttttattcgaattttaactcgttacattcttttacaagaaaatcgaccttgttatatttatttatatggttggtcatgcatgcaatagtattatcattactttacctggttagagagatgtggaatattaagggattggttgaatatatacgacacacctcgtcgtttttattttgtttttggtcaactcctcgtcgtctttgaattctcgaaataaacaccatgccgtttcaaattttctttggaaaagaaaagaccctgtattggcttttatataaaccgctttcttcccctttactttttcccaacactagcaagcaaaaattcttcatcgactcaaattcaaaaactcatctctctctatctctatttctctggttccatagctcaccgtcgcatcgcagatctactccttccgcaataaattttaccggcggaggtatcagatctcgccgatctgttgtagcagctactgtattttgggcttctcatttgatattggggaaacgaggagtagaggacgatg

SEQ ID NO: 1791 - DNA, 3000 bp, Unknown
  misc_feature (1)..( 3000): cDNA_ID_1009643_gDNA_ID_1620448_Annot_ID_157366 3000 nt of promoter + ATG
aaccaagatgatccactgtgttcactactgcctttgctgcatactctttcaacgtctctatcactctgcaatcattcatcaaaatcactcgccacaacaaacacatggactagttcaaaaatactatcgttagtatcaagaaagacaagtaagattacgtttctttgtgttctgctttgccataagatgtttcgaagtactcagctgctgagtataactgtttccgcagattctttaaatccttaaaacaccaaaacagaacagaagatgaatcttgaatgaagacaaaaaatcacaattgcctattgatcaatctatgtttgaggagagaaagagatagagagaacgatcatacaaaccttgagggtttctgagaattgaagagtttgcttcatgaagagttcgtcatgattggaagattgatgaagaactatcgctaaagatgtagagctcgccattaatgagatgagggaaagagagagaagaagataatggagtaagtaagaaagatccaagtggagacactatacacacatactcgacacattccatacgttctttacaagccaattattttcttttaaatgttagtaactaataataccaaattacatttcattaaagactgaaaaataatatattaaatttattacgaggatttaaaaattgaaaaaagcagtcgacaaatcaaaacataatgacccggaatattgtatttagagcacacttttcaattatcaaaatgctttttaagaaattaatttataagttattaatgattccatcaattattaaatacacaagtcaagaaaaaatcggaagaaagatttgtagttggaaaattaatggagcagaaagtagagaagaagaattatttaacattttgttaattaaagagaaaacaacttctcaacaattttgatattcttgtccctctttcttgaataaaaaaaataatacacataatatatttacaagcagtgggacacaagaatcaaaattcaatcacggactcatttaatggagttgcctttatgagccagaaatcattcatgtgaccataacatataagttgcattataaccagacgacaaaagaaagaaaggacagagctaaattatctgatgaatcaaatcaactgtttgggaaaatactagtgatgactgaggcgtgtaagtcaaacaatggtaacacttgaatgggatttacaagatacgctcgagctctctggtgtaactgagagtctggttgatgagttgaagtgacggtatctccttgcacggtgcggtttctctggttttttggaagacaactaacccgtctttaacttcccactccgggtgctcctcgttcacatatgttaacagttgttgatcagacgagaagagtaacatcttacaaccttcactgattgagagatgatcgtatgctttctcactgcatccagctatttcatctctacagataaacaatgatgttttaagtcacggcaatgagctaaagaagagaaagggtcaaatgacaaatgaagcctatttacctaatggtttttgccaagagatccatgaaatagacgtaagtctcatcaggtgcggtttgtctagcactcaacacacggttataagcaccttccatgaaggattgctcgagctccaccgcatgcttgatgcaaggattctccaaggttgcagatgaaagtaatcccagttctgtgtggaattcagctattctgttctgaacaagcagtctcagtaggttcaaccccatgattagattctcttgcggagatggcggaatacgattcctggtacatagaaaaaacagagcacacgtaagcaaaagcaatgcattcagtgagagtgatataagataatgatcaaacaactctaaatcaattggttcaacttaggctctctactcattaataaatcaaatctatattaaactttgacattgatatattcaaggttttatctattgatccgcattgaattagggctaaaaggaaacagtaccttaagctgagacaagagactggaacaggtatcgaaatcttttattataaacgcagctttaaacctctcgaactgctgtgaaacctccattagttgcggatccatctctttctctatgaatttttctctgtcaaactggcttcaggaagaagaagaattgaagaataagattgccttttctaattgggccgtacatgggcctgttgaatcagtaattgaatgggcttaaagtggggaatgtaacccaatagaagcttccggggaattttaatacgtgttatacagagtcgaaaacttgatgctgacacactcactgtctttctcgtcaacgcgtttttggtgtttggtccacaatccttagcctctaagacaaatcaacccaaattttcaaaacataaaattaattagttttgaaaaaaacaatattttaaaattagatatttgttactatcggcacaaataaatctcctctcaaaagtctgccacgtcataattgcaattgttccgcgtctctgctgctacatgctcattcactcgcaaatcgcaattttcttcttaaccaaatttttatacaaaaaaaaaagctcagacagaagtactaaatggtaaatttgacataattaattggtgtgtaattttataaatacagaagtacttgtgtcttgtatttattagtattccttatttaataaattacttttcacttaatcatccaactttgtcagattcacacgcaaccttgaaaaaataaaatagaatggtattgtgactttcgtggaaatttctacttagatgacacagttgctccaattaaaagcttacaactttttcttcatctttctttatatttctcacccatttttcaccaatttctctccacttaaaaccaaccccaattctcaccaaaaatcgcaaaaaagatttcaactttcgataaacccagatcgaaaaatcagatttttccagatcaatcagagagttagag

SEQ ID NO: 1792 - DNA, 3000 bp, Unknown
  misc_feature (1)..( 3000): cDNA_ID_3064275_gDNA_ID_1620448_Annot_ID_157358 3000 nt of promoter + ATG
tcaaatatgaattgattagaagccccaaacaaagagtagaaaggtttgaatatgcgatgatgggatgtgaccaaataacacattttctccggttaagggattcaatgtctgtatagtacagacatgttgaatgatgatgatggcatttgttgttggattccacattccaaatactctgattcgcattatacacagacctttttctttgttttctcaagttttttcattggtctccattgattccaaatatgcggaccttgtgcatgtgcgggaatttcgcaaccaccatgacaaatacagccagtgtgttgagaaagagcatcgggtgctgatagtctgttgtgtgagaggctatcaagtacctacatacaaagtttggtcagacttttatgtcacaaagatccaatcattgattacatattcgtcacacacaacacaattgaggtattccactacacataatctagtagtgcttcttttaagagagattcagcaaactcataacagaccttatgtcttgtacgaatgtctaaatctaaatctaaatccaaggctcttgagcactagctaaaagaccttaataatcaagcgagtttaatcatagtaggaaacttaggtccaaccctaatcagtgaacagatttgaagcactagtcaacaaacagaaatcaaaatgagaagaacggtagtgtcttgactcttgtgtatctgattgtcatgtcaaaatgtattctgtgtagtaataattgcaaatcaaattgtcaaaacaaccacttcacctaggaatagaattgtaattaagctcattgactagcatctctatataaccagatgtaaaatgagctacaataagataaagaacaagtaggtagggaaacgaagatcaatgtatctctaaaacataacttaagcaaaaattacaccaaatacagaaacaatcatagaaaataaggtaaggcattcaatttttcgatactgaacaagatcaacaagagatgatgatgcaaaacaaaatcctaatgagatatgagagaaggaacttacaagacaacaggaacaacggtgagaaatttgcgattacgtgtaagctgcttgccattatcaatctgttcccaccaagtcaatctattatagactccttgatcatctccaaatggtgttcccttcttccaatggaaggaatgatacgtgacctagaaaacaaaaaaactcaaaaattcaaatctagaaaccaacaatttcgaaattggatcggaggagatcgggaataatacggtgaaatgagcgagatgaacaatggtccaagcgatgccaggagaacaatggaagacggagagaacgaggagccaagagaagaagaggatgagaatataagtagtccaaacaccaggatatgtgaaccactctgtgttccgattcacatccgtcgtcggaagtgctcttacgtacatcgtctttttcaccggagggatttggaagaagatcggagatgatgattgatgaatcgtcgttgagcaagttttctttcttctttgttttttttttctctgctgcgttctttgggctctttctgggctttttattttctacaatttttttaaaaagaagcattaaattaaaataggaaggtggttgggtggctcaccgatcttagcctaaaacaatgattatcagtaactctgtctcaagactctcaacgcgtcactcgataaaccacgacgactcatatttttaatttattggacttttcttgtcagcttacatagaggcccattacaaaacacaccggttttccgacccgacccgtaccttttcatccgataatttaatttacattttcaaaatatgttctgaagttaattcttgaccatattagtaagagttatttcattttatttttgaacaaattttagctgccaaatttcgaaatccttttttttttgctaccaaattttccatccagtgcttccgtgaaaaatatttcgaataaaataccattttaaaaaacatcttcgaataaatatctaaaattatcagttttttgttcttctcatattttcaacttgatgaggattagatttagattcacctaatgattacaataaacacgattaagcctcgttggttttttaagacaaacttacaatttttttgttttttcttttcttcatcacacactctgtctcaccaacttattcaataaaagcaattggacttttaacacaaaatatattattcaacgacaaaatgatttcgtattaatgctatactatccaaggttcattaaatttgaactagctatatctttttattaaacttatagaatttagattccacaatttcttgatttccatgcacagaaaaaaaactttaaatagattactattccctctaattaaaatataagatgttataaaagtttatcttttaaatattaaaaaatattttgttagtttctatgaaaattaaatgtatttgataatttgtgatcatttatattctgcagttttttcttatgattagttaaaatttttaattctataaataatattttttagaaagaatgatcttaatatgtgtgattgttttaaacattttatattttgaaacaaaggaaataacatcgtatttctgaggatttacataatgttttttttttggtgcacctagcataatgttttattagtagaaattattcataacctgaaacatgtaattgcataaatggcctaaagtcagctgaaataaaatgaaaacagaggatacataattagtagaataatctcaaatataagagaaagtgcgttagttgataaagacagataatttgactttccgatttatttggccgccaacctttttttgttttgttcttcctaaattccctttctccgaaattcctttcattgatttcatcatcatcatcatccttcgttttttctctatcgatctagcagattctttcggggaccaaaatcaaaatcatggtggatcatcaatg

SEQ ID NO: 1793 - DNA, 3000 bp, Unknown
  misc_feature (1)..( 3000): cDNA_ID_3064319_gDNA_ID_1620449_Annot_ID_157409 3000 nt of promoter + ATG
cactagagaatactaaataccctaaatggatctcagtcacattatccattgaatattggttataaccgaacagaatatccataagtacccgaatggaaccaaaattatttggtcaattcctatacaaaactacatctaaacccaatacattttttcccaacctctaacccaataaattttgttaattttcaaatattttgagtcattacaattttgtcaaaaaagtctcggatattttgatgttttgtttttttgggtattttggataaaataatcgaaagtgaaccaaactgatatctattggagtggaaccaaatacaacctagtatttatgtattaaataattatgataatatattcaaataactgaattattatataaattttaccaaaacatgtgatattttaacgaaaaatgcgatactttaacaaaaatatatgacaaaaagacacgaccttaaaacaaaccgtaaatatcttaacaaaaatttgtgaaaaaaaaacacgactgtttagaagtgtaaaagacatttattgttattgttattagattccaagaagctttggttagatcatgaatttgaagaatttctttcatattaaaatgatgtatacgtagaaatagtttagagagtaaagaatttgaaaccattttccagattaaatttttgaattcatcatgaaacatataatttgtgtgaataaacaaaaatatgagaactatttatgaagaaggacaaatatatagagttcaaaagccacgaacatttaaataaacaactattcatacgaaaagtttgtgaaaaaaatgcaaagaaatatgatgaagagatgtaacttaaatgaatagatgcaactataaaaacacaaccgcaaactgaaaagatacgactatagttgaacaaatataactgtaaatataaaattaaccataaatattttaacgaaagatgcgataaaaagacacattcgtaaattaaaaacatatgaatgtagttgaacaaatataattgtccaaaaagaataaaggtaattattttaacaataaaatgcgataaaaaaatacaaccgtaaatattttaacaaaaaattacgataaaaacacacaaccatttagatgctaaaagatatgactgtagttgaacaaaatatatgtaaaaaaaaataaccgtaaatattttaatgaaaattacaacaaaaagacacaactatttacaagtataaaatatatttattttaattattattattattagattattattattgtactataagacttgtgcaatttcctttttgttaaaaggacatttataattaattaatcaactttggtctacaagaggtaaaggaaagacgtctggaaagtgtagtagtcatgcgtaccgagaaagttttgtttctccaagacgcaaactcaaccaaagacattgattgacactataagtagaaatataactccttagaccatctccatcggttagatactgtgtaggtttttcaacaatattatttaaatcagtttattataattaaattatttatttaaattttaaactataaaaagagaattcgaccaataatatagagacacgtggaaagacagtctctctaaatttctcaaaccagaaacgtctctaactctttctcctactttttcattattttatattttttcaatcaccagatactctccaagatactactgatggagatgctcttagaccatcgacgttcaacaatttttcacagatgtctttcatataaaataatattaaaagtaaagacatttcaaaaatagatgtctcaaatatttctgggaagacataattctcattctaaagacatttatatttctctctcttcttcttttatatttgaaaataatcatttaaaaatactcataaaaatatctaatgtggatgctctaagagcatcattaatggtagtttcttagcataatcttcacataattcttatgaatatttttataatggattttgaaaattttgaagttaagaatttggttaagagattgaaattttggcaatatgcaatggtagacttttaagtttgagttcttaaaaagaaaaaaatttgaattttttttagaaacattataattttaaaaagcttaataattattacaactcataaaatttgaaacatacatgacataaaaaaattaaaaaatatgacaaacaattagatttaatacttaatttatctaaaaattaagattaattgaattaaaacattatatttaatacctaatttatctaagaattaacctaagaaatattagatttggctcttatataagagtcattcttaacaattaattgaattataacattaaatttaagagctattttatctaagaactaatctaagaaactattaatgatggtcttatatatctgacctcacctcatgattcttaaacactgttaatatagtaacgaagctaggataaatcagtagtattcaatttccacatttatattttactgtttttttccgctaaagtatattgttcaattttccgagaaaaaaaacaaattaagttatactcaggaaagtacacatatcggtatgctaaagaaaagaaaaaggtacgatgttgtttataaaaaaaaaaaaaaaaaaagtattaattggttcttagaaaatgttaacgaaaacaaatcctagaggttcactttcgttggctactttaattatgctaaaaataggcgtctatcgagtgaaaagtatagattgtgacatagataccgcaaaacatatatgttttattccaaaacaaatacagaaaaaatgaaaataatattaatgatgcaaaaagtgaagagtaaactaaaattgttcccgaaatgacgcacgtccacatctgttggaaaaaaaaaacatcagtcatggatctattgtcttcgatctctatggaatgatcattatcgtttactttacgtcaaatcttattatgaaagattagtttgcatg

SEQ ID NO: 1794 - DNA, 3000 bp, Unknown
  misc_feature (1)..( 3000): cDNA_ID_3064310_gDNA_ID_1620449_Annot_ID_157421 3000 nt of promoter + ATG
ttcttatggtgtcttgaattatgatcagctgccccacaaactccacaatgcatgattcttttcttaccttttggctgcttcttagtaggagactcattcacaccgttcttccttttcttctcagcctttgtcattttcttgtcttcttcgccttctgttggaggaggtacatacactctcagaccattactctcgggccagaacttagggcccctttgtggaaaaaggccatccgtgtaattcttcctccacattgctgtcctaaaccagcaacatacaaagttctctggttcaagcttcttgtggatgatgacgctatatgcatgctcacatgggatgccacaaatttgccactttatgcaggtacaagtgtaagcctgcaagtctacacggtgaagatctccaccatgcctcacttcatacatcccattggtacttggagacaccttcgcagcagcagcgactttgtgctcaccagctaagaactttgtaacataaggtgtacaaacacctacaaagtaagagaaatatatgctttaaagggagtcaaggctatatcacatgttaagaatctgcaaagaacaaggcttaatagagtagctaacctgtgtgagtatgggattcaacagatcttttagcaatcctcaccatagccattcttctgattgtctctaacatcgcaacaaatggcttctctcttgccttgttcaaagatccgttgaaagactccactgagttgttgtcaacgtcttcacagaagctgcctatcttctggaatgccctaacccaactccttggttttgtcttcatcacagactcatagactttagtgtcatagcaccgtatcttctccaaatgctgcttatactctttctcattgtaagaccaatccaaattccatagcagtggttttatcattgttttactgccataaatcttcttcgagttcccataaatgtgttgtacacacatccggtgctctatcttgggtaactcaagttgaaccgctgctattaaacctgaaacaataagacaaacatttttttttgggaatatctggaagttcaggcctaaaggccctacatctccgagaggcgggacccacaccaggttaaattcatctcctttggagaagagatccctccctacgtgcctcgaacccaacacctccacctggaagatttaccactaggccaacaacaccttggtaataagacaaacattagctaacactaaagagacacaaatgacactaagctaccttttgcctatctgatatcatgatgaagccttcaccatcacttaatctgaagtcttctttcagcagcttcataaaccacacccagttatctgtgttctctactttaacaaccccccaagctataggatatatgcgattgtttgcatccctaccttaggctacaagtaactgtcccttaaccttattctttagaaaacaaccatcaatgcctattagaggcctacaagactccttccatgtccttctaagactgtcaaagcatacatagaacctattgaacatgtctttaccatcatcactcgtgagacattcaacttcaacccgtgaatccttgtttgcttcaagtatctcagccgcataatcccttaatcttgcaaactgatcatcgtactccttctcaatccattgcaaagccttctttctagcagactgacattgattcctagtgacacttatcttccattgttccctaatgatttcttctatctttgtgggcatgtaaaattcaggactatccctaatcttatcaacaaataaccgagctatatgcggcaccttaaacatctcacattctccattagggatacagctatatgtatcaacaaacttcctaatcttccacatattatcactcgggagaattgccgcataaattttccactcacacttagctccaccttttttaccgtcacaaccaacacaaatgaacccaattttatctttatcatacctgtattgctttatattgcatccggttttgagagcgtaatcaacaaccgcctctttgaacgcaacccactgaaaaaactctgcttgtggtacaaataaccatcaccacgccttatatctgtgtcaaatctttcggttttttcttcatcatcactctccgggtacatatcgtggcgaattggtggttcgtcagtccactcctttagcagttcttccatgtgaaactcatctctttcttcagcttcggaatcgacatcaccaacaagatcagggtcgtgaaggactaatgacatcgatcaaagcttctagggtttgggaaaaatcgatttgggtttctagggttcgtcgtgagaaatttgggaatttttcgatttggtttcgatttgttttttggtcttaaacgggttgtaattcgggtttaggctggttctaattagatttatttggttaaatcatcggtttggtatacagtaaaccaattaaacccagagctatggggttttaaatctcgaacttacgattcatggacattaggctctcgaactttcaattagtggggaaataagcgtttaacttctgtttcatgggtatatagatagaggtcaaagatcggggtttatttagccagatatgatagttatcgtggggaaatagaccgtttttctgccaaaaagatataccgttatcggtctggtaacgttaaataacgtcgtgtggattttgacctgattatgattacgtgaaatgaccaatcaacaatttttacatgtatacgaagttcacgtattaaatgactactttttaaaagtttgcgtattaaacgatattttctcgttttttttcccagctctaaccatatatatctcacataaaattagggttacgaagtggaccttttataaatagaggataagagaccatcatcgaaaactcaaagaaaaaggagacactagctaagaaatttaccttgcacttttgatctgtgttctcagtagattattcgtaccacc

SEQ ID NO: 1795 - DNA, 3000 bp, Unknown
  misc_feature (1)..( 3000): cDNA_ID_2046721_gDNA_ID_1620449_Annot_ID_157426 3000 nt of promoter + ATG
atctcttaatcggtgttctgaagaaaaaataacgtccgatttcagatctcttaataagttctcacaaaagattatcttttaatcaaaaagcctaaattttcttcaaaaatgatatatatatatatatatatatatttgagaaattcccacaaatagcacactttaaagtgttttggacaaaaatagcattacaaagttctttacacataaatagcactcaaataattatttcagaaatttctaaaagtgacaataataaaaccacaattttatattaaatatattcaaccaaaataaattagaaataaatttaaaatgttatatttgggttctctatttccaagttagggtatatatttcaactatttaaaagaaattttgattcattttaatattagtttatgatattatatttaggtttcctatttctaatttagggtatatattttcaccatttaaaagagatttttcattttaaaattagtttgtagtattatatttggggttttttatttccaatttagggtatatatttccactatttaaaagtttttttattcaatttaatattagattagtgtttgctctcatttttatttgggagattaatacaaatggtaataaaaaactttattatttaattaatttttagaggattaaaaactttatatgctatttttggaagtttcaaaagtatgtgctatttttggaatattaaagttttttagaggtatttgtgtcaatccccctatatctatatatataactcaccataaattttgatatatataaagagtaaaagattcatgagaagaaagatgaaggatcccgtgttaaaataaaaagaaaacatcttaatgaatgttcttaggaacttacattcaacaagatgttggtgattgactttaatgggtatttaaaaaaaaaaaaagctatttacattcaaccaactgatgaagatgttctaagttgttttagagatttatgtttttttcaggtaagattcttggtgtatgcgtaagatagatatcagagtaggatgaattggattttattaagaaatgtaaattgaatcaagagtacaaaggagccttaagatgatgtgcttgagagcatcttcaacctacctctatatttgcctctatactctattatagagatctctgtataactttgttatttgcaaaattgtacttttacttttatttctgattaaaatatataaaactaataatttggattgattttagaagttttggtttaagtatctattttaaaatttgagacttctatatgcaaaagagaaattatataaaatcttaaatatatagtttttttgtttcattccattatatttattttttaaaattatgtaatgtttctgttttctcaataaatatttaatttaaacaataacaagcattcatgaaaataaatgggttaatttgcaacttttgtaatttaaaggtactaatacaaaaaaaaaatagaatctatttgaattattcttttttagaggaaaaaatagagaataccattgaagtaaaactcatctctattatagatttcatctattttatagacaaaaataaggaaatgggttggagatggtctgagtgctactccttagaacttaaaagtaaaggtacgaagaggaagaaatatatacttatgctgatgtgatacattttgtaaaataacaaaacttaatgttacattactaatattcacttatattatgttttaaataattttaatatatctgaagtaatatttcatacctatattccacattgttttatataaaacataacgaatttgtacatatatgacattttgttatatatcataaatatagatgaatagaataaaggtatttattacatgtttcgtaatataaaaacaaacttcggatagcaatacaataatctatatttatatttttaattgactattgtcatatgtatttatctattaatattacaaattgtttttgtggcttctaaagatggtaataaattgattttgtttataaatttgattaattgctaatttcctaaattacctctacctaatttaaatattaatatataattattcattaatttttatatagtacgattttatatttaatttattttgaatttttataaaatacatataattaataaataatagattttttttatatatgatgtgattcaaatttttaaaaacatatatatatatatatatatatatatatatatgatgtgattcatgtagaactttttctttctcaaaaagagaaaataagaaatactagaaaacactagttaataaaactcaattattagggaaaaaaacaacaacttaacttttagtttttggtactcaccaaaaaaacttttagtttttggtgatgacgactagaagcggacaacttgtgtccaccactactatgagtgcattcttctccaagtcccgacctttcttgttccccgagccatttggatttttttttttttttgttaaaaggccttcttccatttggaaaattgacattactagttgacataatctctcgctaaaaaaaaaaagaaaaaaaaactaatgatttaaaatgcatgcacgtaatgtaactctgaatgcagactttatgcatgcaaattcaattcattggtcattacatatttaaattttaaataaattaaaaaagaaaatcgaattatattttcttggaaacggttgaaaatttaagatcattttcaaagtttttttggacccttcgtcttcgtcttcctttttaagtagaccaaactgatagtgagagtttacttcagatttctcttcttcgtctttgttgaatcctctataaagcttagctttctacttgtcaatctattttttcgtgcctactaagccaagttacgtatttaggttatttccaaagtaactcaggttagttcttgctgttgctttgcttcgatgaataatctcacagaaagacgaagggtcatc

SEQ ID NO: 1796 - DNA, 3000 bp, Unknown
  misc_feature (1)..( 3000): cDNA_ID_3064299_gDNA_ID_1620449_Annot_ID_157427 3000 nt of promoter + ATG
tgtaaaaattaagcctccatctagctggaaagtagcaagagaatgtctagtagttgttatgagaattatggataagaacaagctaagggaattagaacacgagcatgtttgatacgtatctaaattctcaattgattctgcatcaagtaggtgtagtagtagtagtagcctgttgatgaactctctcttcctctgtcttgcaggaaatatgccttcttagcaatgctaggtctggccgtttgcactactcatttgctattaccttacttcgcagctgagcctagcccctctttgtaagtttattgtttgatactttgattaatcttcactttgccatacatcgaggttgctgcttgatttgtggctcgacactttggttttgcaactttaaaactatagtttgtttttatgatttcgtaacatgtgtatactttcttcagataatgctttcaaaatgttgaatatcatagaatttgttaatctactcgctcaaactacaaattcacaaggtgatataacttttgattttggcgtgttacatcagtaagcattagtcctattctaaactaagttaaatttgccacttccattgacaaaataacctctcttgaaactcaaacaattaaaaatcatcaatctttgtaatagcatgattaattataaaataacaagaaaatactacgtatctaaattaatcttgaattatattaacacaatttttctttgctcaccacacaaaaaaatatatataaaaaatcgttttaccaaacaaggcaaataaaaaagatggatcagaaaataggcttggattttctcaaaaaagagaaatcaattcgctcagattgttcagcttcgatcatttggagaaataatcctcacttccatctaattatgtgaaactagttataaaattgattgtatataaataaataaaaaaagggatcagaaaattggcttggaatctctctgaaagagagaaacataaaatcgctccgtataatcagcttcgatcatctggggaaataatcatcacctcccaatcttttttccaataatataaaaactaatcagaacgaaaaaaaactaacatgcaaaaccaagaaaaaacaatttttgatacaaaaaaaacgattagggttcgtagaattaatgaaatgattaggtgatttatataggaacgttggtggctctgaccaaaaaaaagaaaaaacctacatcctccaagaataaaattagggtttatcaagtgggctgttctttgggcctattttgacctttttgcccagtaaaaaaataattgaagatggacctgaaccaacaaagtgtttttcaattttctgtagacgtacgagcctacgaggtggtctatagagaatgattcctcatcgtattactgatcagtgatcaatgtgacaaatgtgtataatgtatatgttataaataaaaggtaaatccaagaatgtataaaattaagtattgcattgtattatgttttttctcattatgtcgaaatgaagaatataacaatgtatgtttgatgactttttcaaacactccttgtataccagtaggggtgggcattggggtaagccgtttgtatttgggtaaaacccaatcggataccaatccttcggataaagaagtttaagatccaatagggtaaatctaaattatcagttcggtttcggttcggttccagtcgggttcagataagtttggtgtagaatttcaggctcttttggaaccgataccagaattttcgatttttaggtaaatatatggattttcgggtaaaattttgggtttcggataaaatttagattttcgaataaaatattcaggtattttcgggtagaggaatttaggacccaatagggtacatcttcgggttcagttttgggtccaattttttgggtcggttccggttcaggtaatcggatccagtttttttttccccagccctaataccattatcgtcaatgtttcctacttacttttggatccgctctcaagtgtgattcaagtaacttatagtttgaatatatatttaaacaatttttactattcagaatctaaatgtaaacattattaatggaagtctaaagattcaaattagtttaattgttgaagtattagagtatctccatcaaggagaaatccatttagtttctcaaacaaaaaaaaatattaatattttattataattttgttttatgattaaatttttattttagtaaaaaaattgaaccaattgaaagtaaagaaatattatgattgcatgtagagagtatctcatagtttctcacttgagaaactttctacattctctcttttttttaattattattttattagtgagaaactcaatattaagatactcctaatggagatggtcttattatctatgccggtttcactttttcgtttgcctaacattactcaaacaaaccaagaagcttaatccctaaataggtctatgcataattaggtttgctattgatagcctccacttagaaccacgtccgtcttcgtagattatcacgtgggttgtccagccaaagatatcactttaagatggttcacattgtatccatggtcaagtcttcatgaattacattagtcccttattatttttgttggtcatcaaaataaaagaaaatttgtaaggttatcatattacctcgagaaatttgagattttgcataattgtttgatatcaatcgatgcaagcaagatttagacgtttcttcaacataaaatttgtagacataaggtgaatttttagactgatgtagataatgctttcgttagcccctatgaatataaaattttaggcacaaatcgtagtcatgagtcaccaaatcaaatgtcggtactcggtacacttggtttgagatctctccctataaaatggaactaagtttacctgttgacaccatcctttctttccgactctacctttgttatccatcttattctattttctaaccaacgacaaca

SEQ ID NO: 1797 - DNA, 3000 bp, Unknown
  misc_feature (1)..( 3000): cDNA_ID_2046729_gDNA_ID_1620449_Annot_ID_157423 3000 nt of promoter + ATG
ttttgtcgaggaaaaagatgacccaataagtgaaaacgaagcttcggccaatgaatttgaagaagaagatgaaatagctaacaacgaggatgacgttgtaactgaagagactgctgctttagaagcaaataatgataatgagaagaaagattaaatacatattagaatggagttcagtgctgatgagattgcatatataacttataaaaagtatggagacaatcatggtttcaatgtaagaaaacaacggaggatgaaaacaagagagaaggtagtaaggcttctttatgtttgctcaaaacatgggtatagaaaagaacctaattgttgtgcttctttgaacactacgagagggtgttgggggatcaacgatataaggaattacttgctgattttaatatgatgcatacctctccggtattatgtgctactgtagagatgttctaacatgcagaggaactgtatacacacaaaagttttagcttgttccagaaacaatacatagttattggtgattatgttgccaacaaggttagtaagtctgagatgatatataaatataaagtatcttatcgtggtgtagcacgtgagcatttggtcaattatgatgttgcaaacgagacaatatgttgtagttgcatgaagtttagttttgctgggattttatgtcgtcattgttggggtcagattcccccacaagcaagaccgagccaaacagtctaagaattacaatcacctcatggttaaacatatgattggcccctagcctagaacaaaacacctcgggaccttattcgatcaaccgtctcagagagagttcaaaaaatggctcgggtgttaatcctatgaacacagcccgagccaatcgtgagaacgctgcggaaaacatctatatcgcctcgggagacagccaactgagtttaatggacagtcatcaagcgcgccccaagccggtacatactgtttgcccgaagccacctctcaaacaccaccgagccgtgagaaacacccgaggcaaagtcttgtaaaaatcattcattctcaaaggatcattttcggtaaaataggatcttttatgggactttcggaaatgataaaggagaatctttgaaaataatgtcgaataaggaaatcttcccaaagccttcggagaataaggaaaatatttttaagacgaatatcctctagaaccgacttaaagataaatggaaatctttcaagaatatcgctagagaggcggtttaacgaccctatataaagcgcctcagggacttcacaaaagggagatctttggatactcacaagaaacacataattatatacctagtgagaactacgaatggcttgatcccttcacaaggtacgtaggcaatccatcacggatgcagcaataccttttaaaaaccctaattctttctctgttcttgatcaaaaccctaatctattttacaagagattagaatctccttcgtaatcgagtctttgatgaaatacctaatgaagaaaaattactagatttgttttccccttttaaacaaatctattgtgtgaatcctttgttcaacataagttcttaaagagaatattttatttcctttaatttatcttacatttacaaaatatattgttgattatttagtatctgggtagtgatatgatgtctttcagtagatttattagagtttatatgatttattttttatttgaaccgacattcggaaatctttagtcaagttgtagggtttttttatattgaaaatcagtttaaatcatacgctttaaatttttgaatgtgaagaaagtttagctattgtttcgaatttagataattggtaataaattcatttccattttcaccaaaaaatagtaatactgaatattttaggtttgttttttttattgtaaaacataccattttcacaaaaaatgaaaataaaatttagtgcagcgaaattttttaatcaactaaagtgtctttttaaaacacactataatttataaacatcaaaattaatatttttaattatttttgaacgatatattagcaattatatataaaattttatatataatttaatataaatgttattctatattcaaaactaaaccaaatatataaaaactttctagttaaagatacatgagagtttcaaaaattatgttattcatatagatgaaggttgtagttaaaatgcgtattcatatgatggaaaaccgtgtgaaaaaaaaaaatatgtaaaaccatatcgtaggcacgcattacacatatcttgcaagttagaaagggcatcattatcagaatttgaaaacgtaaacgaaagcatttataaacgatcaagatctaatatttgtttatacacctaaatctcatcgtgatacaaagcttaatacttgctatttattaaagtaatagtttctctaaattataaactcaatccttttgtttgattattacaaaaaaaaatattctattctttattagtttctggttgagagagccagaaagaggactagaagcggacaacttgtgtccactaccatgaatgctttgttctcaaaatcccgacctttcttcttccccatgcgaaaaatcaacattacggtttattaaatctctcttgaaataaaaagaaacacaaaagaaagtaatgatttttaaatgcaactctgtatgtagactttatgcatgagaactgaagtgacatgttcgtttcattgatcactacatattggaatctaaataaacttttaaagaaaacaattccattaataagattttcttggaaagtgtcaaaatttaagatcatgctcaagatatgttggacctttcgtcttcgtcttcccttataagtagaccaattagatagtgagagttcacttcggagttcagagctgtcttcttcatctcttgtcttgtcctctaaaaaaaaattgctttcttcttgtcgttctattttcttgcttgtaaaccaagttacctatttacattcgtctagatcg

SEQ ID NO: 1798 - DNA, 3000 bp, Unknown
  misc_feature (1)..( 3000): cDNA_ID_2046770_gDNA_ID_1620449_Annot_ID_157412 3000 nt of promoter + ATG
ttgtatttggttccactccaatagatatcagtttggttcactttcgattattttatccaaaatacccaaaaaaacaaaacatcaaaatatccgagacttttttgacaaaattgtaatgactcaaaatatttgaaaattaacaaaatttattgggttagaggttgggaaaaaatgtattgggtttagatgtagttttgtataggaattgaccaaataattttggttccattcgggtacttatggatattctgttcggttataaccaatattcaatggataatgtgactgagatccatttagggtatttagtattctctagtgtgactgagatccatttggtttcattattgattttcaggtctaataagtataatcaaatatatttttgtaatttaatacatagatacaaatatttgttgaaaattagtttttttcgcgatatcgtcatatcctagtaataatattaataataataataatattattattaataataataataataataataataataataataataataataatatttcatgtatgcatgtatatataaatatttattgtgactatgggaatccttgaaagtgcagaatattaattactaaaaatgtagtaaatgaaacatatacaattggtaagtgtatgttgaaaatagtgaaaaaagagaattaactctctttttcttagcaaaaaaaacaaaaaaaaactaactaagtttaatcaaaaaataagtatgatttttctttttggaaactaaaatacatttaagtctaaaacctatgaaaaatactttttgttggggtaacagagataggcatattccgctgtaacaaataacggttttgccctcgatcatcttcttctttccttcttcatcgtttctttctcttcttaatattaccaggaattttggtttcaatttttttttttatcacaaacacccaataataacaatatatataccctaaagaatagtacaagaggaacccaaataaaataattaaacccaatgtatccaattaaattcgttttgatgagtgaaatctaaacccttatgagagtatagggaacccaaatgcttcaatcatagacacatatcgaatcaattatgaattttaattaataatttaaattattttgagaactttggatagggagttacttgtataaacttgatccatggagtagggtgtaaacgatgttgcaactagtggaataagtaaagaaataaaagggaaaataaaaatattttttgaaagctgtcaagggtgaaaccgtaaaattatataacgtaaaagtacctaaatttgtgagtactgtactgtgatgttcctatatcgacaaaagcacacactttaatgtgccgatctcgtaattgatccaactaaagtaggcttggtaaaaaaaaccaatgacggacaacacatgaaatattgctctctctcgctctctcttaattctttttaactctctcaatctctctcctcaaattggatatgagtttttcggtgagcgatctctttcttcctcatggatctggttaactttccagaacagatggtgaatccgtcggaaaatcttgcacaaaactaactgtatatcaaaaatgaggagtggagcccatattttcaatgtcaggatagctactggcttctatgcttttgatgaaaactttaatatcatccatgatgcagatattcatgaaagatggatgttagtgagaatgactgtcagaacccctgctattccgggtgttgcttttgcccaatacgatccaactaggttttaggtcacaatacatttacagctcagttcacgagcattctctcttgcttctttacaaattaagtaatagtaatgtttcatgtggttcatacaaccacggcgaataagatttgcacaacctaataattattgtagctttgttttttatattttcagagttcaaaattgaaccataatttaactagctacataaaaaacaatttcattacaataaaatgagcatatgaagttgtggtacaattgtaattaatagaggtttttcatatgcatttgcatatatctaaaggtcgaatatgacgatgtggagagctttttaatggtgattttttttacagaattctagaagatgacgaactaaacgaaatcatattcttggtgagtgcttctaaccttatagaaaatcttttaaatcttgtcttctaatgatatgcaaacttgtcatgttttctttgttgaggaaatgaatcaagccttgtaaattcattatcagttagtgacgatacaaagtggatgttgaaacttcatggctacagagatacttagttctcatatatcaaaaatttgcatatattcatatgttttcttccaacgattaaatgctttgagatacgactatattgtacatctttcagttattgttaattttcttaaaactagattcggaccgcatgttcgtgctggattatgtgtgtagatgtatttgtttggtatagtattcattaatccaaaccagggggaaaaacaatgctttataggagggtcaactgaccccataactttttaaaacttctatgttattagtagcctaaaacaatttttttgaccctaatacaaagattaatgttagaacatgaaacaaaaaaatagttcaaatacttgaaatttagtttcatagcatgcattaatgaaacaaagggaataataaattattaaacatgattaaggtgttcttagttttacacgtgggggttgtcaaagttgaccaaagcgttctcactgtttctttaatgagaaacaaatcaaataacatgggaacgtcagagtaaaactcgtgtcgttttgataatttaacaactaacgttgcgctgttttttagttacttagacacggtgagaaacacaaaaactatagacgacgaaacgattcctcaaacgcagaagtcttctccttctctcgacggattaagcttttacacagaagaggagagat

SEQ ID NO: 1799 - DNA, 3000 bp, Unknown
  misc_feature (1)..( 3000): cDNA_ID_2046755_gDNA_ID_1620449_Annot_ID_157416 3000 nt of promoter + ATG
tcaaatttatttataataaatgaaaataattttaaatacataacaaaagagttaagtataataaatgaataataataatattatatacaatatatgaagtatttatcactataatatttttaatttaaatattgtatttgaatgtaatacaaactttatgcatttataaagtatcgaaataggtaaaacaagcacaagataagagtattagatccaaaatatgcataaaaaaaaataagagtaaattattaaaatactgaaatcgagtgacaagattaaaatcaaaaccgagaatttatggaataacgaagataaagatacaaaatgatactaacatttccattatagataacaaaataaattgactaacacttttttatttatagatataaaagattatagtttagaaaagacagaaacattttaaaaggttacaattgagttttctgtagtagaaaaaacttcaaaatcattctagaaaaactcaatattatacactaaaagagaaaatgaataactatgtgtcatgttattctttagttgtacaacgaaacacaataatgtgcaatatgtgcaacatatcttacattaacgcgtaatcaatattaagatccaagcaaaaaatacgcttaaaaattcacaatttggtcaaaaattcagtagaattataacattttaagtttttgagaaaaaatgttggattacaacactatattgatatctaaaaaaagaaaaaacatgaacgctagatcacgatgaaaggattaaaatagcattgataatgttatgcatagacatgaacaataaggaccacattcttttggttggatgtatcaatatcgttgaataacatattaatttgtttttttatctaaacattatattaggtcatgaaatccttaaaacataaatataagatgctattatctgagatttttcatatattaacatagtataatattttattattacaatattttatattattacaatattacatataaattatttttaaatttaagtcatttaacattatcgcaactattatcatttttagcatttttattgtttcttaccactacaaatgtcaatactacgtttaaccacttcaattcatatatagtatttatatatataaaattacaaaatataatttaatagaattatttacttattcatttttaagggcacattgttcaataaataaaatctataaagtttagctttacattttttttaaactaattataattttaaaacttatgaagttttgaaaattataaattgaattttacaagaaatttaaatattataaatatataaaaaatatattaattcgagacgatatactacgggagaaattctagatataacaatcaaaaatttcacccgtcgtataagtttaaatattataaatatttaaacttattataaagaatcgagatgtattttaaaaaaattaaagttttaagtgtatttgttttgttaatattgttaattttttttagtatttaagattgtataattatattatgatttttaattttaagattttttccgtaatataccatcccatgttattatccacccaaacccgtctcacaatataatcccgtcccgtaaaattaaacataattttgtcattttcttataaatttcaaatatttataaaaattgaaactttaaaataaatttaatatcgatatgaatattgttttctggaatttttaaactattacaattaaacatataatttacataatattttttaaaataatctacagattctataatcaatatgtaaacgatattagactttacagatcttttagtaacttcaccttaattatgatagaccttacaaacaaataaacgtaacaaaaaatagacactaaaaagatctcaacaacaaatctaaacaataaataaataaataaatatatttatatatatatatatatctttaaattataaaaaatcacataaatatctttgggattcaaattttaataattatttgaacaatttttctaaactacatcaaaaccaaatatattgaagataaaaaatacaaacaggaaatatattaatttaaaagatacaaaatatttaacaagaaattgtgttattttttgttcaacgaattcgatataaaatcttcaaaatgatccgatattgattcttattaaattgaaattgtaaattgactctataaaaatattattaaaaagaaaaagaacagtttgatttttagttatcacgggacggatttatatggcgtgatgggtttagaggagacgagtttacatggtatgacgggtttggatgagacgagtttatatggtgctatgagtttagatgggacaaatttggataccacaggtgtactcctaaaattaacaatcaaattacaactatacaatactaaacaaaacaaacaataataacataacaaatacaatttcaattttaaatttttagttacaaaaaaatacataaaatcaacattatagtatctatactattaagagagaatgatgagcagtaaatttccaagccacataagccattttttaatttcacgttacaggaaaaaaaaaagacaattaagggtataagcgtcattaaccatgcgttttcgagccgacccgagccgcgtcctgattcgatccatttggcagacgcgcggatcctgattcaaaaataatgggcctcgattcggtttcttctttggcgtttttatcacagttggcccatttgcactcttaaaattcatttcttgctcaatattttgcctcctctccaagatattcactgcaaagtgaagatattctgcaaatcacaaccaattagggaagattcctatattctattgagatagtatatttagttatgatttcatatacctaaaaatctggtgtcgctctcgggtttcagaactaagtcctaaccgtataaatacacaagcaatctcatcaattctaaagcatcacataatca

SEQ ID NO: 1800 - DNA, 3000 bp, Unknown
  misc_feature (1)..( 3000): cDNA_ID_2990847_gDNA_ID_1620450_Annot_ID_157443 3000 nt of promoter + ATG
agaaaaaaaaaacatgaactcgatagcttaaaacaccgaaaaaaaacgagtgggcaacaaatttttggtaataaaaaaataatcgagtggcgtagaataacaaaccatccatatccctatccttctctctattacctaaacacaacgacacgtgtctgacttttggaacatctcagaggacaacacttttgtgctgactaggcaataaagtgcaaaacaaaagtgttgttttttttctcctctttcattttgagacagttgtaccaaacaatttctaatttggataaatggttttttttttcattgaagacttccagatatttattttacaatttttgtccttcacataaaatacctatttaattttgttttgaagttgacggctactgaaatttaaatatctctttcttctttttaaacaacgctcgtgtatgtttttatttagctactcgctttctttgccacatacttgggtcaaaagagagcactccaaaaatatatgatctgtcatttgaaacctaactattcctgataagtctaggttcatagtctaaagttcttggccctcatttaggtataaatagtctaaatttaaagtatttaagcaaaaacaatactgagaagaaaaaaaaaaaaaaaaaaaaaactacggtaaaatttctagaaatgtttaagaaaaatctaactaaaatcaaaagaatagcgtattaaaatactaattttattggattaacttaatttgatgaaaatgtctcttaatatttatggcgatatgtatgttggttggactttgaaattgtttttatagatttaataagatgaacattttgttcttgcttgagagtggctgggtacacaatttttttcactttgttcatgctaaaattcagttttgtcttcttatatttacatctaagtttatgtttgattatctgaaacccaaattatcaagtattttacgattttttgaaataaacgaaatctgtttatttccttattcaaattttataaaattttgtaagagtgatttgattgaaaatggacaacatttggagacattttcaaaaaaaaatgttataaaaggttattttaaaatgctttcaaaaatatcaatataataaagagcgtgattatattttaattcagaattatttaagtgatcgaaaatatcataaattttgtataattagagcatttgttctgatatgcgacatattttactataattttataggaaccatataaatttaattttttaactaattccagttgcacatttgtttagatgaaaatgatttgattgctgcatgatataatttatttacatttaagcatatattttattctattttgatgaattgtgtggtattttcgtacttaaattttgatatattgtatgtaattgtacaacatactcaatcatatgttattacttctaataatttgaatatggacatactcagaaaggtatcaagggctctttctctagctattgtttctcatataatcttttcaaaatcatatatcatcaccaactatactcatcattctcgggtactatgagctctaactagtggaatggtactagaactttgacacaccgtctagttgagattatagaaattaaagattatgttatatatagtagaaacaaagtaggccaaattcttatagaaaagaataaacaaaattaatataaaagataaatgaaaaaacggtcttgaattataaacaatttgctaggtgtgattcaacattgtctttattcaatacttgttgggtcataaacattcaaattgcatattattgttactctagtattcaaattgcatattatgttttatctaaactaacttatatatttattttgataaacatgtcatatgatattaaacttattttcaattgatcatcttctaagttgatgcattttagtattttatattcaaattttgagatcttagtatgtaatatattttcaggtttttactattcatcagtttgatgatgcaaatatacatagtacgaataaaatgagtgaaattgtttaattatatgatcaggaagaaaaaataatattccaaaatccaaattttagtgggtaattcttagcacaaaaacaaattttgtttccaaatatatcacatatttttcaatgttccacaaatagcattaattgttgaaatttgttatgaataagaatatgttctataacattatatgaattagaattatcaatagataaagtgtgtcaactcaaatcgctaaattgttgaaaacaatttaataatatattcatttaatatattctcatgtcaatatgatatgattagatctatttagtgagatcttatttaattgttaattctaataaaacaaaaatagtgattatattactaataaataatataattgtttaatcttattttatggaactgtatttctcaacttcaattaaatactgtacctaaacctaaaattaaatatgcaatcaacttgattaataaaaaacaacaaaatggggtaagaagtaaacaacgttgttaaacaagacacgcgctcaccagtcgcgagtttggcaataatcatgaaatgagcttctttaaaaaaactttctagtagataaattaaacaattaaaaatctccgacaagatttaacaaagaacagataatatcttctccgcaaagacaaaagtgaaagcgaagaagaaatcctccacgtgtcattagcatcttttaacctgagccacatgatactagtttctcgaaacccctctttacgctttttcacccaaatttttataaaaagaaaaacattatgcttacgtggcttatcttcttcttgctcttttaaagtaaccccttgactctgctcctttcataaacaacaactctctcaccaatctcaaaacaattctctctctctttattcttcttcttcagcttcagatttcagatcttaaatcttcaagtcttcttcttcttcttctgcaaccatg

SEQ ID NO: 1801 - DNA, 3000 bp, Unknown
  misc_feature (1)..( 3000): cDNA_ID_2143998_gDNA_ID_1620450_Annot_ID_157452 3000 nt of promoter + ATG
tgtggcattgatgaagccagtgagtatttctccatcctcttctcgaatggaatttcagtttccttccatcgaactgtgtatgtgaaatccacttggacttccttgtcctcagtcaagtccacaaggaaattctggtctgtcctcacgataatttcgataacacggtccttattatagaaaatctcaaactgcagatgattgaagagataatatttatactcagatgggtcagtctttccctccttgacaacttttccaaggaatccccaaatgggcaagtcatcataatacatctgaaagtaataatctttcgcaatcacatcacgaaacttagcaacgtcttctctactcaacctctttctacatgcaacttcagagttcttctcacccaaaaactcaagtttgtaaggtgcactgactaatcgatctccattaagaacttcccctagagcctccttcttctccttaacaggagctgtaaagaatatccctcagccacataaacttacaaaaaaatcacctatgaaactaagcaatttaaccatccatacatacctgatgaacagaacggaagatcaaagtatcgatatgtttcactgcaacacacaaaaaaaaaaaaacagttcgctcaaactaaaacatcagagttcgtaattctcgaaaatcggatttcttcacttaaatatccaatcatttgttcaattcatgcttcttgtttaaacaatttgaccatggatcaaagatgatctccataagaagcttaaaactacactaaccaccaatgacattcactaattagacctacaaatttgtcattccaattctcactatccaataattacgaatcagagctcgagaatgttattattaaggaaatcaaattcaaaattcgaatcagaaacacgaaaagcgaagagatctccatgcaattgaaatcaaaatcagaaaaaaaaaacgtgaaataactgaaaatcgaaagctcagatctgaatagataagcggacagacctgggattatgaaacggtccgactttgttagcgtaaagaggaacatcatcaccgaccttgtaacggtgatcggagccgtcggagataaccggagaaacgccgtagaggaagaggaacaccagaagaagcgacgtcatcgaaggaagaagtaccattagaaattagagagaaagagagagagagaggtttaagcggttgggtcgatgaagatgatgaagatcaaattcatgattatgagtgagtgatgagagactgatttttgttctccgcaatgcaagtcatgtcaattttactttttgttaacgaaaccactttttgtcactttttcattttcccaagttttatttatatattttgttttgaattatcaatagtaaatttttttttatttttttttggttaaattgatttatgtataatcgataatgatattttaactatctcacattaggtgttgggattagaggaaactaggagtaaagtacactgcaatctttttggtttttgtagacatgtaaattgcttcaaagagaagtgtaggaggaactgactggaggcagcggacaaagcggtataatttatctgcggtttagtccatctcatttttgggcggataataaaccgctgcggaccaaatttatttgtatgtaaaaaccgctgcggttttttctattttttttggtccggaccactgcggactataattgatgaatggtaaataaaaaacggtctgatccgttgacgttttgtccgccccaaccgccgtaaccattcaaaccctttgttaaacgattagttttttatcaaacgtttaaaggatttctgcaactccattttaagtctctttttattttgccgttttaaatttattatttattgcaaattctctgttttaagtctagtttagtttgtaatcaaataagagttttacatagagttctttttatgctcaactaaaaattggttatgaatttacaacaaaactaatatttcgttgttaacccgcttgtaaattatgttactccatagatgtcacgttatttttaccggttttataattcatctcaatttatgactaaacccattagtttgttttaacttttatcaaatgctagataatttacccgtgcgtattatatacatctcttgttgataatatttagtaggtattatacacttgtgtttgatttgatctagaagcaaaaaattaaacataattgaaatttttgtgtggatatcaaaatgagggaaaatggagaacatttttgaatgaatgttccaatttggcaagttggagatcgtatgtgcatatatttttctcctctagagacgtttggaacaacatttggcatgtcaaaccccttgtgtcatggtatcctttgggttggcacaaccgcacaaggctgcgattccaaaacactcttttcacgttggacagaaaagattgttccgagacgttgtccacataaaagacaatacataatgtgttttatttcataaattaagcggcaagtaagtaaacgatgtaaaagcaataagaggaaagtattatgcattagggttcttcgtagtcatgaattgtataagcatgtagaaaatcatttgtctcttggttattttttatttgaacaatccaaacttttgattttttttaaaacctttatggagtaatctctttcgtttgcttcatctcccaatttaataaaagtcattgggaaagcacaaagtttcgcgtggtttgatgttttgaatattcacgttcagttaaaataagattatacacgaaacctcttcgtattccctaccccatatatagtccataggcatattatgtaatggttatatcctcgagacttgtaactctaattatccatctacagggaagctcaaaagattaagtctttatgtaccactgggatttttgtggagtttgttttttatcctgcactcattttctctcatctttcgtgaattatttctccagaatctcta

SEQ ID NO: 1802 - DNA, 3000 bp, Unknown
  misc_feature (1)..( 3000): cDNA_ID_2144005_gDNA_ID_1620450_Annot_ID_157454 3000 nt of promoter + ATG
gcctaaaatccccaaaaatccttgatttttagattttgctcaaacccctaaaaagattctaaaatcctataattcaaacatgtcttcaactttgatttccaagacctaaaaccccctaaaagccttaaaatccttgatgacttcgattttgattatctgtttctactgacccttgatttttacctataatctctacgtgggctatttgccgaagattactcctcattctcccccatacgcaaaaccacaagtgggtttctatccacgttattaaagacctttcatttcttaccaaataacccactaatattgatgtgtgtgtgatgttccatgtcaatcttttatctttaaagatcacacgtttgctgtaagtggacaacgatcgcctgtagtattttaggatcgaactccacacagagagaaatagtttaaacgaatctgtaataagagagtaaagctagggaaaatcaataaaaaagggtttgctgttggtgtcacgattgcaaaataaagtaaatagcaagtaagacaagagttgggctttcaagggatcaagactcggacatgcgaaacactaatgatcgactaaccctaggctataggtgaaagtcggctaaaatccttatactccgttattcaactttcgtaggcaaagacgtatatatcaaacaaataagatcaagttcgattctacaacgaaacacataaaataatgtgtaatatgtgcaacatatcttatatcaacgcgtaatcattattacgatccaacagaaagacacgcctaaaaattcacaatttggtcaaatgcttttagtttaaaaagtcagaaaatcagcatatttaaagcattttaggtttttggagaaaaatattggattacaacactatattgatatctcaaagtaaaaaacatgagcgttagatctggattaaaatagcattataatgttatgcatggacatgaacaataaggatcaaattcttttggtattggatgtataatatcgtttagtaacattaattttttttatcaaaacattatattaggtcatgatactatcatctgatattttcatatattaagacaatataatatttatattattacaatattacataaaaattatttttaaattttagtcatttaacattatagccactattaacagttttaacatttttattatttcttaccaagacaaaagtcaatactacacttaactaattcaattcatatatagtattattgtagacaaaatttcaaaatataattcaataaaattatctacttattcatatttaagaacacattgttcaataaaataaaataactaaaatagtatatgataccaataaacccacataacttgtaggtcgatttctagtaactagtaattaaccggttcgaccacatatagtggatgtactaatgctttgcaaatcaaagtaccaaccaaatcatacattcaaacaaaagaaaagataaaccaaaatagaaaagagtaaaatatggtgatgaagtggccaggaagagatagttaagtctactcaatgcctcaagcaaacttgtaggctcctccacgagcaatctctacgttaatgatctgaccatcaaattcagcactattcagttccattacttagtcaagcatgttttcttcactaataaaggtcaaaaatgcgtaattgtatgagaggttactaactactttgacttgcacaataggaccgtagcagcggaagatattccccatatagacagcgtccatcatatcgagaacaagttgaatgtggattatctccaaactatataactgttgtagttaattatattgtactgaacttgcgccttcaaaatattcatgttgattttctgttgatttcttattatttacaattattattttactgcaaaatcatgatcataataattaggatagaacataattgtatgtttatttctataatataacacatctttttttttattactcacatgttttcagtacttgtgtaacttgtgtaactacacttaacacccttgattagttttaactaaatattatttttaattcatttttaattaaaaattaaataaaaaaacactgattatacatatcatcaatctatatcattaacataatccacgtcattactcatctgaaaccgcataacgttacggtttcatttcttttgccattttattgttcattagcggaaaaaaaaattgtcgctttctttctctatctctcttgacgaaacaactcgttaccctaactccttcgccgttttctcttttttcgtttgttccggccgaaattcttacgtcggagtcgcatttctggtatcgtgaagtcacatccctgtcgcagtcgcatttgaactgaacttctctaagttccggtgagtatatttccggtaagtaagaatccgacatctaagttcaatcgcaagtgattcgcgtcactgaaatagtttttcgatgcttaatgatggtttttaacgatgcttaaagctggtttttaacgtcgtcgttgattgacatatggtggccgatttgttagctctatttgatttgatggctgagttactttttgtttgccgactgatttatgatttatcaattcatctgtgtctgagtttgttatatgctgtgattgagttatggtttaaccttacatctgtggctgagtttctgttatatgatggctgagtttgtatgttatggctgagtttctgttatgatatggctgagtttggtttatgttttgactgagttgttgttatgttatggtttgactgagtttctgttacgatatgactgagttagatttatgttatggctgagttatgttatgtgtggctgagataggtttatgttatgactgagttatgttatctatggctgagttaggtttatgttttgcctgagttatgatgagtttgttttatgttatggctgagttattgaatgcttacggctgatttatggtttatcag

SEQ ID NO: 1803 - DNA, 3000 bp, Unknown
  misc_feature (1)..( 3000): cDNA_ID_2144020_gDNA_ID_1620450_Annot_ID_157459 3000 nt of promoter + ATG
cctaaacctcaaaaagtggtgagataggattgttgactgattttgtttgcatgatgaccaaaaaaagaggagtcatcgttcctttaattctgcagatttttttgtttttttagttccttattccactcgtaagagcgatacataatatcttttaaaaaagaattgaaagtaaacgatataaacgcagaaataaactttcctttagcttgttacatttttctgtcctcacttgtcaaagtttgatacttttctctcgaattacaaaattcaagaattgttattaaaactagattttaacccgcggtataccgcggaaacaatttattttttaaagttagtatatataaaagtttacaaattgtatctatttataaaatatttttattttataatttacaaatgttattaagtaacgtcctgtcaaacccgtcccgtaaaaaaaatccatttattttattaatgttgatcttatttatgatatatttatgaatcattgtctaaatattttgtaattttgtagtaattaaatgctatcaaattatatctctgcgctttgatgattataatcgaattgttatagtcatggagaaaaacaatatcaaaaatgataattttgtagtaattaaatgatattaaatattttggaagttttatttcagtaaataatcgtgtagttaatgtggagagattttaggaagatggttaaatgtcacaatttaattcgaagattttctttctaattatcaaaaacaaacattaaaatccagtggcagccattgtaaataagtctcaactacatgatttatttcacaaaatggtttcaaaaatgtatatacagataatggattttgggaaaaaagctatatgcatattaaagaaaaaagaaaaatctgaaacttttgaggaaattttttgaggaaatgcaatctcctcatttttttttgaggaaatacaaataaaattagttttcaaatacattagtttctcttaatctcctccaacctctaatctaaacagtctctctctacttgtaacatcctgtttatccaaaaatctaataagtcaaaatgtgtaatccttggaaatcctttttatttgtagtacatgatacatgttggtttaaatgtactgttttgattttttttaacacattatttgctacatgcttgatattacacttttataattgatctttttcttgatttttttttatttagatgtgtgtttctcacatattatgtatttttttgttggaattaacaaatctgtgttattctcagctaagaatgataaatgtaatagagcaaatccactctatgataaaaaaaactgaaaattacccggattgactcaaaactggataatagtaactaaaatgactctcattagtgatgaataactagactaacacaaattttgtgtaaaaagaccaattgaccctaaatgtcgatatttaatgttttagtggtaaatatggtaactgctctaataagtctgtcattacaatgaaaaaaaactgtcaccattgtaaatattgttatagcaaaaaaatatgcaaaaaaaaaccataactgatttttgaagttatataattttttatatatttgggttgactatgtatatttacgttatagtttttaggtgtaaggtttagtgtttaggatgtagaaattagttttgaatattaaatttagttatagatttgtggtatttttgaaaaataaaattcattatagtattttttttggaaaaactcattttagtggtatttaaaagaatttctaaaaataattgacaaaaaaatcaaatctgtcatataattttccaaataaaagaactgttacaatagttagtattattctattaagaaaatcgtggaaaaataaaactataaatcggtcaccataaggatttcaaattacaaatctgtcataacataaaatatttttaaaatcatttcagcaatttattttattctttattaaacctgctatcaaacgacagatttatggtaatataaatttatctgtcacaacataaaacaactttatcataacacaaaatattatatcttagaaaacaaatctgccatcaaacgacagatattgtgtaaaattacaagaatctgttataacataaaacaagtctgtcataacattaaaaaaattggttatcgttacacgtcattctagtaattaattatttgacaacaaatctgttacaatgtgacagatttttttaacaaaattataaatctgccatcacttaacgtaaaaaaacatccacaaaaaaataagtctgtcaaattatatgaaagtctgtggttgaataaactaaaaatctgtcaatcaaattaaatctgctataatttataaatctgttatcactatcttctaagaagtctgtcaaccaaaaaagtctgctataaaaaaactatcgcagttaaaaaagtctacggaataagaataaatctgcccataactaaacgatagacttttgtaaaattgttggaattttttttaaaagatatttttgtatttgttttatttttaacatataagaaaatgatattttagaaaagaaaagaatcaatttaactctaatattttataagttattctaataattaatcttattattttggttaatctagtttttttccctaaaaaaaattagccaaaaaaaaaaaacagaaacgaagaagattagtgatattatgatgattaagtttcttccaaaaaacttaacaaaaaaaaaagtttcttccaaaaaaattcacaaaaatcgaagaccagacaaatggcgcaagttcattgcacagagagacaaacaaaacacatatatggaaccaatgaaaaagacaaatctttaaccaaacgatgatgcctcaagaaacagcttcgactctactacattcattgtctaaaagatctttcggttgttcacgaattgtttctgagtttgcccaaacacaaacgaattgaggaaaactgaaagatg

SEQ ID NO: 1804 - DNA, 1219 bp, Unknown
  misc_feature (1)..( 1219): cDNA_ID_2144028_gDNA_ID_1620450_Annot_ID_157462 3000 nt of promoter + ATG
caatacaaattaaacttctccatagaatcctaatgtcagagattatagaagaaagaagctgtgcaagtagaggtctacactggtgttacactggtgttatcacaccatataaatgtggccatagtacactctgctgaggtcataaagattcctatcacaaagtttttggtcaattcggtcaaaaagtaaataataagagggtcatattaaaaatcttctaagataaatataaaagtttaagcccgcaatcgaaaaatctgaaacgcaactggtgtgagtgattctagcgttttctctcgtcgcatcttctcttttcatctttgaccctaaaactttgcaaatctcgagctttcaggtcttctcttgtttctcttcactttgcattagatatgattcctgattgattgattcactgattacagatttcgacattgtctctaggtttaatcgattttgatgttgttgctaatcccgtagaaatcaggtgcgtttcgagtcgaaatttttgagaggtttgtgagtttgtgagatttctagggtttttagatgaatctagaagtcgatttcgctatttacgcttagatgttggattgtttctacatatcttgggtttttcgaattttcggtggaaaaaaatctaaaccacacacattgtagccacttttaagctttgtttctgcatgcttctgagatttttcgaagattttagatagcttcatagagttaatttcttagtgacgcatgattgagagctgtttcttagctttgacaaggtttatctcctcaagctgctgattgtttcgcctctggtttgtggatttgcaattggagttaatgggtttttgttcttgtcgcataggcttgagtctggtgtctctgttttgcttggttgttttacatgttaatttctatgtgttggtggaagtcactatttgcaacggatttttggtagctaggctgcatgtgtgtagaatatgattgcagaaaaaccattgacattttgtgttacgtttttctgaactggctaagcggctagtagatgctttctcacatatgttaacacctccatatctaccttttttgttttagccagaaagtagccatccttgaagcaaaacatagcccagacgctggggattgctcaaattcggagaatttcgtcggcattgagactttggtcattagaaaaattgaatgataaggatacacgacaggcatg

SEQ ID NO: 1805 - DNA, 3000 bp, Unknown
  misc_feature (1)..( 3000): cDNA_ID_3064363_gDNA_ID_1620450_Annot_ID_157455 3000 nt of promoter + ATG
ccttcatgaatacagaatccgcgatttcatcctctacggatatctctcctcgctctataactttccgttggacctacccattgttacataattcattaataaacgttacagctttaaacctgacaaacttcaagtagtaaaaagttagacattacctcttccaaatagctatcaacattttcgtctgaaattgtcgggtcaactatgaagtcaaatagctctcgtattgtcataacagccacaccatgttttttgaaaaaatcctgcgtgtgattgtaaatccacacatcagacaccctattccagtcaaatattaagcattgttaaaacaggatactgttaacacttaccgagacatggtcacaatcttcccgtagaaagttgagtgcaagaggatggtccagatccacagattgagaaacatcaattatataaaggtgcccctgaaaaagtcaagataatatcattatatttgtttcgttttgctgccacgaaacgatcaaataagtgacccttgtagagataaatcaaaactcacttcaaaataaagtatgttatactcactgagatccccatgcactaatttgcacttctgatataatactcgcatttgaattatcaactgaaataagaagagattaatcgtgacatatcaggtctaagtaaagtattacaatgatacactcaggaccctctaaatgagaaaataagacatacctctaagtaacactcgcgcaacttgtccagagacaatgcggcatccttgagacgcggtgcagcccaaccatccctccctgcaaattataaatagataaaactatctttggtagctgaaaaatcgttacttcatcaatgaaatatgctaatgaatcagagtagagtgttgcgtggaaatgagtgattaaaacagaagataatgcataagagcgaacctataaactccatgactagaacatgaaggcgtagaagtataacagctggacacctaattcctgctgcatgaagcctggcaatgaaacatgtataatataaccaactaagaaattaccagaatcattgttacatatatgtgaccaaaagtgactacttctccggcttctgttttgaaaataacaagataaatcaaccctacaatacattaacaagattccatatgaaaattgtaggtattacctcttgagatttctctgttctttttcagcccatgtcttcaccatctttcgaggattgtgacgacagtagccatatctaaaacggtaatctccttgtacatatcgatctcgatccctgaaatcatcacagttataaaaatagggactaaaacaaaatcattaacaacctctattcatgtaatactaatagctcacttgaaaaccagaacagatgtcttgtacacttttattgcaagttccgaaccgtcagattttgtggcatgataaacatttgcctgaaagacaataattaaagagagtgctttcaacaaaaaagaataaaaacagataatctcaaatatgagagttgtgaaatgtatcatacttctttgcctgtcgagatacagccattaacatcgttaaacacacccctattaagcattctaaacaataccatacgcgtccttggatcaagagcctggaacaaagaacaaaacaacatcaacacaatgcttacatcagacccgaatctttgtgtgacagttagagcttacctgttcaacagttgcccggtccgctttatcagtattcctacttctcccaatttctgtatctctaagacttccacgaatcgcagttgtcacagaattcgacatcccaactttaactcttccttcccatccctgcatcatcaattaactcaaaatcacatttccagctacacaaaacctacctgaacctaaaccctataaactcaatgttcatttgagcagagactatgagcaattcagaagctatttcaaatgtaaagatcatatctttataagaaattcagaagcttttttcaaattctaaacaaaaattcgataagaaacggtacctccaaaggagaagcacgaacgtgactagtaagcttctgggccttatttgaaataggctgaagagcactagagttagggcgtgaaccatgtccaccgtgagcattaggacgacgagcatgaagagaaaagccaccaccaattagctcgtcatcgtctttaccgtctagccaatcaagagcttcagcgatatcggaatctgacgaaagcgagagatcatcgtcatcatcttcaagctcttcttcgtattccacaaagggagtaatcttcggtggtggctctgcaactaccactacttcctccatcacttgtttttcgtggaaacaactaccggcgacgagaatcagaagaagaattcaccagtcgaaaacccttttctttactcagacaaaacgacgtcgtttaggtttcggttttgaacagtttaactaaaccagaccggacaagaacaattcttggcggtgagtaggattggtttacccgacccgaagataaacaataaacaaaagacaaacacgtgatgctcacgtgggttcttcttcaactctctcgccgtttctagagctcttcggtgtcctctgcttcttgcctgagtttagtaaaatttcaagcattgtctcttttactcggtaagttttcttgtttgatacacatattcgcttctcacatcagaaattgatatcaaagtaagttccttttttcttattattctctcgagattgacgaaattgaactctgtttctcgatttctaggaacttatcttgagcactctgtcccactctgatttgacctttgaaagagctcttatataaattcttagtatagggattgtgtttggaaattttggatataagtttatgttttgtctagctgttaatgagcacaaagtttcatgctttttagcttgttttctctaataataggtttttgaacttcataggattgtttggagaaatttttggaggtgatg

SEQ ID NO: 1806 - DNA, 3000 bp, Unknown
  misc_feature (1)..( 3000): cDNA_ID_3064369_gDNA_ID_1620450_Annot_ID_157449 3000 nt of promoter + ATG
atcacaaatgatcagttccagtgtcattagacttgagcgttagggagtttttaagaggacaaaatctattctgtcttcccgaaaaccactatgaccgtgagggggaaacaacttcgggaagatggttaaagggacataccgttcatcggtggtctaatcgatctttttctcgcaggttattctcgagttctcgcacacataaaagtttttaatcgtatgaaagttcccgaaaatttgacaaaaacttaattttttacaattataaaatttcatttaaaaaaaaacttgtttataatttgctttcttcctattaatcctttgattcctagacttattttgctttcttgctcctaaattaattgagttgctctcttggttcgatttaaattgtttgatcgacatcgatctggagtgaatttggaggaagtgtagaccctaaaaggtcgtatctcaaactcgatgttggcatgtgatgcaagaatttgacttacaagtgggtgtagatcaagggttgatgttaatctactatccgatgtaattcgatacgttccattgatgtgaggaggggccaatgttcatgcttaagcctctagtgttatcaccgaactcaagacaattgaatgctgcaagattgtgtactaagagtatgcagactgattttacgtgtcaagactttccactgcgatttcaaccacagtgtacgtatgttttcagtgacaataatacggtattattaatacccgactctttcacaaactttggaaattagtttgagttcaattcaaaatcgcatttaaaaaaataataaaaaaattacatgaaacccacaatatttggtatgaaatttaatatggtagttagtaacctcgtaggtacaacattcatcttcttgctgccgacatcataattgttcataaatatttttgaacacgtacatataatgttcatggaccaaatctgatcagactcctaattagatgaattgtgtggtcgattttgagatgtactttttgaatcataattctttcaactactcgaaataaatttccctcaccatcccaagactactagaatagcatattcttaaatataaattattatataaccaaactattattctttttaagattatcactggatgttacgttgaagttataagacatgatatatatcactcaatttcagaaatgagtagagttcttagtgcatagtttttcttaaacctacaaggctacaatgaataaagcacgacaccatactgttctcaaaatatttgtatatagtggaactcggttgaaacatatatataccagtaaagttatttttgtttttgttaataaaagagtaactcgtgaacttgaaatcaaggagctaataaaaaattatttttgtttgaatttaactttttcaaaacctaacacgaaaatcagaaattctgaggggttagaatggttctcacttgtttacgtttctacgtccaaaatactcattgagttttcacattctcaagttttggaaaaattaacaatttcgtttataccactaacatgtttaaaactataattattctaaaactttaattatcaagttcatttcgtttagctaaaatttattctgttatatagttatttattggatataaaccctaaatttagtgttttgatgccacacgtaagctgattttcaaatcacaactttataaattccctcattaatttatcttctaatgcatctatcaacaataacgttatttatatatgttgtctatatctattaatctaaatttgttacaaacaatttaagtcagcacttatcggttttatgtctacatcatacattatgtaggttgtacgatgacgtgggttgtagctagttaggtataaaaatttacttttaaaagaaaaacataatctcctcatcaaaagcttttaattgaatttaatagccagggccaaatatgccaacaatatacaccaaaaaacatatttgtcgctagaacagtgctaattaagggactcacatactattagacattagtgcatgtcagccaataggcttattgtattttcaacatgttggcccatgtcagccaataggcttatagtatttgctaaaaataaaaatatatatatttgctcaagtgttggtgttgcatggttcaatatttatcaaaactcaaaagaattgttgactaactttacatattaacaagactaatcatttttctggtttgtccttaattttaaatatgtaaaccactcatttatgatttctccaatttagaaagagtgagatgtgaagtttctcccaaagaaagaaaaaaactacaggtaaataaagtgtatactgctttccaaaatatgtcgaattatcacaaaaataaaacgaatttataattaaacatctcgttatggattttgtatagaaatttattggcctacaactgttaatagacatattatttggcattgtacgtaatctagattagccaaactatatatagaacatcatgtttagctgatttttcaaaaaaaaaaaaaaaaaaatcatgcgtagacgaaatgcaagttttaatttaattttattgctttctctggttagctctagaggtctttaatccaccgatcttaaaaaaaaatccaactttctactttctctttctaaatgaaacaattccatatttttcatttcatttatacatcatacacttaattaatgatattctctttctagtaattagtacattaatttaaatttatcaagaaaatgctgttgaacatatataatcaattattatgaaatgaaatttataatgaaatgatttgtttgatagaaagaataaattataaactacttaagagaccgacgaagatagcaacgacaaaaccctaaccttataccaaccctcatttaataccaataaaaaaagagggacaaaaaaaatcaatgctatataatcgaagtatccactacaaaggttggagaatccttaaactgact

SEQ ID NO: 1807 - DNA, 3000 bp, Unknown
  misc_feature (1)..( 3000): cDNA_ID_2143994_gDNA_ID_1620450_Annot_ID_157451 3000 nt of promoter + ATG
ttggaccgtgatgccaagaagattctttctacaattgtaataccaaggaatggttatttcgtcaccacttaagcctttgaagcttctgaacaagttaccgatacaccccagaccatcatcatcatcaccatccctactagagatctgacatatatacccaagaggaagaacaagaaacatgcaaagaagatcaataaagccttcaccacattcagcgtaaataaccttcttgttgtcctccttactcaaatacactttgaaagacaatacttggcctaaaaccgaatcgcatggactcgatgccttatatgctctcttagaaggatatggcgaactatgaaaggggaagaatgttgctgtcaatggagtttctgatgtgaataaggatcgtagcaaagtcattgcctatacattgagattgcacaagtcaaaaagtttcattctattaaaccaaaaaaaaaactaagagaacaacacgataaaagtacctctcggaagccaacttctggttcaccctcccctaacttatcgaacacgttaacgcaacctaaatccttgacacgtttccggggaagatcccaagaaaaattctcgattgtcaaatcatcactcaacataaatgccatatttccatcaccatggacaaagactccatcatcatcacaactacctcccaatctgcttacagattcttctccttctggtgacgaactctctttgttcatcaagtttccacacctacatcttgaagtattgaagttactaaaaaactctctgcatgatgggctttgcaaagactttggacacataaagtacttggtttcttctgtgtcgtctatgttaatcttcagcattctgcattgacgttccttcacgctcttcgggtaaaccagcatctgcttacaagcttcgttcctgaaattatcgatgctcatgtctacaagacttttataaaggttgttgaaacaacctatgctgaccttttcttttaatcttccgtgatgctcaagcaatctcacaattgttcccaaaggcatggtaagaaaactatagaacaaatcaacgaagtcactaccagattgaatccagacaacgtttttcttgtccacatgatgtacaagaagaacactgatcattgttttccctgatccttgatccattagagattctggagaaataattcacgaaagatgagagaaaatgagtgcaggataaaaaacaaactccacaaaaatcccagtggtacataaagacttaatcttttgagcttccctgtagatggataattagagttacaagtctcgaggatataaccattacataatatgcctatggactatatatggggtagggaatacgaagaggtttcgtgtataatcttattttaactgaacgtgaatattcaaaacatcaaaccacgcgaaactttgtgctttcccaatgacttttattaaattgggagatgaagcaaacgaaagagattactccataaaggttttaaaaaaaatcaaaagtttggattgttcaaataaaaaataaccaagagacaaatgattttctacatgcttatacaattcatgactacgaagaaccctaatgcataatactttcctcttattgcttttacatcgtttacttacttgccgcttaatttatgaaataaaacacattatgtattgtcttttatgtggacaacgtctcggaacaatcttttctgtccaacgtgaaaagagtgttttggaatcgcagccttgtgcggttgtgccaacccaaaggataccatgacacaaggggtttgacatgccaaatgttgttccaaacgtctctagaggagaaaaatatatgcacatacgatctccaacttgccaaattggaacattcattcaaaaatgttctccattttccctcattttgatatccacacaaaaatttcaattatgtttaattttttgcttctagatcaaatcaaacacaagtgtataatacctactaaatattatcaacaagagatgtatataatacgcacgggtaaattatctagcatttgataaaagttaaaacaaactaatgggtttagtcataaattgagatgaattataaaaccggtaaaaataacgtgacatctatggagtaacataatttacaagcgggttaacaacgaaatattagttttgttgtaaattcataaccaatttttagttgagcataaaaagaactctatgtaaaactcttatttgattacaaactaaactagacttaaaacagagaatttgcaataaataataaatttaaaacggcaaaataaaaagagacttaaaatggagttgcagaaatcctttaaacgtttgataaaaaactaatcgtttaacaaagggtttgaatggttacggcggttggggcggacaaaacgtcaacggatcagaccgttttttatttaccattcatcaattatagtccgcagtggtccggaccaaaaaaaatagaaaaaaccgcagcggtttttacatacaaataaatttggtccgcagcggtttattatccgcccaaaaatgagatggactaaaccgcagataaattataccgctttgtccgctgcctccagtcagttcctcctacacttctctttgaagcaatttacatgtctacaaaaaccaaaaagattgcagtgtactttactcctagtttcctctaatcccaacacctaatgtgagatagttaaaatatcattatcgattatacataaatcaatttaaccaaaaaaaaataaaaaaaaatttactattgataattcaaaacaaaatatataaataaaacttgggaaaatgaaaaagtgacaaaaagtggtttcgttaacaaaaagtaaaattgacatgacttgcattgcggagaacaaaaatcagtctctcatcactcactcataatcatgaatttgatcttcatcatcttcatcgacccaaccgcttaaacctctctctctctctttctctctaatttctaatg

SEQ ID NO: 1808 - DNA, 3000 bp, Unknown
  misc_feature (1)..( 3000): cDNA_ID_2143790_gDNA_ID_1620451_Annot_ID_157475 3000 nt of promoter + ATG
ctaattagacgcagtttcactgtggttgtttgtcaacaggtttgcgacagagagggcatgagttattacctcggatcaaccactgagtgagacatggttcatgaaaacaatgagtgcagttaggcaactcgcagtaatcatcggatgtcgacaattcctccaaacagatggcacaagtcttcgattcttcttcttctccttggctcatctcttggtccaaatctgttgccaacggaggcacaacgacgtaaaccttgtgtgtcaatttgacagagacgattatgaataaaggtggttgttgtggcaagtaaacactttgacttgtttgccgttgttgggcttcgacaatcttacaagatatttgctcggacaagtcatgatcgtggagttgggtctggagatgttgatagacgtcgtttggtttgaaacttgggagtgtcagagagattagtgggtcgtgacaagtagaagaatcatccgggtaagatccgagactcgtgacacaattatccttgttgttaatgagaaattcctctacttctctgtattgactgattactaccgtacttaagaaccctaacgacggaggttgagacaaagcttttacatgaacatcgagtttgaaagattcagtttccattgtcgagcgagtgaaactagacaaaactcagagagacagagtgaaatattgttgagaaattagatgatgattcgtaaggaagagagaaaaacagagattgttgagaaaattgtaattgtggagaagtcacaagtgtaatgttgtgtttatataagcaaaaagaaaaaaactctgattataatttgttgtaacgtgttaacctaatttcctttttcctttctaatttcctttttttcttcaatatttccattttttttagggttaatttgtaaactagtcacttttttaaacttaattagaaaagtagtcactttactattcataatttgcaaaatagtcacttttcactgtttgattcgtacacttagattgtacaccacttttagtgtacaaatatatataaaaatacacagcgtacactttatatttgtacactaaaagtgatagtacaatccaagtgtacgaatcaaacagtgaaaagtgactattttgcaaattatgaatagtaaagtgactactttcctaattaagtttgaaaaagtgactattttgccaacatacccttttttttaacaccaaatcaatatttccatttttctttaacgttcattttttattgttgtatttcctttttttgtcttgtttgtataactataacatatctcattatatataccagagcttaagccaattcaatttcgaaccaaaccaaaccgaaagcaaatcgaattcggtttaacttggttttgcaaatcaaattattctctagtaagatgatgatgaagatgacgagagaattgagatgacgaggttgctctctaggacgttcccgtccgtgaagcttcgcgattccaatcctaaagctcccgaattcaaaaatttgaaaaattcacaaacccaagttccgattccatcgtcttcttctccgcaagagaactcaaagattcccaaatccaaatcctggtctgtttatctcattctctccacgaccgaacccatcaaaacatatgtcggaatcaccaccgatttttctcgccggttcgtcctcctctctttgaatcgagtttaggtagattctgatggaaaggcacgagctttcgattcatagttcttaaggaatgtataaagcaaagtgctttttgattaccatttaggtttctgtttcaaaaggcttgagcttttgattcttttggatttgaaggaatttgaaaagcaaagtgtttgttattggttgcagattaaagcagcacaatggtgaaatcagaggtggtgcaaaagcttcaagtgcaggaagaccatggctttgtgcttgcattatcactggattcacttgtttaagtcaaggtactatctctctttatctcctaagaattgaacattgcattgtgactgtatatatgcttatggatgatgattgatgagcttcccttgtttaatttccgcagcttcttcgtttgaatcaaaatggaagatctttacaagaaagttaccgcggagaaagaaagacgaagacatgagtcagagtgatgctttgctacaacaccgtaggagagctttaaacaaagtcgaggaatcattagactgtagttatcttgaaactgactggaaaatctaaccaggtaaccaaacgactgacttaattaatcaccggtgtgctctgcagccacacaagattacgtttttatgctgggacttgacgacaatagcgataagaatatagctagtatgtgggtttaacttgtcatatggcaatagtttgaaaaccacattgcacaacctcatgtgcattgatatttgtagctgttgtaacttttaagaatgataggcaaaagtcaaaactaatgtgttgtaagattttttaattcattttgtgtcttcagtttataaagaaaaaacaagtatagacaatcatttttaagatatattgagaactgttgagtcggcagaagaagtgaaatcatctgcagtagccaattttggttatgttaagcacgttcatgtaccctttagaatcatcactcgtagttcgacaccacttttccatttttgagggctcggctatgtgtttccaaacatattccttaaccagaatgccacaacaatacatataatacaaaatcataccaaattatatactatttattcaacataatcttaaaaatctgttggggttatatgagagcattaataatatgctcctgcttgtataaagaaaataagaaaatggtgcaacccacgtccatttcaggccggtggttttgtttattactccaaaacatgaactccattataacccaaaatcgaaaacccctttactaattcataatcaactatcaccattttcgaccaaaaaaacaaaa

SEQ ID NO: 1809 - DNA, 3000 bp, Unknown
  misc_feature (1)..( 3000): cDNA_ID_3064389_gDNA_ID_1620451_Annot_ID_157488 3000 nt of promoter + ATG
acttaatggtatattgtataaacaggtgaaagacgatcatcgagcaaaaaaagcagatagtgcagaaggtatgccataaggataaaattatgtaatttatgagtctctatgctaaagctactgatttggaaaaacaatattcccgtctcaggatttgactgatactaagcaaatctcaactcataaaatcgaaaatagtgtgtctcttggctattgatctttctgtttaaccaatatgtgagaatgtgaatcaggtagcaggcctttgctacagctcaacgaggagaaagctattgtcctttacgaggtcaattagaactgaaatggtttctataatttaaaggaccttttctcttatttttctctttggaacaaacaacttatatcatcttcttgcatttgaacagcctgattcccatccaaagcaagcaaatcggtctacctcatcagatgaaaactctaagtatacccctttgcgtgaattgttttttggttttcaatgtttttcaacaaagagagtagttaagtatctaattggtaatatgtggaattgtatcagagctcaagttatgaaagttctggagacacggaagataatgttgcagaaagaacaaggaatggcctttgcacgtgctgtggcagctggttttgaggctgatgatatgattcctcttatatctttcgccaaaacttttggagcctcacgtttgatgtgagaagattgtagtttacaccaatttcttctttgttttgcaaccaataatctcatatccattaaagtctttaagtttgaaagaaacttttcatagacttacttctcatgtttggtttcaacaatgttatagggatgcatgtgtgaaattcatggacttgtggaagaaaaagcacgaaactggccagtgggttgaaattgaagcaacagaagtaatggcaacacagccaaacatctctacaatgaacgactcagggattatgttcgcaaatgctgctaatatgcctgggacacctgaaaatagtggtaagatgattcttatgagtcatagtagctgagagttgaatatcttttcttgcattgtttggcattgcttttggcacaattgatattcatttcgagaaacttattgtatccagatgcgaagtctcctacagacaacaaacgaaatggaaatcaagaatatgtgcaagggcagcatcggcagccgatgtatgcaccctggccagttcactccccaccgggcacctttccagtatttcaaggatatacgatgcagggcatgccatactacccaggctatccaggagctagtccatatccatctccctatccgtctaccgatgattctagacgtggttctggccaaagaaaggctcggaaacatcattcatcttgtagcgaggactccgaatcagaagatcaggaaagagataatgaaaaatcaagtagaagaaggaaatcagggaaggtggtgattcggaatataaattacattaattcaaagaagcaagataattctggaacagaatctgatgctgatgacaatcatgaagaagtggcaagaggagaatgttacaatggtaaagagagggcaacaaaaggaacagaggctgacactggggattggcaggccttccagacttttttattgcaagatgctgacagagatgaacgttccattgaccatatgatggaaaaggagattagagggaagaagaggcaaggtacaggaaagtatgatcctttggcacatggtgaacgtgaatcaggaaaatatcaagaaagggatacagctgatattcggaatggaagtgtgactcgtagaatcaggggatctagtgactctcttatggttcaccagagagaaaatggttttgagaattcttctgatcctctcaacatgaatggatttgatactccaaggaatggtctggataagagaaacatggatgatgattcttatattgttactcgggtatcttcagcccgagatgaagctggaagaaataagagaaatgctatagacattggttcagagatctcttcgtgctatcaaactgatggaaatgaaagaaagcaggtcaattatgagcctcatgatctgagcctgatacccgaacgggaaacagagaagttatcagctgggtatgatcctgcattagagtttggatccaaagctttgaagaagaatagccaggcagctggaggtgctaagaagttagtaaaagatccaaaatcgagactttctaaagatgctgcagataagaggaaggctccggggccaatacggaaaggaagaccgacaaagatgagtcctttagatgaagcaagagcacgtgctgacaaacttagaaatttcaaagctgacctccagaaaatgaaaaaagagaaggtaaaatctcggcttaaacaatttgatgatagaattgctttttctactaatcatatagaaagcacaatcttaaaggatataaaccaacttgtggttgaaaattcttatcataaactcttattaccattctttcttgttttaggaagaggaagacaggaagcgcatcgaagctctgaaaatagaaaggcaaaagcggattgcttccaaaagcaactcagcggtagggcagtcacagttgcctgcacaacaaacaaaaaaacaaatactaaacaagttttctcccggttctagagcctctaagtttagcgactcagaaccaggttcattgtcacctcttcaacgtcttcctagaagaactacttctctagggtcaaatgactttcagaaattccccaaaaatggtaaactgagtaccgtaagtaagtcaacaggaaatatgctaacaaggtcgatatcaccgttacctccagctaagagagaaagcatagcaacaggaattaggttaaccaggtcgatttcaccattacctttgtctaagagggaaaccagagttagtctagatacgcagaacaagtcggtttcacagacaagacgattatcagaaccaaaaatg

SEQ ID NO: 1810 - DNA, 3000 bp, Unknown
  misc_feature (1)..( 3000): cDNA_ID_3064420_gDNA_ID_1620451_Annot_ID_157476 3000 nt of promoter + ATG
tggtggttctggaactggtagacctttaccggctcagattacggttcagccaccgaatcgtccttattgatgattctcaagaaatttgtatactttgtaaacgattcttctctcttgaactctctcactctctgtcttgtaagttgattatatatatatacacatagatgagaaacagatttgatagcttctgtgatattttttcttgtgttgggttgttttgttactgttcatagtcaaaatattcgaatttgtcattattggtggctcaaatctttagtattaactattaagaattaagatgatgggtttgatccaatgatacgaaaagttagcttcttcttgtatattgttgtaaatggactttgttggatgtgtttggttcatgtctagtactcaatatgtgaccatgagatgtttcaacagcctcttgttccaatggtatgaaattggttcatgtctacaacctcaaaacgttgtagaggaaggagtgttgtgtgtgaattttgtgaaaagctgcgaatagtaaagaggaaacggattagttataacaaattaaacagctacaattgtagtagatggtctctcaagtctcaagattagaaacatctcggagccaaaaaaaggcttcctacagccatatagaagtataatctcaaatcattatccacacttggaactatctctaaagctcatttgttatttgatggcatttctagttcgatatgccactccttaaatccgttgcgttcgtgaaggatcaatggggttcaattcaggtagctaggagatttgtaccaacttgtagctttctagaattccttgtacaatgtgatccaagtaaaagaaagaatcggttaaaattttcaatataaaactttaaaatagactactagtactagtttgagctagacagtgactcatgtagaaacaatctctacaacataaaaatctacgaaccataccgggttaccaaacgttcttctcaatctcaccaatcggtttaagctgaaaacccgaattagcaaaatcttcgttcgggctgttttggttaatccggtttacatgttttctcattgctcattttcattttcccgccgtgacagagcgcgtaaatctcaaaaccctaaaaatgtcgaacatatacaattcattaccttaatcagattttctcaacagaatcaaaatcaaaatccatggaggaagaagaaggatcaatccgaccagagtttccaatcggaagagtaaagaagataatgaaactggacaaagacatcaacaaaatcaactcagaagctcttcacgtcatcacttactccaccgaactcttcctccacttcctcgccgagaaatctgctgttgttacggcggagaagaagcgtaagactgttaatctcgatcatttaagaatcgccgtgaaaagacaccaacctactagtgatttcctcttagactcgcttccgttgccggctcagcctgtcaaacataccaaatcggtttccgacaagaagattccggcgccgccaattgggactcgtcgtatcgatgatttcttcagtaaagggaaagcaaagactgattcagcctaaagtaaaatttctcattttgttcacaattgcaaattttactctgttctcaaatcaaaatcttgttttgctaaaagtgtagtgagaatgtatggatcatgaggaacttttataggaattggtaattttaaagatgttgtgtctattagcatttctactaattggagaaactgattcttgtcctgtgactgtgagatacatctcattgtgttgcttagaaatctctgcattgctctaactttggtgtgtagagattgagagagagagagagagaggtttgggatgtgtattgttcttctaagctattcttatatgaatactacttttgagtgtttatgttcttctgaaagaacatggctatagaagttgtcgccgttacaatagtatgttatactttctttgattgtgagctaataagcgcggttgtgaccgagcaaaatgaaagcttttgcggaatgtatgtttcagttttctttagtttttcattctgacaagttttctagagtagaagtgaaccagtctgatgggtaaagtctgaaacttttaacaagaaagtgtgatatttctcaagatcactatccatggttacatttctcaataactcctctcaaacttcatcttatatcatctgctttgtagtgtggatttggtatatgttctttatttgcttttatggtttcagaccaagtctagtggtattcaatgatgacttgagtgtccaaaagctcttattatgttctcggaattgtgaaagaaaaaagtgattatgttgacatatcaaattgattgaatccaatggaacatccactttctttaatattccgtttagttattatgagaacttgaaccgttataattaaacaacataaaccaagcaattgtgttcttttcggaacttgtggtacatgaacccggcgaattggatttacttcgttatttgttgcctcttccattcccgaaacctttaattaaggcctttgaccatgtcttctctaaactgttccacttcctccacttaagctttatataaaacctcaagtcctatgaaaagaacacaattgcttggtttactctaacaaggtaaaatcttacgcagcatatatagatcatattgttgaatatttatgaaagtagtttttccaagaattgatgtgtttgtagtttcttctgtttctaagcactaggaaaccatttctttgatgccacgttagactatgttcttctgaggtttttgttcattgttagcctcgttacgtattttagcatgtatgatatatgaacagactccgctctgtttagcttttataaaattgttacctatttatacaaaatcaatgtagctatcgtctctaacatggctgtgtaaaaagtgacctttttcattgtatcagtgcagattttgtatcaagacatg

SEQ ID NO: 1811 - DNA, 3000 bp, Unknown
  misc_feature (1)..( 3000): cDNA_ID_2143807_gDNA_ID_1620451_Annot_ID_157484 3000 nt of promoter + ATG
atccttcttgtaaggatgttattcatacctcatattaatgtttccatctccaagtgaagaggcaaagaactctgtcggtgacatattgatcctagtagcattatttgtgcatcgctttgctgacaaatccaacttaaacgcacaagtagaatcataaaacttccatgaaccatcaatttgacatcttaatgtcgagatattacttccttagatgatttcctgttcaattgttttgtctgaactcaattagaccttcttccatgacaatttttcacttctaatgtgattataaatgtcaaggggtttctatagatttcttgaaagacttttaatttggttcttaattttcaaaataatcataaatttcatggatgacaattatagttttcatgttcgtcagaactactaggttctctccaatataaataatcgagattggtgaaaatcaaacttgatgaaaaacttcatggaatcatcaacatatatgttaattatttaattagtgaaacttataaaatttgaaaatcttttcttcatcaacaattcatttttttcaaaatttcatgtgtaatctaaagatagcatggtctttaatcatgttattttatctgacaacaagaaatttaagaaaataacatacctatacgttaatacaaaagacattttaattattattttttgtttggtgattcatttttttaaaaaaattattagagtttgggtatttactttaacaatggaaatagtaaaattattactccatatccttaaaaacccttcttgaatggatcaaaaaattctgatactctctacatatatataccgttaacattaactataaatgcaaactgcaaatttaaaaaaaaaaacaaaaactaaacggttgactttgttaaatgatttgagcagaaacttccattacaaccaattcctcaatcaaatcacacagacaacaacaacactaaagcccactaagtcaacccaaacctttttttgtccaccagctagtcacattatacttttgtctttacgtagcaagtcaaagcgacatagcaacaaaaggaaacttgattttatcaatatcatgggcctattccctatatcaatggcagagtttcgttcatttagcctgtgtaatatgaccgataagattttctgccaaatcatgtgccaaagactcaagggaatattgctaaatatcgcttttcgataacatattacgtattacattatagtagttcaggaaactttctacgtcatgagatatcatcaatttttttttaaatgataattcttaacatgtgattttcggaaatacgggtttatagcagatccatgtttcattattaggtagaaagaagacattttccctagaccacgaaaaaaaaatgtcagtttaccgcaaatgtttttacaaaataacatggttctcatccgcaaaacaatttggtcaaaatttggcaaagaaagtaaaacgatatttcaataaatttctgttattggttatttacgtatatatttacaactgtaaagttatttagctaatttaccctataaatttaaaacccttcttgaatgactgagacaacaagatagtacgtacgttaacgttaactatgactgagacaacaaaatattaaaacactaaacggttgactttgttaaatgataccaaaaataaaataaaaaaatctatttcaagcgtggtggttaagatccaaaaccaattcctcaatgactaaaagacaacaaaacctaaacccactaagtcaacccaaacggttttttgtccaccagctggtcacactatatttttgtctttatgttcgaaagtcaaagccacatagcaaccaaaaataactcgatattatcaatgttatggggcctaagatataagcttcaaagttatccacgacggttgattcatgaaatatatggacattactagaaacctatctaaagacaaaaaaaaagcaataatgataagatgaccctaaatttaatggtaatgttataggctgtcgcaagttcagtgcatacgaaatatgcattattgccttacatttctaagaaaaactatgtataacccacacatgtataatagtgctttgtgttagtattatcgatgtatatcagaaaaattcagtccaatttggagaatttatctcattttgttgtgatcatgatagttagccgatcataatgcatcttgacgtaaggtataagcataaaccaacttatcaaatcccagacattctcctcgtgtctatggaaaagaacgaccataatttgtttgatattcttatcatgtggacgatgtggtcttgaagagtagaacatacatcatgctcctagttttcaatcacggaatcctagctgtgactcactctctgaagttagaaaactttattttgccgcgtccaaaatttcgatgccaaatctaatgaggtaaattttttaattaggtataaataatagttctggatataataagtttttttaaagcaacaagttagaagctcaaaaaaaaaaatcatttatacatatatacatttcatatctaaactatttggattcctccaaaactatctctaaactagtgtaaatcgatacgtgtgaaaagatggtggacattccaaaaagtaaaaatcaatgataatagtgtttttatgtttattaacgattataataatgttgtgcaaaacaaaacttagagataaaagataaattgatataaattcaacacattaattaatgtagataatttattaaaaacaataatatggcatataactcaagtataacaaaactgaatccacatgactaattttggtattatatataactcgtgtagatcccctcctcaaaaaaagaaaagtaaatagaaattcaacacacgttactcttaaaagttaaaagaataaagaatccctctctccctctccccctctccccctcaccaccagctcgcataagttttcttgtccccatactcatatg

SEQ ID NO: 1812 - DNA, 3000 bp, Unknown
  misc_feature (1)..( 3000): cDNA_ID_3064547_gDNA_ID_1620452_Annot_ID_157499 3000 nt of promoter + ATG
atgtttcatttatggaactgtaatatttatgtacatttgtgtggttttcttgcaagttagaacggtgggaagccacctttgagttatcaatcatttctgaaggttgctggggagccctcatgtgctaaatctgaacttgtgatgtcttattcttcacttcctccaattggagatattggaaaccttggcatttcagaagtaccatctcttgaggaacttggctacaaagatgatgaacaagtaagaggtgatctgttttctttaggtcgtttaacaatttatccatctgagaatcttatgctcatgtaaatgtctgtaggctgattggactccttttagaggtggtgaatcagaagccttaaaaagattgactaaatcaatcagtgataaggtatggtcaagaacttggaagtttttctcttttagaaaaaaatggtaggaatctgctcgattgagtactttgtcggactgaaggaaacttactcctggagaacttgaattttatcactttaagattttagaattgatattcttacattgacttcatagatttatatcttctttatcaaagtcaagggctgaattcgttatgggttttatttgtagtgtaggcatgggtggcaaactttgagaaaccaaagggtgatccatctgctttcttgaagcctgctactacagttatgtcaccatatttgaaagtgagtttcatgacatagttttgcccacttaagcttcaccctcgattttcctaatatttccatctaattcctgacatttaagaagttcggatgcctttcttcgaggtacttttatcaatgccttcaaaatatttataaggatgttaaaaagcatacatcgccgccagtttctctcctggggcaggtcagtcattgacttacagagcgttttttatactgcctgactgcagaaagttgattgctttacttttttactttagttgttgtggcgagaatttttctataccactgcatttggaactcctaactttgacaaaatgaagggaaaccggatctgcaaacaggtaacaactgtagtatagtttcctgatgatgttccttcattttttagatgttcatgcttttttagaccaatatttttgttccatacgcaaactagattccatggaacgaggatcatgctatgttggctgcttggagggacggtaagacaggatacccttggattgatgccatcatggttcaggttagattttagtcaaactgaatgcctttagctttccttttaagcatcatttcttaatcattctctctctgaaatttatagcttctgaaatggggttggatgcaccatctagcgcgtcactgtgtagcctgttttcttactcgtggggatctggtaatgctgcctctacaattattggtttctatctccgaggatttcactgacatgcttagtttctggtgttagttcatacattgggaacaagggcgtgatgtgtttgagagacttctgatcgattcagactgggcaatcaacaatggaaattggatgtggttatcatgttcgtcgttcttttaccaggcactctctcctttctgtttctctttctaattatctttggctttgttagcttttttgttctgtatagttaaattgaagtaaagcaacttttgtgatgcttacacttgtgtcccaatgttttgttatggttttagttcaaccgcatctactctcctatatctttcggaaagaagtatgatcctgatgggaagtacattaggcattttctaccggtactgaaaggtaactgaagtttgtttccaccatcctggtaagtttgtttactgtgtattctttcattagctaataagttttctgattcagatatgccaaagcaatatatatatgagccatggacagcaccattgagcgttcaaactaaagcaaactgcatagtcgggaaggactacccaaagccaagttagtaataccgtctctatttacatatacatagtagaaagatacaaacattattgtgtctaaaattttgagaaatgatgtgatcaatatcatgaagctagttgttctagtgaatttgaggttgctgatagataaagtcttctttaagttgccatagttctaacttcgttgtttgcagtggtattgcacgattcagcaagcaaggagtgcaagaggaagatgggtgaagcatatgcattgaacaagaagatggatggtaaagtagatgaagaaaatttgagggatttgaggagaaagcttcagaaagatgaacatgaagagtccaaaatcaggaaccaacgaccaaaactcaaataggtagaggattaaaaaccttttctgaaattgatgaagtgtgtattgttacaataattctagctggtatgacttaatcatggttacatttctatttctatgtaaaaaaatctgttatgcatcaatgtgtcatgtaacacttctcttgaggcaaatataaattatttgaatttttggacagagatgtaattagtaaagtaacgaggcgaatttgtaaaaaaggaaacatatagtaatcaaaattgaagaagacaaagaaatagcttcccgaaatagaaatctctcagacatataacaatagcttccttcttcttcttacagttactttcttcttcgattagccacttttttttcttttgtaattttcctttcttttttttttcttttgaattttcgggaagcagcatttccactggagctgcaaaatcttcctatcaaaattatagatcgatccaagttttagattcgagaattattttctccaaattagatttatatatcaaaaggaatcgaaaatagacagcaatttttgttttgtcggatcgtattgaatcagctgtgaattttagcgccaatttaaccactgaatcgtttgattagaagctaagatttggtcttacgatcgatctaagtagggttcttcttcttaagtgtgtgttttgttaaaattagtaaagagagatg

SEQ ID NO: 1813 - DNA, 3000 bp, Unknown
  misc_feature (1)..( 3000): cDNA_ID_2046859_gDNA_ID_1620452_Annot_ID_157517 3000 nt of promoter + ATG
atgtgtcttcatgttttttggttccattttttaaagatgttttttggttccatttcccttaacttcgtttgattttcaaggaaatgtcaaatatctgcaattatataacataggtaaaaaaagagaggttataatcagctgtacattaaacacatagtgtatatgccgcgatttatatgatagtctccgtccactcaacaaaaacttaaatctacaaaataatctgaattgatattttgaatgcatattaaaaaggtgttatttgagatatcatttttgaatcctacttgagagaagtggtccacggatttgattacatgatactcgagtgtgacatgttcaatcctagcaaaaagatatcatgctaaatttgtcttcttttgacaaaagtttattggttttcagtcctagaaacttgtaaattatgtaagcgagtgacaaagtttattggttttcagacctagagagcagtgaatgacaaagtttattggtttgcagacctagaacttgtgaacgggcagcgaataaagtagctcatatcattacgctttcccgattctagttccttggttttatatgacgacggttatctgttgtgattgataaaccggatcgtataactaattagtaattcctttcaaacttttagtttgaagaagatgttgagccaaaaaacatttatataatctatccgaagaaacttgtgtttgcttcttaggccatcttcaacggtaaaattaggtggattatcttaaaatattgttttttaattattatcatataatattattatttacttaaataattattctgaaaataataatttaacctattaaaatgtaacctattatttacttttctctctctcctactttattattattttatattttttagttagtgaaaaaccatactagagactactgatggagatgttcttatcttttctgtctatttttgactttcatgattcgcttttagtttcttttcttcggcttcgcttttgggttttctattttagcttttttctttttgcttataagaaaaaaaaaaaaactaattatgtacttattgtagtttaattatagtaatattcttttgattttttttcttttttttcctactaaacagttaaagattcacgtactacttatcaaattcagttcagacagtcggacaatatcaataggtgcacctaaatttcattccaagttttaccctaccacaaaaaaaaaaaatcattccaagatacaggcctaaatacgtgtacagaatgttaaatcaccaggcccaattatggcccatattcaaatatcaatagcacctaaatttctagtttctacgtcccttcttcattttttccttgggtcaactaaaattcaaaagtcctattttctaaaataagctaatatagaagcaaaacaaaggaattgggttattttaagtccagatttttcagacaagtcaccggtgagcggtggctgcgtatcagaaaccttgccgtgagcattgctaaataataaacatagataggggaataagctccaaaataagctcccttgtatcctaccattgtgttacaatttagcattacgccgagttgccaatactgtcttaattttccctttgatccccatatatgagacacctctgatctgttcttcaccgcatttttatgattgacggttttgctgatggttagtacattagaacttattagataccagagaatgcaaatacattgtataatccccatgtggccacgttccgtttatgaggagtaatattttatacaactatcacattcttctttacccaaaaaaaacgaaaaaaaaaactacccaatcttatagcgaagatgtgtgagatccaatgatgaagcaattaaattattgctagtgaattcatgtcattatgcgaacacgtactacttgagaaaagtacaccatatagttttcttgtgatggacggtgaggattcagcttgggaaacgatgtcgtaacgtttggatgcagaacgtcgggcgcacgatttggatatctcttttttttttttgtctcccctatcctcaagtcagggattttattacaactttgaatatttatttcctttttttatgtcggccttcttaaaacttttcaagattttcaattagtcactaaactttccattttatctttttcactctattatataattttagatgtaacgtaaaatattactattaggatgtgagataacataatccaaccacaattatatcgttatctagtaacattaactatatattataagttataaattgaaaggaatctcttgagagtaactatttagggcctaattgtgaaactaaaaacgtgtagggctgaaactaataacaattcgtacgttgggtcactattaaatcatcaaagatctgtagaaaataatgaaaaagtggccccacacgctccaattaaattacagcagctccacaaagtagctcttaaagagcttccatcacggaccagatcccgaattcttcttctgaccaccgaacgattgagtttctccgatcagatctcagtttctgggaataattcgaagttagtatttctctacttcatctctatgaatctcattcattttatctttatgtttctctttacttgttttgcgattaaaactcgtttgatcatttaggtggttctttgttttgtgagataagtggaactcgctgacttttttttttttctttttggataatcaacgatcgggttcatttgctattgtcctctagtgttacactgatacgatctttagttttgagttagatcagtgactttagtttcactattcaactagtgttccttgtttttaggacaatactgcgaaaatttagctgctctaaaattttgataccagatctttgagattcgtagatctcgcttttctttttttttagttttttcagaaactaatattgtgttctggtcaattcttattgctaaaggtgaaaaa

SEQ ID NO: 1814 - DNA, 3000 bp, Unknown
  misc_feature (1)..( 3000): cDNA_ID_2046832_gDNA_ID_1620452_Annot_ID_157524 3000 nt of promoter + ATG
tgttcattggttctgcaattagtccatatgttatgttgaatagcttgggtgatgattcctttataacatagaaggataggctggaaatagaaaaaactgcactcatgactgatactaagtgaaatgaatactcttgttttctttttctctttgtaaaggtcttgtgggagctgtgacaagggttcaagaccgcgtaaagattttcctcgcagtgttcttttggatgtttctcttcttctgggttacagtcacagatgggacgggtaaaggcaaaggcaagaagggttcacgtttcaagtagtttccatatatgaagaggctttggtgattatctactactctatactgtatatatatcaagacttcaaagagatcaaattacctgtataaacttcaccaagtaagcatcttccttgtacatcacttattcagatgataataggaaacaataagatcgtgttatcttcttggttaatgctagtgatatatagtactcaattcctgattctttcccagtctccatctgatcatgcttaaaaaacggcgtcgttgagcaataggactcaagacatgaatgggcctaatttatgggctttaaagagtttaaaccacagtaacgttctgttttaccggactccaaagcaatactccattagagtttttttcccccaaaatggagaaaagtcgttaactatttggcacgtgtattgcatgagcaccaagtaagtctaaatctgcattaaatgcgaacatccgagtcgacttaacaccttttgatcaaggctttaacgtgtcgttgttaccatagaatatagatgatagagcgcattttatatcactggatatagacacgtggttaaacttaattgggttgttagttaagttgttgtgctacctccaagtgactttatcatatactctgtgtgtttctggtagtaaaaaaaggtctaaaaccatagtgttaagcaaaagagaaaaagaagagcagagcaaaatccctaaaattttaaactctgttttgctttccgacaatcaaaccctaggttgtctgttgcttcattcgtgtaaattgttaaattttttgtttttgttttcttggcattttgtggttgatctttctaatttgttttcaggggttgctaaagggaaaggagagagatgggtggtgaagaggaagttgtttctgttgagctaccagcaccttcttcatggaagaaattggtttgttttctttgtttcatacaaagacttagaatttgttgtatatgtgtagtgctgcaattaccaaatctttttctttgaagactctgaatatggtagcttttggtggcgaaatgttagtataagtgtaaataactttatgttgattaggtgattcaaaggttatagacttagaaaaagccacatttgattgtgtttgatctactatttctacttctttgttcttgacttaatgcctcattttgactatgtttgatttacttcttacttttcccgattcttatggattttaagccacttgtaaacattgtttaagctacattaaggtcttctttagaatttaatctttcagcgttttgaacctcaaattttcatattttcagaggtttacattaactgacttgtttttgcagttttaccccaacaaagtgggttcagtgaagaaaacagaggttgtgtttgtggctccaacgggtgaggagattagtaacagaaagcagctggagcagtatctcaaatcgcaccctggaaaccccgcgatcgcagagtttgattggacgactagtgggacacctaggagatctgcaagaatcagtgagaagactaaggctacgccgtcaccagataaagagccacccaagaagcgaggtagaaccaaatctccagtgtcaaagaaagatgcagaaggtgagaaatcagagggaggaggagaggaaaactctcatgtgaaagatactgaaatgaatcctccagagggaatcgccgagaatgaaaatgtgaccgataagaatggctccggtgaaactgagagggtgaatgatgcaaaagaaaacattgttgctgaggaaactccaaatgcggctccagttcaagaagagggtgagtcgatgaaggagaaagctctggattctgttgatgataagagtaaggagactgacaaagaaaaagatactggctcaatcgaaaagaactcggtagatgtagagaagaagaccgttgaagctagtgatgagaagaagaattctgaagctgagaccagaaaccatgaagaaaatggtctgaccacagaagctgaggggaaagagaaaacagcagaaggagaagctaccggatagccctgttctgctctgcttctgttagctcatgaaactgtaagtcagttgtttctatcaatctattgaagtatatggtttcctttttgcttcctactcggagcattatcgcggtgaaaggtgttgttaggctgagatatgtattatgagatatgtgcaagttctgtttggttgtaaggttatgtagaggatatattattgactcttctctaaaaccattgcaatcactaggtttgatgttttatctttctgctacaatctttagtcattttcgtatggatggacaatcaagttatgaacaagtcagattaaagatccacacatagattaatcttctagatttctttttatcattggttcaatcttcatttgaacgccataaaatgggaaacccaaataaaaaaatggaagaaagcagaagaagacaagaggaaaaaggtaaaagttttgctttgagagtaaagtaagaatctaatgcaaagaaagacttacaatgttagttttcttatttccttgattccatccttttgcatggtcccagggacgagggtttagaatctttctattaaggaacaacttcatagtataaactcttattgttcccattttaggattaaaaaaaaaacttgctctgttttcaaaaacatcattcgagacagtatctcaa

SEQ ID NO: 1815 - DNA, 3000 bp, Unknown
  misc_feature (1)..( 3000): cDNA_ID_3064500_gDNA_ID_1620452_Annot_ID_157526 3000 nt of promoter + ATG
gcgtctactttgcgtttgatctcagccacagtacatttcttcgtgtcgtatatgagacagcttcgttgcgagaagtctccatcgataatgtactcttctcctgttccgtcgtaaacttctacttccatcgtacaccgtccgattatcgacgatctacggacgctgaatatcggtttctgaccttccgatctctcgccgagaaaaccttcccatctttggtgtagagttggtctctgttcatcagaaaaataaacaacgagttgactcagtatcatctttagaactactatataacaaataaaggacactataaattgtgttagcaactgagtcgatgactcggaattaggcttatacaaaaagttgattaaaattttcagctcaaaacaatttcttcagatctcgtttctaacaatgatttttatcgattctagccaagtcattatttgtttaccaatacaaaaaacttatcaagattttcttgacaaaaaaaagaggttagcaaaagattcttgaattctgatggatgctcaccaatgaaattcattttttaaaccaaacccatctaatcaaattcagcacaagaagttgagcatcaaaatttattataatcacctagctagtcaccctcacgactagactcttactcatcccaacataattttaagaagaaaaaaaggatgaattaagtttacctttcgtttaacggtaaggagacacttcccggtcgcgtccatgaggacaatctcatcgttatctcttgtgtcaggtccataagaatcaaccctgaagatgatatcaccacggcagtcataggcggcgaagccatcgccggtgtagaagagagaagtcttgcagacggtgagtggtttgtcttcttggtaaagataagctttgtcgaccacaattctttctcccatctttttcccttcttttggaatggtctcttcaactaattccatttttatttttattttcttgtgtatgtgtgttttgtgtgtggaagttagattttgtggtttgattaacgaatgatttttaatctatgatatggacactcttctcttccttcctttgtctctctatttatatgtggttgatatatacgtacacacgcttgacgcgtatgtaatgaattaatatctttaagtctgcttcaaaaaagtcgtaacatatattattgttatttcctattggctaataataccaaagtcacatgcataaataattaaataacatgctataacttaaaaatgttagtttaatctgttttattaggctttattctaaactatttttagactgtttacacgccgcttttatatccaagttgcaaaagaagaaacaggtaggaagattgtttgaagtttttatggtattttaacattttaggtggtattattagtttgggatttaaataaagttttaatgacttaaaatattattgagaatatattgttatttaatcaaattttttaaaaagtttggtattattaatttaaattttttataaatttagaattattgaattcatacttttataaagtcattcaaagttttgtgttattcaactaaaacaaaaaaatctttgaatatttatgaattaaatttttgtgttattggtttataactttctacacgttttttacaaaataaaattataaaagtctcattaaaatagagagattgtttgagaaattttacaaaattgctaaaaactaattaataaaattatagaaaacactttagttataatttagaatcttttatttttttaccacctataattttatcaaaatcttcaaatttattgataaattagaaaccaatatatatcacttctttaatgtatttttatgtcgacaaatgttttatgttttatttatccacacggccactttatacttattgtaaatttataactttgtaaaagatgtctaactactaccctatacgtgattacgtgttacaagtttttttttttttttttaaattataataataagtatgaagaaaagaggaaataggaaattttgtacgtcgatttttttttttgtaaaagttgagtaaaagtgaactaaacatcaacgatgtcccaaatcatagccttgactagtagacaaacacgtctaattgggtgacgattagacagaccagtccaattatgtgaaaactaacaaaatcactacctcttgatttacatttacatttaaatgattacattcataccaccttttgagtgtgattgtatgaaatttacattctttggtacaactaaattcagatttctttctataatctcttaaatgtctactataaatttacaaataaaaaataaaatggttctaaatatatttaaaatctcaaaatatatgttggcatgcaaggaaattcaaaccaagataatcaagaaaacaggtatagcgtttcttctacgtcagatatcaaatccgtgatcgagtgaacaatgtcaatatgacaatattctacaaagaagaaattttgtttcattcatatttcttggtaatgtatcgattgatcattttgtttcttcctgtttttgtttctatattgtttaacactacaccaatgcttctgctgctttggatgacgagatagttttttttttactcgacacatcatacaagaccttcgtaagtatctgtaatacacgaatcattaatacataacacgaataatgcattactatagttttgagaatctcattctcatacttctgtctctcttgttgtcgaagaatatcacacttaacatataaaaagaacaacatgtcagtacacaaaggtaaagcccaccaaagagagaaaagaaaacaagacttaactataacaataaatttaatgtcgctctcaaaactcatttttttcatatgaattttctaacacaaacaattttccttggaaatctccgccttgtatctcttatataactcatctctctatactccgaacatgtccctctccgttaaccttaacggcc

SEQ ID NO: 1816 - DNA, 3000 bp, Unknown
  misc_feature (1)..( 3000): cDNA_ID_2046828_gDNA_ID_1620452_Annot_ID_157525 3000 nt of promoter + ATG
ctctgtgttgcatgtgatcgtgtctccaactcattcttcaccatgtgtcattttttattggcttttctaaagttaaaagcgatctatattaattaagtgttgtacaaacaaacaaaaaagcagttgttaaaaagaagatcacataactaaaacaaagagtttgtagtattaactatgttttcgtccactaactaatccgattaagaccattttatccactaactggtcttaatcttttatgaccattttaggattaatcttttgctaattttctctcactatacttaggatatttcattgcttgttaccattgacagcaaaattccagctggagaattaaataacacgggaaaataatctgaggtttgtttccatctctaccccacttttatttgactaaaatattaggatttatgaatgacgaagaaaaaaacaaattattaggtgaaaggaggcaataagaatttgaagataatcattaaatatatattttacctaaattaactcacacgacataccgtgtttagtgcggctaaaacagtgttaagatccggtgaagatgctaatacgcgattcaaagagcgcgtgaccacaaacccaagatcgaacggctcagatctcgcgggaatcatctgaagcgtgtactccacgcccatgaagaacagaagtccggcagcgaacatgcacggtatccaatggtatctcaccacgtagacgatatcacgcgccgtccacgtcgtgaacgacgctttgcttctccatcctcctcctccgacaccattggcgtagccgttgtcagttttcttagcagatatatccatgtgagtgtttgtatctccgacgcgacggttgttgttgtctagggttccgtcaatggcgacgccgttagtgtggtttccgttaagagagttagatctgcgacggagagagacgtcggtttcagctgcggcggctgacatggccgttaaggttaacggagagggacatgttcggagtatagagagatgagttatataagagatacaaggcggagatttccaaggaaaattgtttgtgttagaaaattcatatgaaaaaaatgagttttgagagcgacattaaatttattgttatagttaagtcttgttttcttttctctctttggtgggctttacctttgtgtactgacatgttgttctttttatatgttaagtgtgatattcttcgacaacaagagagacagaagtatgagaatgagattctcaaaactatagtaatgcattattcgtgttatgtattaatgattcgtgtattacagatacttacgaaggtcttgtatgatgtgtcgagtaaaaaaaaaactatctcgtcatccaaagcagcagaagcattggtgtagtgttaaacaatatagaaacaaaaacaggaagaaacaaaatgatcaatcgatacattaccaagaaatatgaatgaaacaaaatttcttctttgtagaatattgtcatattgacattgttcactcgatcacggatttgatatctgacgtagaagaaacgctatacctgttttcttgattatcttggtttgaatttccttgcatgccaacatatattttgagattttaaatatatttagaaccattttattttttatttgtaaatttatagtagacatttaagagattatagaaagaaatctgaatttagttgtaccaaagaatgtaaatttcatacaatcacactcaaaaggtggtatgaatgtaatcatttaaatgtaaatgtaaatcaagaggtagtgattttgttagttttcacataattggactggtctgtctaatcgtcacccaattagacgtgtttgtctactagtcaaggctatgatttgggacatcgttgatgtttagttcacttttactcaacttttacaaaaaaaaaaatcgacgtacaaaatttcctatttcctcttttcttcatacttattattataatttaaaaaaaaaaaaaaaaacttgtaacacgtaatcacgtatagggtagtagttagacatcttttacaaagttataaatttacaataagtataaagtggccgtgtggataaataaaacataaaacatttgtcgacataaaaatacattaaagaagtgatatatattggtttctaatttatcaataaatttgaagattttgataaaattataggtggtaaaaaaataaaagattctaaattataactaaagtgttttctataattttattaattagtttttagcaattttgtaaaatttctcaaacaatctctctattttaatgagacttttataattttattttgtaaaaaacgtgtagaaagttataaaccaataacacaaaaatttaattcataaatattcaaagatttttttgttttagttgaataacacaaaactttgaatgactttataaaagtatgaattcaataattctaaatttataaaaaatttaaattaataataccaaactttttaaaaaatttgattaaataacaatatattctcaataatattttaagtcattaaaactttatttaaatcccaaactaataataccacctaaaatgttaaaataccataaaaacttcaaacaatcttcctacctgtttcttcttttgcaacttggatataaaagcggcgtgtaaacagtctaaaaatagtttagaataaagcctaataaaacagattaaactaacatttttaagttatagcatgttatttaattatttatgcatgtgactttggtattattagccaataggaaataacaataatatatgttacgacttttttgaagcagacttaaagatattaattcattacatacgcgtcaagcgtgtgtacgtatatatcaaccacatataaatagagagacaaaggaaggaagagaagagtgtccatatcatagattaaaaatcattcgttaatcaaaccacaaaatctaacttccacacacaaaacacacatacacaagaaaataaaaataaaaatg

SEQ ID NO: 1817 - DNA, 150 bp, Unknown
  misc_feature (1)..( 150): cDNA_ID_2046800_gDNA_ID_1620452_Annot_ID_157532 3000 nt of promoter + ATG
ctgtctttccttttttggggtgtgaagaagatgttttcttttataaaaccctaattctctctttgtgtctttgtgtttgattagtggttcatgagtggtattgtgatcgatctgttactttcggagagcgagcaataagaagaggatatg

SEQ ID NO: 1818 - DNA, 3000 bp, Unknown
  misc_feature (1)..( 3000): cDNA_ID_2990274_gDNA_ID_1620452_Annot_ID_157528 3000 nt of promoter + ATG
tccggtccgtgttaggaacggctacactcgtgatccaaaacacctatctggacgctgagatgtgccctagatcgtcgtgtgctcacgaggcaaccccgaaaggaattgtgtttagaggccttgagtgggatttcaaaaccgtgtttcctaaactcaaaccagttgagtatctagaattgccgtggacaccttggccaaacagaacgtaaattttttgtcatcttttttttgcttccttttgtattgaatgtaattatagatattattcataatcagtttgtcacatacaatctcttgcacagatatatacctttaagtaaacacaaaaaagcagaacaaaatccttttttaaaaccttcatagcttcaatcgaaccgacagttttgactttaggcataaccatgtagttttttaagatcagtcgctggtgaatgccattctttgtttctgagcttccgatgggagcttgacatcagttgctaaaccgatggcttgaaggaacttaacgacgtaccaagtcatatcaagttgccaccattctaagccgtgtcgagctgagaactcaaaagcatggtgattgttgtgccatccttccccgaatgctagagctgctacccacctgcaaaattataattcagagtttcttttagtacaactatattatcttaagatggatcgagtgattaaggagtgatcgatgaagagttttaccagttgttcttagacaaatcgcctgtgttccatgcttgttttccccatacatgacaagctgagttcactagccaagttatatgatatacccatactattcttacaccctgcaaaacccaagaaaaaaaggattagagacgaaaatcaaatcagaaaccgtgactctatggaaatgttagagtagttataatcaagtttcttctgccttttttcttcttttcgttccgtttacaaatttgataaaaaaaaattcaatgtagtttcacttttagcatgcaaatgttgtttatatctaactaaatacaagcaactagaattaagtccattcacgagaagagcatgagccacaaatctttcttacaagaaagataagatatttacttgtggttctgttttgttcaacaaacacaacttgtgtgcctaaggtcaataatctaagttgcactaaattacaagaaaacgcaagagggaaatcaagtgaggagatttggcccagcaaattgatagctacacaaaaaaaactggtagaattatcttgttttggccgagctaaaacacatcataatcctatcagctagttatgaaaaattaacagtgaatagattcaaaatgcaagactagccacagaacataccattccccaaacgatgaatggaaagccacccattgcgtataaagcaaccgctagagccagcggatgcaaaatgtaggtggttcgaaggaatcgatagaatggctgcttctccaagtccccaacattattaggctctccacactttaaacatcatatacaaaacagagttttagaatacagttttcagaaaaatattaatatgaaaaaagagaagaagcaaatcgttaccctttgggtgattgtattggtatcaaacatccaattcatgtgactgaaccaaaacccatcaagtgggctatgagggtctctgtctgaatcacaaaactgatgatggtacctatgtgtactcacccaatcaattgggtttccctgaagaaaacaacacacaaacatcaatcacacaatttgtgacaaaattacacattcaacaaaaactacattatcatcaaatcaaatcacctgaagagcttgagctccacaataagcaaacaagtactcaagccatttaggtagcttgaaggctttatgagaaagattcctatggaaagacagagtaatccccagaagacctgtaacgatataaagcccaaaagcaaccgaaacagctctccaattgaattgaaacggagccaaaagactaagcaaatgcatagacaaaacgacagcaacagctccaaagtccatagctttccattctctctcccaccaaactactttttccttcttcttcaccaacacatcagataacattatccttctgtaatctccctccgtcgctgcagcagctgtggtgacatctctcttcaaacccttttcagagaatgcaacaacgagactaggaggcttgaaaggagcaagcttttggtgatgggtgaatgaaattctggtgaaattcaatgacggtgttgctgtgttcaaagttcttggagataacgatggtgaacagaggaaaacgggtttgggttttgttagaagagaagccattatcgatgtgatggctaagagaaagaaggaagagaagaggcttaaacccttaacttatatactagtagtataaatatgttaatatgtgtgcgtgtataaataagggtcggtcttttttgtatgcttcacaattagtagtactagttgtgatgacagagacgtgcaagatctcatcttttttgtggttcacgggactacattgcggctagatttggaaagagaggataagatggttttagggatttggattgccaatttggggcagttatctaaaacccggatcttctcttcaatttttcgagttgttttgctgaaaagcccgtgtttttcttggaaagttaacaaatcaccccaatatttgctttcaaacaattgggctcattgatctcttgaatgggcttattttggttttgagcccattctttcttattcattaaaggaaaaatcccaagagtgaaagggacatgttccatagaccttacatttcaaatttgatatttgtctctatgatacttaagtctttgtttgtatgtgtaagaaaaaaattctatagtagatatttgtatttgtggtgtgaaaaatccttatcttgaagccatatatcaattacttacatatttttctccttctttcatccccaaaaaaggtttctcattagatcggtatcgatg

SEQ ID NO: 1819 - DNA, 3000 bp, Unknown
  misc_feature (1)..( 3000): cDNA_ID_3064495_gDNA_ID_1620452_Annot_ID_157527 3000 nt of promoter + ATG
tctatattgtttaacactacaccaatgcttctgctgctttggatgacgagatagttttttttttactcgacacatcatacaagaccttcgtaagtatctgtaatacacgaatcattaatacataacacgaataatgcattactatagttttgagaatctcattctcatacttctgtctctcttgttgtcgaagaatatcacacttaacatataaaaagaacaacatgtcagtacacaaaggtaaagcccaccaaagagagaaaagaaaacaagacttaactataacaataaatttaatgtcgctctcaaaactcatttttttcatatgaattttctaacacaaacaattttccttggaaatctccgccttgtatctcttatataactcatctctctatactccgaacatgtccctctccgttaaccttaacggccatgtcagccgccgcagctgaaaccgacgtctctctccgtcgcagatctaactctcttaacggaaaccacactaacggcgtcgccattgacggaaccctagacaacaacaaccgtcgcgtcggagatacaaacactcacatggatatatctgctaagaaaactgacaacggctacgccaatggtgtcggaggaggaggatggagaagcaaagcgtcgttcacgacgtggacggcgcgtgatatcgtctacgtggtgagataccattggataccgtgcatgttcgctgccggacttctgttcttcatgggcgtggagtacacgcttcagatgattcccgcgagatctgagccgttcgatcttgggtttgtggtcacgcgctctttgaatcgcgtattagcatcttcaccggatcttaacactgttttagccgcactaaacacggtatgtcgtgtgagttaatttaggtaaaatatatatttaatgattatcttcaaattcttattgcctcctttcacctaataatttgtttttttcttcgtcattcataaatcctaatattttagtcaaataaaagtggggtagagatggaaacaaacctcagattattttcccgtgttatttaattctccagctggaattttgctgtcaatggtaacaagcaatgaaatatcctaagtatagtgagagaaaattagcaaaagattaatcctaaaatggtcataaaagattaagaccagttagtggataaaatggtcttaatcggattagttagtggacgaaaacatagttaatactacaaactctttgttttagttatgtgatcttctttttaacaactgcttttttgtttgtttgtacaacacttaattaatatagatcgcttttaactttagaaaagccaataaaaaatgacacatggtgaagaatgagttggagacacgatcacatgcaacacagagagattggttacttaaatctaagttttgtacttttaaactaatataattgggtggggacaggtgttcgtagggatgcaaacaacgtatattgtatggacatggttagtggaaggacgagcacgagccaccatcgcggctttattcatgttcacttgtcgcggcattctcggctactctactcagcttcctctccctcaggttccaatccacatatctctccctctttaaggataaaccaaatattattacattagtaacttcattttctttttataatattagtaatgatctaccagtatatatagatgtaacgtcctgtttactggttggtccatatcagcagaagtcgaacattttggacgtgtgatttcccttagccactaccgtatagaaaacagtttataaaggctccaaataatttgttaatctacaactctcattcaaagtatatttgattataatagtcttcaaatgattttatgttttctacctctaaaaaattttcatttaattttctataaaacgtacctctaagaaaactaattggctacgtatttctgttaaaattgactatagttttaacatagacaattagatattttctagttacagtttacattaaaactctaaagatattttaaaaaacaaaatcctctaaatgaccatatattagtgtgaagtgaaaggagtgatagattgtatatattttggtcgggagtgatagattgtgtctaacgcttttaagttttaacttgccgggtttaggttaattttcatcatcttagtgatttttcttcaattatcaggcatcactgttttccatctttcaaaatagttccacgatttgattgaatggacataaatatcagattgtcactcatatacattctacggtttctagtgactcatctatttactttctttctcgtgatgtagcatcggtacatggatttatgtgtcgttttcttatactattgacatgttcaagaaaaaaagtaatatcttaggttaattatctctagttcgtgatcaagataatttaatcccgggtattacataactcttttgcaggactttctaggatcaggggttgattttccggtgggaaatgtctctttcttcctcttcttctctggccatgtcgccggctcgatgatcgcatcattggacatgagaagaatgcagaggttgagacttgcaatggtctttgacatcctcaatgtattacagtcgatcagactgctcggtacaagaggacattacacaatcgaccttgcggttggagttggcgctgggattctcttcgactcattggccggaaagtacgaagagatgatgagcaagagacatttaggcactggttttagtttgatttcgaaagactctctagtcaattaaatttgttttctatcagaatgtttagttgagttgaatctagcgtaatgaatttttttgtttttctttgaaatggttctacttgactaccgttatttgaacctaactaagtgtgatcaatcttatgttaaggggtattacatagtctatttgaaattcataggatctacactatatattcatatatgttcccattagtatagtgaaaaaa

SEQ ID NO: 1820 - DNA, 3000 bp, Unknown
  misc_feature (1)..( 3000): cDNA_ID_2046855_gDNA_ID_1620452_Annot_ID_157519 3000 nt of promoter + ATG
ttggacacagtccaccatgatgacttccatcaacctaacttcactggtgctgctatcactaaaggtggtccaagggagccttggcatgacattcactcccgtcttgaaggtccaattgcttgggatgtcatgtacaacttcgagcagagatggagcaagcagggtggtaaagacattctggttaagttgagagatcttagtgatattattatcaccccttctcctgttatgttccaagaggaccacgatgtgtggaatgtccaattgtttaggtccattgatggaggagctgctgctgggtttcccgagtcgcctgaagctgctgcggaagccgggcttgtaagtgggaaagataacatcattgataggagtatccaagatgcttacattcatgcaatcagacgtgctaaggatttcatctacgttgaaaaccagtacttccttgggagttcttttgcttgggcagccgatggtattactcctgaggacatcaatgccctgcacttaatcccaaaagagttgtcgctgaagatagttagcaagattgagaaaggagagaagttcagggtctatgttgtggttccaatgtggccagaaggtctcccagagagtggatcagtgcaagctatattagactggcagaggaggaccatggagatgatgtacaaggatgtgattcaggctctcagggcccagggtcttgaggaagatccaagaaactatctgacattcttctgtcttggaaaccgtgaggtcaagaaagatggagagtatgagcctgctgagaaaccagaccccgacactgattacatgagggcgcaagaagcacgccgtttcatgatttacgtccacaccaaaatgatgatcggtaagttcacatttcaacggaaaaaaacttgagaagtatacataaatgttgtgcctgattcatttgatgaaatccattttgcagttgacgatgaatacattatcattgggtctgctaacatcaaccagaggtcaatggacggtgcaagagactctgagatagcaatgggaggttatcaaccacatcacttgtcccatagacaaccagctcgtggccagatccatgggtttcgtatgtcactctggtacgaacacctgggaatgctcgatgaaaccttcctcgatccatcaagcttggaatgcattgagaaagttaaccgcatttctgacaagtattgggacttttactcaagtgagtcactcgaacatgaccttcctggtcacttgctccgctacccgatcggtgtagccagcgaaggcgacatcactgagcttccaggatttgaattcttcccggacacaaaggcccgtatcctcggcaccaaatcagactacctgcctccaatccttacaacctaatctcactaagcatgtcaagtaatgatctctctctccctctctgctttgctgctgttgtagctttgaataaaacttgagtgtctacctttagaattaagaagtcaaatggttgttatgatgatgcacttctttacccctttggtttttatattcgtacaatgacgtggtgagagaatgtagctttgtgatcttgttttgttgttgttatgtacctttggacttatgaatcttatatctgatccttttctttttatttagtgtgtttcacatcaaagtttaaacaaaaatagcaatgaactaggtaaaacatacttcattagaaaagtgaaagtgacaatctagagataaagcatgaaactagggttcatatagcacaaaactaatacaaaaggggttttaaagttttaagccggaaacagggcacgacacaccggacaaatcccactgttcctaagccattcctctccacaagtacgatgaaacacatgcgaacacggcattcgacccgcttccacatctgacccaactcggatattatccatgcatatcacacaatagccttcattctcaacaacaagcgtctccaagtgcatctccaccgcctcatcgttcgctggagcaaccgcaagttgcacttgcacatctacgtgatcatcttcaccgggaaacctcgagacagtaacacctatctttacttgtaccctctccacgtctttcgcaccatctttcttcaaatccttaatctcatcagcaagagtgttaacaatagcagaataaggagggacttggagcgaatctagaatgtgatagacgatggctagtgaatgatcaccgtctccaccaaacaaccaatctcgatcaaactcgtgtgtttgctcaagggttagagtttgaagattgtcaaaatcgggaaaatcttcttcttcttcaacgtcatcatcttcttcttcggcacgagtgtaatgcactttgaaatcgaaaaacaatttttggctctttcgtagttctccgtcgtagtcgttgtagatccgcttgacatcgatcacgttgtctacgttatcgtttacatagaaagccatgattttgttggaagaagatgggtttgattatttgctgtgggtttagggttctaatatagagagattagagaaagatgaggcaattttgagttaacggcaaaaacctgaaaaaaggaaagtttgcttttgcttttatcttgctgagaggaagagagatcagatgatcaaagaaggagatcgctaaagtttcgtaacaaggctgagccaaacactcgtgttatatatcccactcctcaatttccgtttaacttgggaaattttccttttaataaaaaataccgaatattatttataatatgaaagtaaataaagtattaaccaataatattttttgaggatatttaataataactactttccttatttccctattttacaaaaatactcaggtggattccgaatcaaggtcccgatatctcagatctttttgtaaatatcatttcgtagaagttgtggccatcgacgatcctcattgttcttctttactctcgagatcttctttgctcaaaccttttatcgtggacgtctagaactg

SEQ ID NO: 1821 - DNA, 3000 bp, Unknown
  misc_feature (1)..( 3000): cDNA_ID_3064514_gDNA_ID_1620452_Annot_ID_157515 3000 nt of promoter + ATG
tgagattcatagagatgaagtagagaaatactaacttcgaattattcccagaaactgagatctgatcggagaaactcaatcgttcggtggtcagaagaagaattcgggatctggtccgtgatggaagctctttaagagctactttgtggagctgctgtaatttaattggagcgtgtggggccactttttcattattttctacagatctttgatgatttaatagtgacccaacgtacgaattgttattagtttcagccctacacgtttttagtttcacaattaggccctaaatagttactctcaagagattcctttcaatttataacttataatatatagttaatgttactagataacgatataattgtggttggattatgttatctcacatcctaatagtaatattttacgttacatctaaaattatataatagagtgaaaaagataaaatggaaagtttagtgactaattgaaaatcttgaaaagttttaagaaggccgacataaaaaaaggaaataaatattcaaagttgtaataaaatccctgacttgaggataggggagacaaaaaaaaaaaagagatatccaaatcgtgcgcccgacgttctgcatccaaacgttacgacatcgtttcccaagctgaatcctcaccgtccatcacaagaaaactatatggtgtacttttctcaagtagtacgtgttcgcataatgacatgaattcactagcaataatttaattgcttcatcattggatctcacacatcttcgctataagattgggtagttttttttttcgttttttttgggtaaagaagaatgtgatagttgtataaaatattactcctcataaacggaacgtggccacatggggattatacaatgtatttgcattctctggtatctaataagttctaatgtactaaccatcagcaaaaccgtcaatcataaaaatgcggtgaagaacagatcagaggtgtctcatatatggggatcaaagggaaaattaagacagtattggcaactcggcgtaatgctaaattgtaacacaatggtaggatacaagggagcttattttggagcttattcccctatctatgtttattatttagcaatgctcacggcaaggtttctgatacgcagccaccgctcaccggtgacttgtctgaaaaatctggacttaaaataacccaattcctttgttttgcttctatattagcttattttagaaaataggacttttgaattttagttgacccaaggaaaaaatgaagaagggacgtagaaactagaaatttaggtgctattgatatttgaatatgggccataattgggcctggtgatttaacattctgtacacgtatttaggcctgtatcttggaatgattttttttttttgtggtagggtaaaacttggaatgaaatttaggtgcacctattgatattgtccgactgtctgaactgaatttgataagtagtacgtgaatctttaactgtttagtaggaaaaaaaagaaaaaaaatcaaaagaatattactataattaaactacaataagtacataattagtttttttttttttcttataagcaaaaagaaaaaagctaaaatagaaaacccaaaagcgaagccgaagaaaagaaactaaaagcgaatcatgaaagtcaaaaatagacagaaaagataagaacatctccatcagtagtctctagtatggtttttcactaactaaaaaatataaaataataataaagtaggagagagagaaaagtaaataataggttacattttaataggttaaattattattttcagaataattatttaagtaaataataatattatatgataataattaaaaaacaatattttaagataatccacctaattttaccgttgaagatggcctaagaagcaaacacaagtttcttcggatagattatataaatgttttttggctcaacatcttcttcaaactaaaagtttgaaaggaattactaattagttatacgatccggtttatcaatcacaacagataaccgtcgtcatataaaaccaaggaactagaatcgggaaagcgtaatgatatgagctactttattcgctgcccgttcacaagttctaggtctgcaaaccaataaactttgtcattcactgctctctaggtctgaaaaccaataaactttgtcactcgcttacataatttacaagtttctaggactgaaaaccaataaacttttgtcaaaagaagacaaatttagcatgatatctttttgctaggattgaacatgtcacactcgagtatcatgtaatcaaatccgtggaccacttctctcaagtaggattcaaaaatgatatctcaaataacacctttttaatatgcattcaaaatatcaattcagattattttgtagatttaagtttttgttgagtggacggagactatcatataaatcgcggcatatacactatgtgtttaatgtacagctgattataacctctctttttttacctatgttatataattgcagatatttgacatttccttgaaaatcaaacgaagttaagggaaatggaaccaaaaaacatctttaaaaaatggaaccaaaaaacatgaagacacatttatttaatattgtaacagataatacaatgctacgtacttttaggagaacctttttttatttttaattaatacagtgcccactctgacgcctcatgggcactggtaataaatatgagatttgatagttactacatcattattttgttaagaaattgtatattcgtgtatccattttcttcacattgtcttcccctgtcccacaaatatccgctgaacatggtaaagtcctttagcatcttcttttctatgtacatatgtatcttatgtaagtagtataatatagtagctagtgtagtaaagccttcgcttcaacaacattttttctttagtcgtaaacatattcattcatgattttaacgctttttcttcaaaatatatg

SEQ ID NO: 1822 - DNA, 3000 bp, Unknown
  misc_feature (1)..( 3000): cDNA_ID_1394622_gDNA_ID_1620452_Annot_ID_157502 3000 nt of promoter + ATG
gagatccttgagactctcaagcaagaaccggatccggtttaccccggcgcgagacgaaccgggagagaacgcagatgggtctgactccatataatgcgggtcgataacaaaaaccggatacataaattcagaaccttttgaggcgtattcaagagccgggttgtcgtgaacccggagacctttccggaaccaaatcagtgaaccggatccagtagccattgatgttatgggattgagacgataacttgaaggtgaacagacgcagaatcgttgcatgaatatgtttgagatttctatagaagtttcttttgagaaattcgcgcctttgaaaagcgcgagagaaggtttcttaagacgaagatgtggttaatatacgcttcttcaactctgtgtttgctaatttgcgcggtaatcagcgtaagataaaagaagggaataggttattatcaacggttatatttaggccacgtcattactaaggagcaacatcatttgggcgatgtgttcaattatccaacatttagtgcttattagtatccatgattagtgaaattaagaaaatttacttcatatatttgagattgcaatcgtaattatatttgtatactaacattttaatctttatacgtgttgaacatatctaccgatccaacagttagcattaacaactgaggaaaaaaaaaaaaagcattaacaactgacaacaaataaaaagctaaactaactaatgatccaacggttcacaataaagcaacatcatacacgatccagaccgtacaaacagaaaacgacgccgcacaataaagcggttcttgagtatcatcgtaaacaaaaagttattcttcatcccataaaagagagacattttaagttcgacgaattattgattatttctggatccgtgacccgatccagttacttcttgacccgaacgtcagacgcgagtcgcgacgcgatcgcagaatggtacataacgtcgtggaatgtagaagcttcggcggttttcctccgcagctgcttagccttctcctccgtgagacaacatcgcagagacctcttttcagctttatccagatctgattccagattcacggttttgttgacgtaatcaggttccgatgacatgccaaaaagaggagcccaccatgaaaccgacgaaacaggtttcttacgggctggatccgattcggaagatgctcggatcgaggaaagagcggagcaggagatgattgtagccattgttaggtaaaatgtggttatctgagagaaagctcaaagctgtttttaggaagaagagaaagattaaggatttgtaaatttttggattaagaaaagaaaatggatatgtagatatttaggtggaatcagctgctatgcggtgtggttttttatagtgtggaatgttcgtttcactggtttttatcaacgtaagggtattttcggaaagagtgtgcaacggtaaatgcgttgtgcactacgataagtacggtggagatgagagcactggattataaaaaaatttaggagatggataagattgaaggcgtggagcagcgttgccaattgtcaaatgtcttcgtcttcacttttcgctttaattatttgttgattaggatatttttgtttggattttacattgcttgtgtgacttgtcgctttgacaatatccaaaatgacgtgtactcattggaaaatagagttcaactattatggaatattcttaaatcaggaataatcgtcggtgatatttgactatatctctttcaacgtatttcgaactcgtaacaaaatgtcagtcttcttttatcaaacggcaaaatgtaaaggtaaatgcatgtatatgatgtgatcatttgcatggaataggagtttttgttagatttacgaatgctgaacgcatataagtcttttaagactcatggtattatactattattgcatgtttcatcagccataaataatgtgcagagaaaaactaactaacaaaacattgattatatattttattgtatctaataagtaataactaaaataattagagctaagtgattgactgatttccttcgttattttgaattcaatttttgggctttttcctatttggcagattcgtatcacattagcaacactagggatttctgttttagttgcaagagaagataaaacgttataaagcccaaaagacccaattggtgaagcaagcccgcataagaaaaaacccaaatgttgaaccaaaaagatgaggatgcaaacttttcacgctagtgtcgtactaacggaaaacttcatatttggagacatcgagtagattttttttatctatgagaaaaataattcatctagaattttattgaggatatgagtataagataataatgaaagaaactattaattgtgtacgtctttatcgttcatatgttttgttcaatggacatatatatacattctacacacaaactactataccacgattttttttatgctaacattacctctagctacagacagaagtagaaagaaaaccaaaaccatcaggtattacatttgaagttttgaattgtggaattctcaacgaggttcgaggaacatgaatttggttgctaactaaagcaacttgcttgtgcctgtgtgcataactggactgaggaaaaaataatccttacatgtccatttcatcataatttcattttgtagtatatgcatcattgtatcattatttccacttgtatcactaattccacttgaaatgtcacacaatatagggtcccctgacacgtgtgtactatgtagtttcacacgtaccggttaatatcgagattccaagtaaaaaagtgaccaattctaaattaagaatctctctaatctcttcccaaagaagaatcatcactgaggaagaataaaacatttggggagtttcttcgctaatccttcaaggtgtgacctgagaatcacaacacaaaacaatctcactcgaaattcctttgactcatcatcatcacc

SEQ ID NO: 1823 - DNA, 3000 bp, Unknown
  misc_feature (1)..( 3000): cDNA_ID_3064537_gDNA_ID_1620452_Annot_ID_157506 3000 nt of promoter + ATG
aacaaagcacaaaaatgggcaatcttcgaaatatactaaaattttctattataattaacaaaataaaaaagagagggaaactgctaatatctggagtccattctcttggagaagagtaaagtgggcaaacaaaaaaaaaggaactgagctgattcgattctctttgggactcccatccatgcatcacctctttcatagtttcattttacttttatgtttattattttacaagattaagtaattagcttttttaactgcaagcataacaaataacaaaacctttattacggtctcaaacgctcaaaaatgtttttaaacatagtaaaaggtttcgttcaatacaatttgaaaaaggaaaaaacaaaaacaattttcttacaaatagatggccaccaacgattaattattaccgtcaaacttataattgggatgactcggtggttttgcgatggcgtttgttccaaaagagtgccatattgttcatttgttcttatatatgttttaatccataacacgttttggatcaatgttttcaagtaatcaaagtgaaagtagagaatatatcaattggtgaaaattttgaaatatcaatgtaattctttttaagtggatccattgatcaaggaggccactaaaatttgctcgaggcttggtagtgggttcatttgtgtttgataaatacactttttagtactcatcccctttttttgtctgacatcgtatatgtatattggttacatctaaatttgtcacacttgtgtagcagtgatagttgtctcagtgtgtctatagactatagttaaatgttaattagtagtatttatacaatactaattacatcatctaaatatttgcatatgattcacacaaggcaaatttccttggctaattgtcacactatttatgtgaaggtgagtagttaaagctaataacctcgaagttgcttggtttatatgagatcaagtttggctcttgtaagtgaagataataatttaaagagtattttaatcgtgataatctaaatgttagttgatagttaatacgtcacggaacatgtaccgaccgacggccgatttccatgatacaataaaaaaatgaaaattagcaatctcataacatgcgacgacgatacttatggtgttgccacgtagcaagcatcttcctcttaaccatgaggtgtcgcaacctcagaggacaacacggacaagaccgagaaaccgcatactaacgcttgcaacgtaaagcacaacacccctaaactcctatttttttaattttcttttaacctcaacacaccacgcagctatacacgtttcaatgtgctaatacgtgtcttcttctccgccgaccaagacacactacaaatgtcccgatggtttggggagacaaatcacagtttctactacaacaacaaatacttttacgaaaaaagcttttaaaacttatctagtttcgtttgatacacatttgaagaaagaaatggcatccaaccaacagagctacaaagctggtgagaccagaggcaaggcccaggtaataagaatatatttttgtgtatgtgtatacgtaaaaccacattatataagctctaagatgatttgtctgtgtaataccaggagaagactggacaagctatgggaacgatgagggacaaggctgaggagggccgggacaagacttctcaaacggcccaaacagcccaacagaaggcccatgagacagcccagtcagctaaagataagacatctcaaactgcccaagcggctcagcagaaggcccatgaaacggcccagtcagcaaaagagaagacatctcaaactgcccaaacggcacagcaaaaggcccatgagacgacgcaagcagcaaaagaaaagacatctcaagctggcgacaaagctcgcgaggccaaggacaaggccgggagctacttatcggagacaggcgaagccataaagaacaaggctcaagacgctgctcagtatacaaaggagacggctcaaggtgcggcacagtacacaaaggagacggctgaagccggtagagacaagacgggtggattcttgagccagactggtgagcatgttaagcaaatggcaatgggtgcagctgatgcagtgaagcatacttttgggatggctactgaggaagaagacaaagagcattatccaggaagtactactaccactactgcaactactcgaaccactgatccgactcatcagacttatcagaggaagtgatgagaaaacaaaattgagaacgatatgaaagtatctttgtgttagttggtcttttgagttttgtgtttgtgtttttgtaatttccgttgtgtctttctttatggttgtggttcagctgtgtttcttgttgtgacggtgatcctggagacttctaatttccagccaataagtttagatttgatcctgttacaacttatgtgttctcaaatttctatttttgttacaataaacagttattaatacacatcatggtccacttcgtatgttggtcatcaagcattagcattatacagatatagctgctaatccaaacgggttttactaatctttcaatttcttttatcaaaaatttcaataaaacatttgtgtctgcttttacgttttacgaatcgttcaatttcatagatctactaaaatgagagaagtaaaccaaaaaaattgaatagtaatttatctaaaccgagcaaaccaaataaatttatcaagacgtcaacggacgtatactttggtgaccatccgaaacgacatcgtataacatcttagggttatgagtaatgacacgacgtcgttctctgggtcggtcactggagatgaagagaagcggtcgcgacattgtaaagatctctagctccgtccttcttcctcgtagctaccctctctaatctttttttctcattcctgttcttgatagttttctagacagatttcgattaaacaaaaccgcggaacactttgaagaaatctgcgtgatttagagatg

SEQ ID NO: 1824 - DNA, 3000 bp, Unknown
  misc_feature (1)..( 3000): cDNA_ID_3064524_gDNA_ID_1620452_Annot_ID_157513 3000 nt of promoter + ATG
ttagtttcatttatctctttggttacatatattttagctagataggttacatatattatgcgagtaaaatttgtaatctaattgtttttataagtgtcaccacatccacatggattcaaactccgctatgttacaaacaggagaactattttctgaatggtttaattaaccaattatcaaagaaaaaaaatgaaacccttgtttttattctcaacagcctatttttttcaatgagattattttttcatttacttgattttcttaccatttataacaaaaccccaaaatttcacatatatcaaaatcaaatctattgctatttatagccataaatggtggtatttccgtaataaagatatagtcaaaggtttaaattcaaacatattcattaatatttaaaccggtttaactaacagtagtaaaccgacatttcgatatttaaaccgatttgcagaaacgctcgtgaatcaaatcaaatctgtgtttcattctcttctccactgaaacgcgtttgaaggagaagggtcaaagggatctgatcctatcactttcgctgggaaaaacacgaaatcgaaggaagaatcaatcatgggtttcatcggagaaactgtagattccatcaaatctatcaagatccgtcaagttctcactcaggctatcactctcggttcgtttcgatatcaattgattttactctcatttgcgttttagatttcgagaaattggtatctaaatctcaccaaatgtcacatcttgagaagcttaatatgtatataatgggtttggttttgtttttgggtttaggtatgatcgttacatctgcattgataatttggaaggcattgatatgtgtcactggcagtgaatcaccagtggttgttgttctctctgaaagtatggaacctggctttcagagagtaagtcacattatgttttactcattgcatttgattatgtggttgttggttattgattttgaggctaatgtgacacagggagatatattgttcttgcggatgactgatgagcctattcgagcaggcgagattgttgtgttcagtgttgatgttagtgtatctcttgtcctgttccatcaattcactatctttcttcgattctcgtggtttaatttgtcttgatgctttcgtttttcagggtcgtgaaattcccattgttcatcgagcaatcaaagtaatgtttctcgtactttttctcatctctggacatcagaggttcaggatacttacacttgattgcttactcgcttgtttgttgttttaacacatcacaggttcatgagagaggagatactaaagcagttgatgttctaacaaaaggtgctaagtttttgttggtatgaatgaataaccctttatagtaaccaattcctgacacaacttaacattttccaggtgacaacaatgacattgatgacattggtctctatgctgaaggacagctttggcttcacaggcatcatatcatgggcagagctgttgggtaaacactctaattcaacaagcttttgtgcccctgtgatctccttgaaactggtgcgaaatgttcaagagccgtaaattgttcccttttgatctcttttcagattcttgccttatgttggatgggttactattatcatgacagaaaagcctatcatcaaggtacaatcttctaacacggcctgcaatttatgtcatggtttttgacttgagatatatgtactcaccagaagatttttgttcatcttctcttcttttagtatatactcattggtgcattgggtttgctcgttataacatcgaaagactaagactacataacaagctggtcgttggtaaggaggtagcttctgcaacgctcgggtcatcatctttgtagccatcatctttgaaactgtagaatcatataaacctcaacttataattatagacacttttatctttaaatcagctacgttttgtgacaatttcttctttcgcagtgttgtttatgattttttcgaatagttttagggaagtgaaattcgtgaatggtctaagctctgaagggacatactaatttgttaaattctaaaagagcggctgaactttaaaaaaacgattgaaatatgacgcttttaatgaaaataaacaataacttgtgttaaaagattacagtttgaattcacagaagcagtcagggcaatgcagatcctctgccagtttcaaaatcattcttatgaacctcctaaagagcttactttctcttcagttctatgagcacttacctctgcaaatgcttttcttctcaagaacagagttttatacatccatttataccattctatcaaggcagcttttgtatttccatgcattcttgtgacatcttcatggtttagcaaatgaggcttagaaaacacaactttgtataaaccaatgtaaaacctcccatctccatcagacaatgttggttgttgttaactggaagttgatcatgagattgcatagtatgatactctaattttcaagactacatgtacactggttagtttgtgacattcagaccaatgatcgttatcttgaggaaaaaagttgaaaaactctactagctagagccatatactagattataaaacaagattctcatattttgcatttccccattaaatttgtatgcatcattgtatgtctatgacatgataaccataacacgagacaatcaacgaattattttggtttaataaagagaaatcagtatactaatgcatattattgtcaaagtagctggtcaattcatctaaatattaatcacacgatcgaataaaataggataaataaatcttgaggtcctccaacgactaacacttgaataaataaagaaaacacaacgtgcgggtcagtacaagccatggctaacacgatcttctatatacttatatggttataacttatatgttcattgagtgattacttctttgaattaaagaaaattagattgtaactaagtaactttgtaaggatg

SEQ ID NO: 1825 - DNA, 3000 bp, Unknown
  misc_feature (1)..( 3000): cDNA_ID_2024994_gDNA_ID_1620452_Annot_ID_157500 3000 nt of promoter + ATG
gatctgaaaatgcgtaaactatagcaacgatgaatcacctgaatcggagctgaaacgacgagggataacgaaagaagatgcggaaatggctgatcgattggcggcgagatagaaaccgacaggtctggtggtggcggctatcgatcgacgaggagaagcagcgacgacatcggcggctagggttttgagctgagaggagacgattcttctccacatggtgatgatgatgagtcaaaggaatttcgagtgagattgttttgtgttgtgattctcaggtcacaccttgaaggattagcgaagaaactccccaaatgttttattcttcctcagtgatgattcttctttgggaagagattagagagattcttaatttagaattggtcacttttttacttggaatctcgatattaaccggtacgtgtgaaactacatagtacacacgtgtcaggggaccctatattgtgtgacatttcaagtggaattagtgatacaagtggaaataatgatacaatgatgcatatactacaaaatgaaattatgatgaaatggacatgtaaggattattttttcctcagtccagttatgcacacaggcacaagcaagttgctttagttagcaaccaaattcatgttcctcgaacctcgttgagaattccacaattcaaaacttcaaatgtaatacctgatggttttggttttctttctacttctgtctgtagctagaggtaatgttagcataaaaaaaatcgtggtatagtagtttgtgtgtagaatgtatatatatgtccattgaacaaaacatatgaacgataaagacgtacacaattaatagtttctttcattattatcttatactcatatcctcaataaaattctagatgaattatttttctcatagataaaaaaaatctactcgatgtctccaaatatgaagttttccgttagtacgacactagcgtgaaaagtttgcatcctcatctttttggttcaacatttgggttttttcttatgcgggcttgcttcaccaattgggtcttttgggctttataacgttttatcttctcttgcaactaaaacagaaatccctagtgttgctaatgtgatacgaatctgccaaataggaaaaagcccaaaaattgaattcaaaataacgaaggaaatcagtcaatcacttagctctaattattttagttattacttattagatacaataaaatatataatcaatgttttgttagttagtttttctctgcacattatttatggctgatgaaacatgcaataatagtataataccatgagtcttaaaagacttatatgcgttcagcattcgtaaatctaacaaaaactcctattccatgcaaatgatcacatcatatacatgcatttacctttacattttgccgtttgataaaagaagactgacattttgttacgagttcgaaatacgttgaaagagatatagtcaaatatcaccgacgattattcctgatttaagaatattccataatagttgaactctattttccaatgagtacacgtcattttggatattgtcaaagcgacaagtcacacaagcaatgtaaaatccaaacaaaaatatcctaatcaacaaataattaaagcgaaaagtgaagacgaagacatttgacaattggcaacgctgctccacgccttcaatcttatccatctcctaaatttttttataatccagtgctctcatctccaccgtacttatcgtagtgcacaacgcatttaccgttgcacactctttccgaaaatacccttacgttgataaaaaccagtgaaacgaacattccacactataaaaaaccacaccgcatagcagctgattccacctaaatatctacatatccattttcttttcttaatccaaaaatttacaaatccttaatctttctcttcttcctaaaaacagctttgagctttctctcagataaccacattttacctaacaatggctacaatcatctcctgctccgctctttcctcgatccgagcatcttccgaatcggatccagcccgtaagaaacctgtttcgtcggtttcatggtgggctcctctttttggcatgtcatcggaacctgattacgtcaacaaaaccgtgaatctggaatcagatctggataaagctgaaaagaggtctctgcgatgttgtctcacggaggagaaggctaagcagctgcggaggaaaaccgccgaagcttctacattccacgacgttatgtaccattctgcgatcgcgtcgcgactcgcgtctgacgttcgggtcaagaagtaactggatcgggtcacggatccagaaataatcaataattcgtcgaacttaaaatgtctctcttttatgggatgaagaataactttttgtttacgatgatactcaagaaccgctttattgtgcggcgtcgttttctgtttgtacggtctggatcgtgtatgatgttgctttattgtgaaccgttggatcattagttagtttagctttttatttgttgtcagttgttaatgctttttttttttttcctcagttgttaatgctaactgttggatcggtagatatgttcaacacgtataaagattaaaatgttagtatacaaatataattacgattgcaatctcaaatatatgaagtaaattttcttaatttcactaatcatggatactaataagcactaaatgttggataattgaacacatcgcccaaatgatgttgctccttagtaatgacgtggcctaaatataaccgttgataataacctattcccttcttttatcttacgctgattaccgcgcaaattagcaaacacagagttgaagaagcgtatattaaccacatcttcgtcttaagaaaccttctctcgcgcttttcaaaggcgcgaatttctcaaaagaaacttctatagaaatctcaaacatattcatgcaacgattctgcgtctgttcaccttcaagttatcgtctcaatcccataacatcaatg

SEQ ID NO: 1826 - DNA, 3000 bp, Unknown
  misc_feature (1)..( 3000): cDNA_ID_2145511_gDNA_ID_1620453_Annot_ID_157555 3000 nt of promoter + ATG
aaacataacgattgaattttctgaaatattttgtctcttgttggtgttcttttaataccaaatcagggttggtggttctggaatggacatgagaagcaaagccagggtaatttttcattctctagataatcttgtgaaaaggtcaacttttgtctatctctatttttggtagtaattctggtttatatatgtagactctacctggaccagtgactgacccttcgcagctaccaaagtggaactatgatggttcaagcacaggccaagctcctggtgaagacagtgaagtcatcttatagttaataatctttctttcttgatcttaaatcagattcttctcattggtttttttttcgattcttgtttactaatcttttgtgttttgtacatctttgtttagccctcaagccatattcaaggatcctttccgtagaggaaacaacattcttgtgagtttcttttagttttgaccttttttgttgcagccatgctttattacatccatcttaacttaatggttttgatcaggtcatgtgcgatgcgtacactcccgcgggtgaaccaatcccgactaacaaaagacacgctgcggctaaggtctttagcaaccctgatgttgcagctgaagtgccatggtatggtattgagcaagaatacactttactccagaaagatgtgaagtggcctgttggttggcctattggtggttatcccggccctcaggtgaagaagatggatatataatcggttttgtatcttttccgttgtcggttattctaaaattttaggcgaaaatgtattgcagggaccgtactattgcggtattggagcagacaaatcttttggcagagatgttgttgattctcactacaaggcctgcttatacgctgggatcaacattagtggcatcaatggagaagtcatgccgggtcagtgggagttccaggtcggtccagctgttggtatctcggctgctgatgaaatttgggtcgctcgttacattttggaggtaagtttaacgttataacttcaatgtttgtttatgtagtttttgattagtaacacttagcttgttcttaaaacagaggatcacagagattgctggtgtagtggtatcttttgacccgaaaccgattcccggtgactggaacggtgctggtgctcactgcaactacaggtacatgtcaagaatctcttaaatgttttcttttatggtcttttcgctgattcataaaaccaaaatggtaattgtttcagtaccaagtcaatgagggaagaaggcggttacgagatcatcaagaaagcaatcgataaattgggactgagacacaaagaacacattgctgcttacggtgaaggcaatgagcgtcgtctcacaggacaccacgagactgctgacatcaacactttcctttgggtatactaacaaacatctttgcgggttttcgaatagtaaaaaagccgaattacgatacattttgtgattcttttgtgtgttggaatgttgtatgtagggtgttgcgaaccgtggagcatcgatccgagtaggacgtgatacggagaaagaagggaaaggatactttgaggacaggaggccagcttcgaacatggatccttacattgtcacttccatgattgcagagactacaatcctctggaatccttgatgatcatcagatcaagaaaaaatcttgaatgtcactcaaatttgtgtttcttgcaagattcaaagtttgtgttctctatcaagcaatgtcttaggataagtcaaagatttgctctgcttattctgctttttatttacttcacatcctattgaaaacatttctgtgtattatttatgaataaacattatcttaaaagggctgatttatttactaatgcatgcattcaccacttaagatccagaatttgtttttttttttttgcattttgattcatataagataacaactaaaatgaaaattaatctggtttgcggggcaggctaggtggatctaaatgtatattaatatttttttaatttttcaaaataaatatttcaaattatatataaagataactatacttttattattttatttatcttattttaaaatgttaaatttaaattcgttttcaagaatgctttttataatgtttttttctaatatttcatgtagtagtatataaatagatatcattttattctaaaaccgtttaaaatgtttaggttccgactaagcgttctaggcactaagcagaaggtcaccacccgtttagcacctagcgttttgttgaacactaattctaatgcataatttagaatcactgattgaacatttagcttggattaatatattttattaaagtttgaaaatatagttaaaatcaattttagttatttcggttcaggttaatttggaccaatgaagaaccgaaccaaatgatttgaaagtaatttcgtcgaacacctggtgagcaacttcactatactcgagggtttaaggattcttcgcgtctgacaaaacttgaggaagaaaaaaaaacaaatgtctctgcttcgaattttgtcgactctttacaaaggaactcatcggacttcacgttccttctcttcttcgcggaatctgatctgcaccactttcgctaatccactctccggtaactcttttagatcatttctcgaatcaatttctttcctttatcaaatcccattatgccattctttgtttctattcgaaattatgtatcttttaacgttgatttttgatttcttcacacaatgatagaatttgatttgtaacatttcagtggaactgaatcgaaatcttttaaattttttctctatatgtgaaattttgtatagtattcaatttgaactcagagtttgtgtaaccatttcaacctttttagatgattctcatgtaaaagataggttcttgattcttaacaaaaggacaaaaattgtttatatttgagtaagaatgttgagtttttatgtgagagattgtcaaaatg

SEQ ID NO: 1827 - DNA, 3000 bp, Unknown
  misc_feature (1)..( 3000): cDNA_ID_3064581_gDNA_ID_1620453_Annot_ID_157570 3000 nt of promoter + ATG
ctaatttggacagaatgttatgtaagcgaatgttgaatatatatagtgatgatgaactcatttgtaattatttattgttctactggttatgaccattacagcaagtttctattcatataaaaattaggtggttattttcttatctaataaatctttagatgtttacatatatcttttgattgttctggaaaaatgaaattttctagagaaacatcacggttgggaaaagatggcacatgatacatctactttaggttagactcctaacgttttgagaacaattgtttggagcggtgcacatttctattgtgtactaaaaaccattcggttagacttgtattcagaattcggtattgttaatatagggagtgagcaatttggtttatgattcgggttggttatttttacggtttgacagaaatataaatcatctaaaaccattcgtaattcggtttagtaagaaatttatgtaaatactgattatgattttcaatatataaaagattaaatataagattcaatgaatttttattttgttcgattcagtttagtttgattacaccaaaattggtttcagttcagttttggttacagaatatttcgaattttaagataacgaaacaaacgttttataagaaacgtccacgatgcatttgatgaaaccaatgttgcgttgatccagttatgtttctagtgttaatggtttattctcaactctaagctgcatagatacatagctatatctcacactgtctgtcacacgtatgacgtatctatggtcaaacttaattatatcaaaagagtatttttggtataagaaaatactatgaaaagagtaatttgattacttaataaaaacgtgtatggattcataagaagttggccaactgacgtcataagaagtcaaaatgtagttaggtttatattgtttgattaactcgttatttatttacaacttgctgtaagaaacctagattctttaaaataaagataaaacctaacgatagagtgattagactaattcccaaaaggaaaaaacaaagtagctaggtagtcccttgattggaatcttgccttgtgacttgtgagactaccactagcaacaaaaacagacctgatcaattgtagtcgagcctaattaaaaaaggttcaactgagctctaaaatatgcaagtgggggtgaacgagaaattttcataaattgaatctttcctaaacggcttactcgactcaatggtcagcaacaaataaagaaacgtgacacaacacaaagaggaaatagggttaggggagaaatcatggcaacgcctctagtcgaactgaccatacacaaccattgtttttattccaaattttcaaaattgcactattctcacggttcttattgcgagatcgactatctggttgggtaagacatgacatttacgtatctactaagtattacaatatgcctcttaccatattaaagaagaatccaataaagagtggcatgcattaagaatgtaaacgaagaggaaaacattcattacaagggagattttcgagaatgaaatgtgggctcgcttcagactcacaaattgtgaagattatacaaacttgaagtataaaggagtagtaccaacaagagtttcaaaggattaccaaataagggagtacaaaaataaggaaataccaactagagtttcaagtcctctagaataaatttggggatggaagcaaaatgcattggtcgtcacaactgtagtatggacccatgggctactgcacctctctccaccctatttgggccaggcctagttcttatcccttccaaatattttgatatcttaatcactaatatctatatgaaactttctttgtataaacatttcttggaacgagaagaatccattttaaccggttcctagtttaccaattttacattactagaactgaattttcattattcataaccaacaatgcaatttgtctacacatatcaatttgtcaattttactaatatcagtttatagtaataattatagacaaatcaacaaaacatatttacacaccttaagagtttttataactcattcagacaaaaacaattaattaaaatacccttaaaaatagttaaaaatattttcactttttaaaaaatcaatgggaggggatcaaagattttcacaatttacaagatttgtgtaaactaatactcttcatttttatttgatttttgtaggaaaaaaaatgttttttaaacattaattttttaggttttatatgcagtattattgatgtattttaaacttcaataaaaataattgaatattctttatgatcagatttaatatatattttaaatattttttttttagaaaattaattaaaaataacaaaaggagtaaataaataaaacggaataaagttgggcgtttttttattacaaaacatgggaaaatggacaagttcttcaattcttgctttttgggcttcttgcctgtctctgtctcgaaacacccagaaagagagataatctcgcttatctgtctttatacttagctggtttcttcttcttctttatcccttttggctcttattacaacttttttttttccatgtatttcctcaaattttaatattttttctttactgtatattcatcaaatctcaagttctctaatttcccattcgacctcgaaatttgaccaatttctcttgtctcaaatttcagattctcttcctctgaaaaaaatcaaaaaccaagtcttctaattccatctcctctctgtacccatctcctaaaaatctcaactttgagtcaaaattttgtcttctctcaaaccaattcatagttctaaaaatctcacctttatctcaaatttttaatctttcatctgatttctgaaacccaaattctctaatctcatctttgagccaaaaagtttcaatctttcctctgatttctgaaaccaaaaatctctaatttcaaaaaaaaaaaatctcacctttgggtcaaaa

SEQ ID NO: 1828 - DNA, 3000 bp, Unknown
  misc_feature (1)..( 3000): cDNA_ID_2145580_gDNA_ID_1620453_Annot_ID_157574 3000 nt of promoter + ATG
ggtaatacgagacaagttagttcggtgtacatatcaaattaattgaggtgcacgatatctataattaatgcaggatagttacagcgagtttacatctattttattatactactaaattttgaatattttgttcaaaaaggtgcgaaataaaaataattatgccaagttgataaaattatgattgctatgttctgaatgatgaaataagcattatgagaaattggtagaacgtgttactttacaatattacatgtgttttgctatagagactatagtaacatggtcttttttaaaatgtcaataaattcaacctgaaccaccgaatatggaaggctcgccggacgagaagagaaaaaaatattgtcggatactgccggagcccaacttgtaaggttgaatttactggaaacaaaaacgttgtagggtcgaggaaagctaagagagtgacgactataggtaggtatctattgtttgtagttttagacttttattaggattttacagatgactacacttcaaaattatgaatttaaatttcgatggtttacacaaaaagttatttatctgatccgagaaaaaaaaacagaacaaaatccttttttccagtaaatctaaaaagatgactactattttcagtattttagtgaaagaaatttatatcactttttttttttataaacgatattgactgatctgatcaactctgataaaaatgtattaaaatgattcagtctccccaaaaaatcaacataatccgtgtctcaagttttcaaatgtgttacgagtaatatcttggatcatcaaatcgcctattactaattaccaaatgaattgtttgcgtatttggtcgaaactcatacttttcatacaaatatgttttttttttgtttcttaggtggattgaacatgtattagttcctttcaacatttcttcaattctcaaccactagtagaccacaaatgtgtaggcactttttaaacttaaaattgatctatttttgttgagccttttgtacatatgggcatattttgacataaaaactagaatagaagtatattctacttggacttataagcttgggtactgtttggtccgcaaaatgacgatttcgccttcaaatttgttgatgataatccaattcgttttttccgtcatgagaccaacaaccctcaccgtctccatcgactgcaattctctccgtcgtgataatcaaatttgtttattaacaccgactctacattccatcaaaatcattattttcgactccatcaatatcgtttccttatgcttcgatgattcacacaacgtttatacgaccaacctttttcgatgaatccaatagaactaattaaacaagttttgatgtaagatatctaagctctaagagatgatgttatagaacccaaattctctaattatagatgcggatcgaatcatcttaaccgtaaaagataatgtctaaagaactcagaacaatcatgtatgcaataactgaaaagtatatgattgtgaatcatgagcaaatcttaagtcattttcgtcaaaattatatctcaagacccaattaaaattttaaagaagaaaaaataataaaggcaaattaatattttagaaaaaacaaaaatatccgtctttataatcactcgagaatatggctaaattcataatagaccatactttattatggtttttctataattaatcctaattttattagttgcatgaaattttggaaatcttataaaatacaataacttttggtccataatatattgtaatattgtgtatagttttttagtcaatgattgtttctaattatactgatttattaccaatttacactgccacttttggttagttgcatgaaaattttggaaggctagaaaaaataaattttcgcgcaacaaaatcatactcctttgtttatagttatggtgatggaaatcaaatacgtaccagacctttgtttatagttaaggaaaaaagaattaaagtcttcaaactctaatttgctggtcaaatccaaatttggcgtgacatgtgcccgtaattaaaaattaattgcgtaattaaatactaactttctaattagctgcatcatcgagacgaataattgagtgtattggtcaattgaatacgacaaaaattatttaaatagtcggtaaaatacccatagaaattgactaatccgtcacctcccccggataatacagttttaacatttggttttctaattcaaactaacatttaaattccctaaaaacctttacacgacctattgccatctaatccaaaactaaaagtactagttttttttttctcaactcaattataataaataagaggaaaaaacaccaaacaacaaaacaaaaacatatcatataaaaaatcataaatttttaagaggcaaagtaggtcagaattcttattaaaaaaaaaattaaccagctaatgaattaacataacactctctaaaaacgagtaagacaaatttggacaatacaatattttaaattaaaagaaaaagaaacaaatgattgtaagaatttgtaactttagaaaaatatagtacaacatcttcaacctccacaatttaataaaaaggatgaagcatatgatttagaaaaattattaaaattagttagaatctcttcggtttctcaacgtttgttttgtattttttgtgttcctctattattatttttgtattgttcacttaatttcttgttttccaataatctattttgttttacatgtctttttagaaatggtaaacaattaaagtaaaaaagagacagaggtggctcgaggcagaaaagtctacaatatatccatcctcggaaaaataaagaagataaaatcagttccgtatctatataagaaaatagacaaaagtcacaaaacctcatcagagctgtccgaattctccaagtctctcatcatcacacccactccaacaaactttctacgagagaaaaaaacaaaaagaaaaacaaaca

SEQ ID NO: 1829 - DNA, 3000 bp, Unknown
  misc_feature (1)..( 3000): cDNA_ID_3064556_gDNA_ID_1620453_Annot_ID_157572 3000 nt of promoter + ATG
agactgaatcattttaatacatttttatcagagttgatcagatcagtcaatatcgtttataaaaaaaaaaagtgatataaatttctttcactaaaatactgaaaatagtagtcatctttttagatttactggaaaaaaggattttgttctgtttttttttctcggatcagataaataactttttgtgtaaaccatcgaaatttaaattcataattttgaagtgtagtcatctgtaaaatcctaataaaagtctaaaactacaaacaatagatacctacctatagtcgtcactctcttagctttcctcgaccctacaacgtttttgtttccagtaaattcaaccttacaagttgggctccggcagtatccgacaatatttttttctcttctcgtccggcgagccttccatattcggtggttcaggttgaatttattgacattttaaaaaagaccatgttactatagtctctatagcaaaacacatgtaatattgtaaagtaacacgttctaccaatttctcataatgcttatttcatcattcagaacatagcaatcataattttatcaacttggcataattatttttatttcgcacctttttgaacaaaatattcaaaatttagtagtataataaaatagatgtaaactcgctgtaactatcctgcattaattatagatatcgtgcacctcaattaatttgatatgtacaccgaactaacttgtctcgtattaccggcttaccgttttccaaataaataattttctgtattaggttcgtactacatttcctgtgtcatatgtctcacctcacttttagttgtacttcacctaatgatgcattgaaattcccgactaaatcctccttgtgaggagtatattatattatagccattttctaaagagaaaatgaggctaaggaaccatagtgatttgcgtaatttccactcatgatttggctatacacctaattactccatatttatatataatagtgaaaccttgtagcttatggatcaccattatctaattaaagtgtagttgccattattgatatttgcatgggagaataaatatgctgaccaatttttcactaaagtctcaatgaccttagttgtagaaatatatataaaacaatgtttttatggtggaaaactttcagaaaagattccactcatctctctttctcaccatagttgatgcatccacatttgagccaacaagccaatagcattagattcataaagaaaaaaacttaaacgtacgtacaaatatgcaataaacaaattagtgatcattgatcaataaccatcatttttataacaaaaagtggtttttcacatatctatgaataaccccatcgataaataatttgtgctcttgatgtttcgggacttataatatgaatgtaattaaggatattatagattcttctcaatagagtttcaatatggatggaaactcctaacaattacctttcatggtctctttctatctctatatctcttcctttgtgctcttataaaacgaaagcaataagtatatgaaatccatgcttctttactgatgtatgcatagaagactaatatatatatatatatatatgaagatatataaagagtgatgaaaggggagaataaaaaattgttggtgagtgtgaatgttcttggaagtgttggccctataaggtttttggccaatgaagacgatgaagtttcaagtgttattaacacaaccttgaaagcctatgctcgtcaagggaggatcccggttctagggttcgaagtggataacctcaatttctattccattaacgccggattcagtagtattttccatccaccactatttagtttgttctcttagaatcacctaaattctagattaatcttgacccgcttataaaaaatcgcattagttgtttaacgttgtgtgtacaaattttggtataaaattctaaatcgaaagtaatttgatatttgtttatcatttttttggtgttagaattgaatacacacaagagaagataggatcaatggatgtaacgaattccttgttgtgcatgaaagagccaagaccattggaaaaagtccaaagaaaaatagagagtaaagcatcaatcttttggagggaccatgcatcaccactggatcaaacaacacttggttactatccatgatctttgcatataaataaggaagcctatcctcaaaggtaaggaaatatacaatataatatccatctttttcaagtagtttgaccctaaaaatgacattacatcctttttcaccactcttgttcaaaatttcaatgagtactgtatccatagtgatttgcattatttccacccatagtttggctatatacttttaattaatccacgtttatatatgttagtgaaacatagcttatatatgttttactattttctaaattctagttgctattattgatcttttgcatgggagaataaatatgttgacctattcgttcactaaagtctccattatgatttatgcacattagttgtaaataatataaaaaggttttagtggtggaatagtttcagaagagattccacacatctctccaccataggtgatatgcttagcttcttcatttgagccaacaagctctaatagcattagatcctccaaattttctatcgtacactaaacttactagtgaccaataaccattaatttattaacaaatttagacccgctttagtggttcttaacatatctatgattatcaataaccccacaaaactaaaattcgtagccttgatagaaaatctctctaacctattgtgtcgagacttatatatgcatgtaagcatatatattatagggttattctcatatagtctcaatggatggaactcctaacacttacctttcatgttgtcttctcttcctttaatttatgcatctataaaacggaagcagtaagcaagtaagtttcattcttctttaatggtctatacaaagaaaaaggatg

SEQ ID NO: 1830 - DNA, 3000 bp, Unknown
  misc_feature (1)..( 3000): cDNA_ID_3064613_gDNA_ID_1620453_Annot_ID_157556 3000 nt of promoter + ATG
accagaattacacaaaaaaagggtttaaaagtgatcactattcatagttcaactgctaaaccaaatcgttgacttgaatggttcaacaatctttctccagctatggtgaaaaatgatttcaaagtccaatgatgttgaaaaagaactctcatagaaccaccattgctcacactcaataaagcttggatcaaatcgtcatcaccaaataaatgtctcttcccaatggagaaagagttgctcttgtcagataatatgtacttcgcctcagcaccacacactgttttagagtgcaagcgctggtagtaagaagcagtgaataagcttgctttcttatcaatggaaaaggtggttgttgtgtcctcggtgatcaaactaagaactgtgtttgccttagtgattatccggttcacaagatccaaagttaactcaaatccaaatcgccaaaagtcatttccgaatacagcagaaaaactgagaattggatttgcaaacaaccccacaattgtactgattctggcccgttcggataacatgttcaactgagcatggttgtagtcatttcgattggacagggacacattgcaaagaatcaaggaggtaagcaaactctagatgtcattagaacccaacatcaatataaatataatattgcttactctctaaagatgtccaacttgtgcttactctctagggatgtctactacaaaaatataatataaatataaataaaattgggtgcacaaaaaaataatataaataaatatataataccacaaatatttagaatatatattaatccaatataaattaaaaattaaaaattaaattatgttattactttgggttctctatttttaatttctgatttatatatccatcgtttaaaaagtagttaattgttttctggtttattctcttaaatatttaataaattacatctttcccaaagcatagttaactaaaatcaaacgattttattatattttctaaattagtgagacatagagaagatataaaaaaaaaattatatagaagttctaaaattttcgtatcatttccgttttggagatcctatttacaatttagaagaaaatatattcaattaaactcttaatccacgctacattttttttcttttggttcctctctccttttagaaagaaaatatctgaatcatcttaattctctctcaatctccgaaccctaattctctcatcttaatcccctttcagtctccctcaaaatttagaatggagactgagatgagagaattatatctgactcttaggaacttcggtttcaaagaaaaattcgtatcaataatgacttcctggagaagataaaattcttggtcactctcctctgagccgaagagttttttgaatttcttgtttatgattagaactcttttgagacgtttaaccggaatcttgaatttatataagaagatagatatatcttgataattttgtcgaatcaatcgatgtctttggcttgaaccttctatcgaaagacattatcgaaagacattatgacttctctaaaactataagcttacaaatcccacatgtcagactttgtagtcatctaattggagctacgttgaattgatactacaaattttgttcaaatgaaaagttatcatataattgcaaagaatatattagatgtgtgttcaataaataattaaatatgatttgaaattaacttttaactgtcaaaaataattatatttttagaaaattaaaaaaaaagtcaacaattttagacttcaactcttacggttgtgggccgagtcaaccgatgcccgtcataaacgtcctcttacatgctcccaaaacaaagtcaactcaactatctaatcggaatatatatttgagtttcattatctttaataaagttgaatataaaccaaaaaaacaaaaacaaaaatctttggttttagatagtttacttgggtttgtatggctaagaatttagagtatctccggtttctttggtactcgttttcttgtcaagtaagaacaatattttgtgttgaaaagtcattgtggaaaaaaaccagaatagattcaagatgatcgaagattcgatagacaaaacaatgaccttgtgatattgatatgacaccgtgatattttcacaaaattcctcaaggaaagatttattttgattcttgtttatgattaatgaccttaaaccccataaaatgattggagagaaaccggagatgtgagacaaatggtttcgatctaatactaaatttaagtaagcgaatttcgtttaaaaataataatctaagtaagttgcattagaaaacaaatactaatttcaagatgattagagtgtttaattatggttccacctaatcaccgtttaaaacattattatactaaatctattgatatattttgcacaaataaaataatatatcaattatacttgtccgttttgttttatatatcatttaagattttttttacacatattaaaaaaaaatatattgttatatcatattatgtttgtatcaattaaaattaataatttaaaaatcaataacacagaaaatgtagtattaagaatattaatatttttcccaaattttattttagcatttacagaaagagatttttaccttaaataattacatttctttctctttttattccaatgacctcatacaaaattgtaacctggtgtgtctatatatgtaaactttaatattcctgaaaaatatgagattccattgggccgcgaaagaatctttataattttattcctgatatttagttgtattttttgtttctttccttgtggagagccaaaaagtctccaaagtcttcacgtcaccctcttcctcaatctctgcacccacccctcctccttctataagtactactcttcatatctctctctaccaaaatatcaaaacacgagacagatttgattccatttttattactgttactatcatccaaacccttggtatttgtagccatg

SEQ ID NO: 1831 - DNA, 3000 bp, Unknown
  misc_feature (1)..( 3000): cDNA_ID_3064608_gDNA_ID_1620453_Annot_ID_157558 3000 nt of promoter + ATG
tttttcgaattgacgctcttgtgagagtgtgtgagagttagatctgttttgtttctttcacctatttcaaaattttctatgagcgggaaaatatttgatattcttgttttgaaaattaaatgggaaaaatgtcaaacaaattacgaactttcaaatttgggacgatttaatcttgaactctacggaagacaaataaatcgtatagtttttgttgtttttcaaaataaatgacaaagtttttgttgagttgtcatttgagtcatgtcgttaagtaggttaacagaatttttttacggcgttaatgtctcgtttatctcctatgttagaacaaaacaacgttcttcattgcagctcgttttgtctgttgaaacaaatttaaaccctaaatccctaaatcgatttcattatctgcgattttgaggtcaatgtgggtctctgattttgagataatgaaatcaatttgggaaattagggtttatatttgtttcaaaagacaaaacaacgtcgtttcgtctctgcaataaacgacgttgttttgttctaacaaagtaaataaacaagacattaacgccgtaaaaaaattttttaacttatttaatgatatctcaaatggcaagtcaacaaaaacttgtcatttatttcgaaagtcaacaaaaacttgtcgatttatttgtcttctgtaaagttcaagattaaatcgtcccaaatttgaaagttcgtgatttttttgacatttttcccaaaattaaatcgattgaatagagtttttaattaaaaatatatatatagtacatatacataaattattttttctaggggaaatttgtaagaatatcacaaaaagaaatataaatagcaaaactaacacgtaacaaaaaaagactgatattctctatatattttgtattaataccaattctgcctttgtctctttctctatttcttgtttctgtgtatgactctacaatctctttcctctcacatcttctattcattctccctcttttgttaatgtaaaaactagattttattaattagttatgaaatacagattaattcataattgtttttggagatagttgtttcttaaatcagttaatgacaaatttcattgtagattttcgatactccaactgttattctcaataaccactatttgatgtgtatttaatttgataatttgggtttttcatattttttcaaagatataacgtattttgtatacgtttaattatattgtttgggttccatatattgtatcatttagggtatattttttttttttcactatgcgtttaacttgatcgtatgagtttcttatgttatgtctattagagtaagtgcaatggtagactctaagtgagtcccgtcaaaataaaataagaaacttaattgaaaaagtaagagggagaaggggaaagagagaattaggttcctaagaagagcgattaaattataatatttaaaaaattaatattatttgtaattaaaattatatatatatatataatcttatatatctatatttttctccttgtatcacgttccaagaaaaccctaatcaatatctggaactctattttctcaattatgtcttccacccaaactgatgaaaattaaaaatcaaacataagtatcatctatctttttattcattcatgagttctttgaatatttttcataacatcgtttttttaatgggaaaattccgtgaaaaaatctgacttatctaaaatatgatagaaaactacctaaacttttttttgtatgatcaaggaaatttttggtatgaaccaaaaagaaagaaccaattaatggtaatactaacagttgaagtaaacaacaaacataacttataacaattgtaaactatataatataaatatttgacaatattaatttttttggcgggacgaatttagcagaacgttacttcctaacaattgtaaataataaaatataaatattttattaacaaatagaatttataattttctatatactaatttaaaaaaaaacgtcttgccggtatacaagaattaaaatatagtatatattgaaaaaaataagcgactctcctacatcaccgtcgtagcatcacttgtttaagcctttcttaattagtatgtcgatggagactcaaaacccgaacaaggctgatctaccatgcatatattatacatagtttttattttttggtttaatgttaagattatcatatatagttgtttttgtctttctaagagattcaatttttcttacaaaatagagcattaaaattttaaacttcagaaacaaattttttgcccaataacgaaaagggtttaaaaagaaaaacggagcactgtttatcggacttcactaatggctttttttttggtttttgagtatttttggtctaaaaataacgaatattttcggtccgaatatttcattttgataatgaagtttatgatctatcggatatgttagaagttggaactttaattcggtttcggtaaacctatcagtttggcagttcacgttagttcaaaaaccatttcacgtggtgtcgggattaagttacacatactataattttagctatttaatgttctagttattatagcaagaagctaagaaccatttcacgtggtctacttgggattaatttacacatatattgtaggtaattaatgttagatgcatgttatatcaagaaccatttcatggggtgttactgttgggattaatttaccaaaaaaatttaagctaattggtgttagttgttaaagcaagaaccatttcacgtggtgctgggattaatttacacatataagttatatgatatataatttagctaattaatgcatgttagatgttatagcaagaaccatttcacgtggcttgtggccagactcacagctttgagaaatccgaaagaataaagaaaagaaaacaccattgtgaaaccattgcaaaagagagctgtgatttagattctggaaacaaatcaccatg

SEQ ID NO: 1832 - DNA, 3000 bp, Unknown
  misc_feature (1)..( 3000): cDNA_ID_3064643_gDNA_ID_1620454_Annot_ID_157584 3000 nt of promoter + ATG
taagaccaagactatgttcacttggttgcgttgttaataagatgttaaaacgaagtttatgtataaaaaaattgacagaacataactacatttcaaactccaaacttacgaaaacacacaagttttttctggaatctttcaagttttatttgatgtttcggaagaactaaattggggttttatctagtggtagacaaaaaggaaaaagatgagtacattttattgggcaatgtgttaactaataaagtttctagatataggcccatagaaaaaccaacttatataaactgtaagcccataaaggcccaaataaaccctaattttaaatccaccgacacatgtataaatgccaagccgtttcatatacgtctccactctgcaactcaggtaaaagactcttgctcctattatctcatgttccattgtttgttgatttcaatttgaaatattagtttctttcttcttcccttcattccttcaacttttataccattttcctgttatctattgatttgaaagttttaatttttaagaggcggtgatgacaaaaaacatttctcgatgctgaaacttactcgagagaccaaatcactcttgtaatctttcgtgatgcttgtttttatgcgtgtctgagcctaaaccaaaaaatctttcatttatgctttgattatcatagatcccaatttatgcgtttcttttattgcttttcaatttgtaatgcgagttttgctttattttgtccagccatggaagaagcagatcagttatgtttagctgctaaatccggcgacttgaaaaaggttcaaactttaatttactccggcgccgacgttactcactttgataacgacggtttaacgccgttaatgcacgccgctaaaatcggaaacgcagagatagtaacggcgttactcgaatccggagctccatggaacgcattatctccatcaaatctctcagcaggagatttcgccatggaagcaggacatcaagaaactttcgatcttcttctcaaaaccgggatccaatcagagctaatcttaggaacaatcgcaagaaaccaaacaaagaacgaatattctaatcaagaatatcttcaagacagagttagtttcagtgaagacaagttaatggatagtgaaagcaaaggtgtgatgatggcttgggaaaaaccattaatggaagctcacgctaaagctatttgtctcaacggtggtcacattcttaacgttggtttcggtatgggacttgtcgatacagcgattcaacgatacaatccggttaaacacacgatcattgaagctcatcctgaagtttataagcgtatgattgaatctggttggggagagaaagagaatgtgaagattgtttttggaagatggcaagatgttcttgataagcttgatgataattcttttgatgggatcttttttgatacttatggtgagtattatgaagatttaagagagtttcatcagcatcttccgaggctgttgaagcctgatggtgtttattcgtatttcaatgggttttgtggaagcaacgcgttttttcatgttgtgtattgcaatttggtgactttggagattgagaatttagggtttagcactcagttgattccattgccggttaaggattgtcttggggatgaagtttgggaaggtgtcaagcaaaagtattggcagcttgatacttattatctccctgtttgtcagtttagtgactgaagaagttttatgataccagcaattttgcgatattgtaatttttcttactcataaaaagtagattttttatccatttgaaaatagtcatagtcatccaataagaagaaaagaacagtaataagtgtataacataagatcccatagtcatgtgataggaaccaagagccagactaattctgttacaaatatcttaagaaacaaaagtactaattaaaacatgttatgcagaagcttcacgttttctacatggtctaaatatgtgaagactaagtgaccctgaaacgcttccattccttgtattgcaacgctcatcatcgtctttctctcaatattgaagtagtagacgtcgaaaggcactgtttgatagcacggcgacaacataatctcatttgtacgagtcactccaacaaagcgtaaattcagggttccaatcctatgctgccaccaagcgggtaatacgtacgtatgcttcgaccattccttcttttcagcatcttgtagaacccacaactcaatactcttactacgtccatcaacaaagcaatatctttcagaaacaagtgaagctaatttaccattgtagtttataagagttccatcatgcgctgctttaatgaactcttccatgactgtaataaatctaaacttctctgacctaacatcgaagcaaacgataatgtaatcccctgaagacaaattgatcgctggataatacaacacaccattgatgcatatctcagacattccaagaatgtgaggcatggaacattcgatgattctccatgacagttctccagttcctagtgtcagaacttgatgctcatcacttttatatgacaacaataccttgaactgtttctgaatcggttcatacacgaaaaatcttgacggcccaatactcgtcttcattggtttaggtaagcttaaggtatgtccagtgctgggattacatatcactgtcactgtttcgttcatttccttgcgtttaaaacagatcaagccattgacaggacgcgaaattttatagcataaggagaaattctttagagaaatggcggacgagttctcatatggattttgaagctgaggagacgagaagaagaacaagttaccatcttttttgcagcagaataagagttgcggtcgatgcaaagatcgggtcaagaacagctctgtgaaatcttgacggcaaattacggagatccagagtttcgacacgcaacgacatgtcgctatagattttgccggtaatctcaggagtatctcgatgatg

SEQ ID NO: 1833 - DNA, 3000 bp, Unknown
  misc_feature (1)..( 3000): cDNA_ID_2145422_gDNA_ID_1620454_Annot_ID_157601 3000 nt of promoter + ATG
aacattgcctgtgatgcacattctgggaactaaccgatctaagagagattttaaggcttgctggtgaacccttcttcaatgcttgaatggtagctgagatccaaccatctgcttcttgagtggcctctctctcctaagcaacacatatgatggtagagtgcgttgtcaaaggtaaatcagtcaactcaggatcgcaagtcaacatctctatatataaatgaaaagcttacaagtgcagatataatttcttcgactgttctccttgagaaacacctatcaataacatctaacctgcgcaacaaacggggagataaaaaataactgtcctctgcacttttataaattttcaattaaagatcagatgagaaatgagttctgtaaagagcgattgaaaacctgacagcaatacgaaattgaaattatagaaaaaatgtgttataatcatggtcaataaccgagaaaatgtaatcaggtaaaaccatactagtagaaagagtaaaagagataaaaatcatatagacttgcctgcggtaagcactctgctgtttcaggcgcggatgctgggtgtatgcatcgagaattgttgaggcaaaagttggatcatttgaattaattctgcaaagatctgcttctaatgcagtcaacctctgtggaaaggagtaaacctaactaagtagcaatccttggtgaagcagatagtgcttgacactagtagctatacaatatctgatgtgtaaagtcaattcagaatgtcttacgaaatagacgcacgcaaaggaagttcataccgttgaaggcacaaaatgagttgcaaggccacaagcaagcatttcagcaccatctaatctagctcctgtgaggccaacatactcccctgaacaaaaaagacaagaaagcattttcaaactttggtggctttaagaagatgcaaaaaaaggaaatatagcttctgttaccaaaaaaaccagggagccttgacaagaagtaggaggcgcctacatctggaaagagccccagagctgtctcaggcatggcaaaaaccttggagaaagtcgaaagatatgagcatattttggagcgacctatttgtcatccatggacatgtttaaggaaagattaccgtgttctcagttgcaatacgaaatcgaccatggacggatacaccagctccgcctcccatgacgataccattcaagattgaaacctatacgaattgatgagtttatccactcgggagtgattttacaaaaacaaaacgaaattatagcgagacctgagctttgctatatgtggccataacatagttgagcatgtattcagatgagaagtaattggcaccgagtctccagttacctagtcaacgaacgaagatagagaaagagtgtataaaagctgaaagtaagaaacagaaaagaatgggtggtaaaccttgattgatgtcacgaacaacagctgcaacatcgccaccagcacaaaaggctctcccatgaccctgtggcaaagttattcagtactaaatgtgtgtaagcggaagagataaggataatgattacctttaggatgacaagtttcacactagggtcctcctcaaatgcaaggaacagttgcagcaatcgagagatctacagaaaaaaatgagtctaagccaatacagtacgcatgtacaagaagggaaatattcgataccatgtggaaggacagagcattcagctgctttggtctgtttagtgtcaagattctaacactcgatttctcttccaccaaaacctgtgatcatattattaattcagagagcgaagaattgatcgtcgtagattcggattaaagacgcaagaaagagacctgagactgagaggccatctcgactgccatctttcttactggtcagattcgcctttgtatctccggagagaggagcagcaatgggatcagaaattaccactaatggctaacaaaatcttcacccgcttagtttaggaagttgatattgggccttatagtaatctgttggttttaataatgggctttattttgttaatagagcaaatggaactttgcttttcaaactcaatttcaaagccctcttgcaacatgcttgatgaatgagaagattatatgtttttatcgagtacgttagacatgtgttttttttgttaggaagctagttttccaactaaccaacacctccctctagcataaaatgacacgtgggcaccagatcaatcattaaaaaagtcttcaaaaattctcaacaaccacttctaaaagtcagacatgaaagccctcgcctctcgatatatagataatttgcatatacatgaaaactcaacaatctgacgcatatgcaacagagttgaaagatggaaagagcaaggatacgatggccgagtggaagaggaattaggctgaggcagaagacaaagagactgcgtgcgagagtgagaagctttttcaggcttctcaggagctggtgctgcagaaggcctccgctggtcagagaagacggtcttgattacacatctatacgtcgctctaactctttctacgccgatgcaattgcagactgcattgacttcatcaaccgctcctccgcttgacagcttctcattctcttccaataattctttcttccattttgtaaaatccaatgtttctgtatatgcaaccaattcgaattctttgtattattttatttttttgacgagtcgatgcatctttaagaagtgggcttataatgggcctgatgatactacatccttagaaaccacattagtttaaatcagatctgacaactgcagtggttcatacccttaaagattaaaggcccgttgaaaacccattaagtatttcacatcatattctgggccagatgaacaatctgacagctatacaagtccattcccttatccaaaggcccgttaaaagcccacgtaaaatgaatgtgtcagatccttccttgctcgattcaacgcgtccgagtctcagacactccccggcgag

SEQ ID NO: 1834 - DNA, 3000 bp, Unknown
  misc_feature (1)..( 3000): cDNA_ID_2145412_gDNA_ID_1620454_Annot_ID_157598 3000 nt of promoter + ATG
tcatcaagcatgttgcaagagggctttgaaattgagtttgaaaagcaaagttccatttgctctattaacaaaataaagcccattattaaaaccaacagattactataaggcccaatatcaacttcctaaactaagcgggtgaagattttgttagccattagtggtaatttctgatcccattgctgctcctctctccggagatacaaaggcgaatctgaccagtaagaaagatggcagtcgagatggcctctcagtctcaggtctctttcttgcgtctttaatccgaatctacgacgatcaattcttcgctctctgaattaataatatgatcacaggttttggtggaagagaaatcgagtgttagaatcttgacactaaacagaccaaagcagctgaatgctctgtccttccacatggtatcgaatatttcccttcttgtacatgcgtactgtattggcttagactcatttttttctgtagatctctcgattgctgcaactgttccttgcatttgaggaggaccctagtgtgaaacttgtcatcctaaaggtaatcattatccttatctcttccgcttacacacatttagtactgaataactttgccacagggtcatgggagagccttttgtgctggtggcgatgttgcagctgttgttcgtgacatcaatcaaggtttaccacccattcttttctgtttcttactttcagcttttatacactctttctctatcttcgttcgttgactaggtaactggagactcggtgccaattacttctcatctgaatacatgctcaactatgttatggccacatatagcaaagctcaggtctcgctataatttcgttttgtttttgtaaaatcactcccgagtggataaactcatcaattcgtataggtttcaatcttgaatggtatcgtcatgggaggcggagctggtgtatccgtccatggtcgatttcgtattgcaactgagaacacggtaatctttccttaaacatgtccatggatgacaaataggtcgctccaaaatatgctcatatctttcgactttctccaaggtttttgccatgcctgagacagctctggggctctttccagatgtaggcgcctcctacttcttgtcaaggctccctggtttttttggtaacagaagctatatttcctttttttgcatcttcttaaagccaccaaagtttgaaaatgctttcttgtcttttttgttcaggggagtatgttggcctcacaggagctagattagatggtgctgaaatgcttgcttgtggccttgcaactcattttgtgccttcaacggtatgaacttcctttgcgtgcgtctatttcgtaagacattctgaattgactttacacatcagatattgtatagctactagtgtcaagcactatctgcttcaccaaggattgctacttagttaggtttactcctttccacagaggttgactgcattagaagcagatctttgcagaattaattcaaatgatccaacttttgcctcaacaattctcgatgcatacacccagcatccgcgcctgaaacagcagagtgcttaccgcaggcaagtctatatgatttttatctcttttactctttctactagtatggttttacctgattacattttctcggttattgaccatgattataacacattttttctataatttcaatttcgtattgctgtcaggttttcaatcgctctttacagaactcatttctcatctgatctttaattgaaaatttataaaagtgcagaggacagttattttttatctccccgtttgttgcgcaggttagatgttattgataggtgtttctcaaggagaacagtcgaagaaattatatctgcacttgtaagcttttcatttatatatagagatgttgacttgcgatcctgagttgactgatttacctttgacaacgcactctaccatcatatgtgttgcttaggagagagaggccactcaagaagcagatggttggatctcagctaccattcaagcattgaagaagggttcaccagcaagccttaaaatctctcttagatcggttagttcccagaatgtgcatcacaggcaatgttgacaaagagctgactgtgagtatatatttcagataagggaagggcgattgcagggggtggggcagtgtcttatccgcgagtatagaatggtgtgtcatgtgatgaagggagaaatcagcaaagattttgtggaggttttgcaagctttttccatctgaaaccgtctttgttgtagaccgtagttacaacagcgtgtctttacttatgcaggggtgcagagccatattggtagacaaagataagaacccaaaggtttaacaagtctctccatttgttatttgtggttggtaatatgtgacattgttgataacaatatctgaaattatagtgggagccaaggcgactggaggacatgaaggatagcatggtggagcagtacttcgagagagtggaacgggaggatgatctaaagcttccgccaaggaataacttgcctgctttagggatcgcaaagctgtgaagtggagaaggtgatggagcactattgtttacgtctgtgggaaagaaaaaagaaaataaatgtaacaacacttgtgttgaataggacttgcatacattacataaatcattattgtatttgagaattgacaccaaagcagcagagcagaattgtgttaagatttgttaatggtgttggaggcacaaccatggcaaacggacgtggaagcacgtctatagtcattgttcatttatttgattgagattcctccttggtctcatcttctgaaaacgaaaaataattagaaaatcaggtgaatcgtgaagtattgaatgagaagaggcaattaaaaatctcccgtgactctcgtctccccatctctctctctccctctgcccaaatttctggggcaaatttgttcatcagatctactacaatctctctttttcttcgggtatg

SEQ ID NO: 1835 - DNA, 3000 bp, Unknown
  misc_feature (1)..( 3000): cDNA_ID_3072397_gDNA_ID_1620454_Annot_ID_157593 3000 nt of promoter + ATG
aattcatttacttttttgttctgttccgagatttcaaggttcactatcgattctgaaactcttggaacaatccagattcttggttagcaggtggggaagcattaatcatgtatttatgatacactgctccattattattacgagagagttgaaagtttcctttttgactcgtttttaaaggcaaggaagaagaaagactttgtttttaaaatgccaatgtttcagccttctaagaacggtgggtttgatgggcatatcttagatctacactcggcggttaaagacggtgttcttggcggcggagatgggaaatttctggtggttgttaccgatgagaagaagaaattggatttgaaggagatgatttctgagctggaattacctgaaataccctctgttttcatctgtcctatctctctagagccgatgcaagatccagtgaccttgtgtactggtcaaacctacgagaggtccaacattctcaaatggttcaatatagggcattgtacttgcccaacgacgatgcaagagctttgggatgatttggtcactcctaacaagactcttcaccaattgatctacacttggttttcacagaagtatgttttgatgaagaaacgatctgaagatgtgcaaggacgtgctattgagattctgggtacgttgagaaaggctaaagggaaagcaaaggttcatgctttaagcgagcttaagcaagttgtgatggctcacgctattgctaagaagactgttgttgatgaaggtggagtctttgtgatctcttctcttttaagtccttttacttctcacgctgttggatctgaggctatagctattcttgttaatcttgagcttgactctgattccaaagctggattgatgcaaccagctagggtctcgttgatggttgatatgttgaatgatggttcgattgaaactaagatcaattgtgctagattgattggaaggttggtggaggagaaaggttttagagcagagcttgtttctagtcatagtttgcttgttggattaatgagattggttaaagataggagacgaagaaacggcgtttcgcctgcgttaacgctgctcaaatcggtttctgttcataaacaagttaggaacttgttggttaggattggtgcagttcctcaattggttgatgttttgccatgtttggatgtggagtgtttagagtcagctcttttcgtgttggattcgttatgtttagaaagcgaaggcagaattgctttgaaagattcggttaacacgattccgcataccgttaggttactgatgaaggtatcagagaaatgcacaaactatgcgatatcgattctttggtcagtttgcaaattagcttctgaagaatgttcatctcttgctgttgaagttggtttggctgcaaagcttttgcttgtgatacaaagtggatgtgatccagctttgaagcaacgttcagctgagctattgaagttatgtagtctacattattcagactcaatgtttatctccaaatgtaaactcacaagaactatccaataaaagactgatcaagttttcacctttcgggtcaaaatcacacaacggatctgccccatcttgttgatgtatatagaaatgaagaagctcaaggagtatgagagtaagaaacgagtttcgatgtgttgaattctattttgcaatgttatttgaataataatagttaagtagaagtaaactgtataaatctttttgttgtggttggttcattattcagtagaagaatagattgaagaaaggaatcatttttttggcctcttgtaagttactagctgtttgtgagtcataataattggagaaattattgatctatgaatcgttttatttgacactcttataacccttagtgattcttgatagaacagtaggattagaaaacagatatgggtgggtttcagatttgtggaggggaataaaagtcttattttttgaacatgcattggtctgatttgtatgcactgtgtaaatgaatgaacaattgaaaagaaaggatgatttgacttatgaatcgtttcaacagttcactgtttgtttatctctgttttttatttaattggctatgagaatctgaacatatctcttggaaacattgtatcagtgagtgtgatgtcactgatgtgagagctcttgtctggaaataaaatctaaacacagttaccaaatctggaaaacaatttgtctcaagttagaaaaaataaaatataaataatttcccgaataggagctatcttaagatgggccttagttgaactatatgggctattatccaggtccagtaatattttgacagtcaatacaaaatgtcgtctttggctctaaattggattaagctattaagtaagataaagattacaatatttaaattagatattgatttagacggagatttcattatctatctctcaagtttgatttgcttctgctgtaacaaaaagatcacgatcgcaacttgtgtgtatgtgtgtgtgagagagagattcagatatggcttggttagctagatccatagcgaactcactcaagctcgatgaggaagatgaagatgatgataagcatctgaatcaacagccgtcggaatctgtatcggattcacagtctccacgaggcgttaaggaagacattagcgaacttaccaagaccttgagaacccaattttggggtgtagcttcgttcctctcgcaaccttcttcatctccggatcttcaggagagaaatcaaactcccgatcatccggaggaagatgaggatctaatcgctgggattaagaacgatttcgctgagattggtgggagattcaggactgggatttcgaaactatctgggaacttacctgtgtctgagttcacaaagatcgcttcgaatttcttacaattgagttcagaagatgtggatccgaaagattacgacgtaatcggagttacagaggaattagttgcgtttgtgaaggatcttgcgatg

SEQ ID NO: 1836 - DNA, 843 bp, Unknown
  misc_feature (1)..( 843): cDNA_ID_3064703_gDNA_ID_1620455_Annot_ID_157606 3000 nt of promoter + ATG
aagctttaagcacaacacatttgaaatggtggtggtgggtcaagacaatgtttcattgtctattctctgcaagtgtgttactaaacttttggtaaaaatttatgttttcttcgataccatacaaaatcttctgatgtgcctgtctttgtgcttatacatttgtggcaatttggtattcaatatttatatatctgaaatgtagttttaccacagtagtttctctccaaaatgtgtttgttttttatgcttgaaatgtagggtttggatttttgctctattctttagctttagatgtttggttggtaaaaattgtgaaataatcccaaagtaatacagagattttctatatcagtcagaaatttctatttggagaaataatcccaaacttttgttcctttgatagagaggttcaatattggctataatgcgatctctctggcattacccttgaaaattttctattacaaagtaaagtcatttcatgaataatgtgttttcttgattaccttttggtacaactgtcagcaaactaaagacaaagaaatgttacaaaccttttgtttgtttctcattggctcatagcttgaggtctatgtgtgattttggtatccaatgttttcttgttatagcttaagagaatgttttcaaacttttttcaacagatacaatcttagtaatcacacttgagtatttttcttaactggttttgtttcttggcatcttcatttcagggtctatatttctctgaggaattggattcttatagaagttaaaccgcagagcttcttctatccaatagtcctctgagaatcgtcgatatagtttgctgatatagttgttatg

SEQ ID NO: 1837 - DNA, 3000 bp, Unknown
  misc_feature (1)..( 3000): cDNA_ID_2145786_gDNA_ID_1620455_Annot_ID_157624 3000 nt of promoter + ATG
agtcctctatttattgtttccagaaacttttgacccaatatcatcttcctaatccaactctatgtgatgcaacttttttctacatattaaaggatcagaaaaagcttcaaggacagctcatagcagaacaagaggcactttacgggtccaaacccagcccatctaaaccccttggtggtaaaaaggctccaagaatgtcgaccggtggtgcatctaacagaagactttccttaggagcagcaatgcatcagactcctaagcctaacaagaaagcagatcaccgacataatgatggagctttatcaaatggtaactaagtctcttaatcaaatgtaaatcattggttatcatcatagtatgaatagatttcctaattgcattggcaaatgaatcttattcctgcaggaagaagagggcttgacattgcaggactaccctcaaggaaacaatcaatgaatccttctgaaatgttgcaatccccattagttcgcaaaccgttttcccccatatcgaccacggtggttgcatcaaaggccaacatagcaacaacaacaacacaacaacttccgaaaaacaacgcagtgaatgagatctcatcatttgcaactcctatcaagaacaacaacattctcaggaacttggaagaagagaagatgatgactatgatgatgcaaacaccgaaaaatgttgctgcaatgattccaatcccgtcgacaccagcaacagtctctgtcccaatgcacaccgcaccaacaccattcaccaacaatgcaagattgatgtctgaaaagcctgaagttgttgagtactcgtttgaggaacgaagactcgccttcatgctacagtctgaatgtcgtttggtttgatcatcaatccgttggattcaacttaagttcttttatttgtaaaactcaaattgaatgtggtttggtttgtaaaaggtcaattatatgattggcttttttttttttttttgagtaatcatttttacacgtatggtttattctgagactgacaagaaaaaaaaaaacatttcgtgaagtgtagctcagtagctgtagtgggaaactagtcaacctaatctgtattgaccacttcacattattattcgaaaattccgcaacatattattacctgacttgtcataacttgtttctggctatattcgtgtattcaaaaaattatttgcttgtgagttgaggtcaatatttcacaattttctattttaatttactggtggattgaccactttttcgtctccatgtatgacttcaaaatagcttggggttactaatgattttaccactttggataatcaacttccatcgatttgtatccatcatgaattaatttcagagatctatgaggtcttatttgacgacatatgcaacataataaaatagaaaggggtcggtcaaatgtagatatagttagaaatcttaagaaatattttatagagtatagaaaatattttatagatataatgtaaatattttaaatttaggaaatatataattctttaggttttatagagtaagaaatcttttttaaaaagttttctataggttataatagatttatctcttgaaaattttctgatgttacaagtcaaaattactagtcggaaaggagatttgtacgggacgaagagtgttgtttgaaatttgaatattataggctcacaagtcacaattcacaaatgggagattttgaaacctaatatgttgtttgtaaaattaatcttttgcttctagaatggaaatcagaactctctaaatagatacattccctaaccagagtttttaaattgatattatgtatagtcgtgtgatctagaagacccactataacttactttagacaatgataaaacaactgaactattttgtgcgatttgtatgtttttggtatcaagtttaaaaaaaaaaacttaatcaccccaacaacaatcgtgatatataggtccatcctgaagatctataacctaatccaccctaaaaacaaacttgtagactttatttgcgggaattagacatcctaatgaaaaaatttggataactttggtacggagtcattaccaccactcctaatgtcagggattagggacaaagaagattttgtacttggtctttgggaggctaaattggtcaacgttttggttatagtcaacgtggatagactgaaaaagaaaagagtgataatattaggtgacagaaatatcttaaatctttttcttatttttcattttgaatagtgtggaacatctcaaaaatcaagtccaactgcatataattaaaaatttgcctctacttattttattaaattacttaaaaactttagctgtatcccaaactccaagacttttgttaggaaaggagtgtaaatttttgaattttctaattaagccattattacaatattttagaattacacttttctcgtttctctctcctttttttttttgattttttccttttaataaaacaaccttttattttatttctataaaatcaaattgtaataatgtaataaaatccgctcctttgattttttttatattttctatatttatttattttctctttcccattctcctcaaaaccctaatttctcacatctgtaaagaaaaattctccctaaacttaaccctcctgtagaaaaaaaaaaaaaccctggtaattatgagtgttttaggagaaattcttctgaaattaagattccgccatggaagcttttgatctttctcttcactagttttacttaattttcaacacacaataacaaaaacaaaaaaatctctttgccccttttctctgaatcttacgtcctctggatctttcttctctctctctctctcttgtctatactttaagtgtctgtctgaagaagcttgaatctgtcgtgatcatcaagattcaagttctgtctttttgagtctttttcttctacttctattgagtttctcttccttaattgtcggaatcagaatcttttcagatg

SEQ ID NO: 1838 - DNA, 3000 bp, Unknown
  misc_feature (1)..( 3000): cDNA_ID_2145812_gDNA_ID_1620455_Annot_ID_157631 3000 nt of promoter + ATG
aagaagcagagaagcgaagatgacgaaagaagttaatccaccaatagcaaatgcaattgaagaaacttttcgaggaaacaacaacacagtcgtctttgaatttgaaactcgtggagaagccaaagtcatgatttttctgcacaaaacctataaaaaaaaacagagcaatcattcattgatggattacatatctaactgggttccgctaaatcacaataaagtttcgatttttacaatttgtttactaatctctattaggtgaaaaaaggaatcaataagagaaaaacttacatttagaattgaaaacgagacaaggacgatcgaagaagcttttgctttggagaggaataaataaatcgacaagatctgggagtttgagagagaagcgtggaaggaagaacaatgttatgaattgttaaagtcaaacttattttagtcaaaaaaaaaaaaaactaaacaatttaggagttttttatttttcttcttttgaagttatttttgatttggttattgtgtatgatattataattcatataattattacggttatatttcataattagtttaatcgtgtatgttcaacttttttaattgaactagattattagttaaactaaatcgaattacgattggttagactgttagatttttattaaatcaaatttaacttgaaaataaatcaaaatcttcactcttcattttgattaaactaaacaaaaaataaactaaacaatttaggagttttttcttttttcttttttgaagttttttattgatttggtcattttgcatgatattataattattacggttatatttcataattagtttaatcgtgtatgtccaacttttttaattgaactagattattagttaaactaaaccgaactacatttggttagactattagatttttattatatcaaacttaacttgaaaataaatcaaaatcctcactctcgattaacaataaacgttttccctttcttccccttcttgcgcttgttcttttcaagcttcttctccttcatcaacttttcaataaactcatcgttctttttctcaaactctctcagaagtttcttaagttgctgcttgtcgtttgccagtttccttaaatctgcagtagttagtttgattttacttccaaacttgattcacagagaaataagcttccttatgtcattctccacgtcatcctcctcctcctctttcttcttgtccttcttcttctccttgagatcccagataatgccaacttcttcttcaaggatttttgtatcaaagtagtcattttcgttaccaggtgcagaaacagtccacttggagtagttgataaggtcacgttcaaggttaaagtgatgaatggcatatgtgtatgcaacagacacagatccatccttttcccatgagacatgagcctcttctttctccttctccacaagaaccttttcaactccctcttctttcccttgagcttcaagtccctctttcctctcctgaaccacacgttgaactcctttggccactaaaggatgccaaaaatcctcgaaaaggaatcgaggctttggagcctaagagagtatctctttgtgaatagttttaacaagcacagtgtaaaaattttcttccttgacattttttcttctggtaatgagaaataagataaaaatttggagaaaaagaggatgaagcagaagaagaagtatgtaaaaagagtagttataggtggttaaacttaaagctatcattgttgtcgtcttgtatgggggaggaacactcaaaatcgtttcacagagacttgcaggaggtttcttattttatgaggacaagaggtgagaagtagaggaagcccaaagttggttattttccttttcaagatttttcaacaattaataagaaatattatatgaacgtatctttaaatcaattaattattagcatttgttttcataaaccttataaggcatccccttgttctccaaaacaattactgtcatcctctttctaagtgaaaattatatttttttttatcgtctctaagttgtttaaggggttaaaatactaattacaaaaacacaatctaaaacataaataataaatacgtttatctcttacatatttttgctgagatttttttattagaagtataaagatttttggggaaatttgatactaaggatcttttttagaactaaaaaggaaaacaaaaatattttacaaaatgatatatttcgatatataaagttttaatgcagtaatgaaactcaaaatgattgataacactttctaatacttttatgttgcaaaaacaaaatcatggtgcaaaatccactacttttatgttgtagtatatttctagaagaaatttggtttcatggtatatattgggtattaaataaagattggactatcttccctttggctttggtgtgtcatagatagtgataagaaatacctctttttttgggcattatttgttgacaaacgatatagaaaattataaacaaaataaagatcattggaaaaacatcatttgaccaaagatgtgtatatgtgtcccaatcagaaagttcataacaagttcctctcttctcttctcaattcttatgcatccacatcatcattgatttaatgcttttaaaaacagaacattacatttatttttttaaaaatgtattactttttggacaatacaagtttgatacatataacggatttcgcaaaatatttcatgttctttttgcaaacaaataatccccaaaaaaaactaaaggaaaagaaattcgtaaagaccaaactcgtaataaagagtatatactgtttccccttaaaaaaaaaaaccaacctaaaattaaaacccgtgggtttaaggatttgatcttttaatgttcacaaaatcgagaccctaaattgctctcacactcacttcccaatcttcttagttcaatttcaatttttagaattagaatctctgaatcccagattccggtagagaag

SEQ ID NO: 1839 - DNA, 3000 bp, Unknown
  misc_feature (1)..( 3000): cDNA_ID_3064666_gDNA_ID_1620455_Annot_ID_157628 3000 nt of promoter + ATG
atcatcatgaacggaaacaatcggaatctgtagcgttgaatcggagagagagtgggtgatatagccggaagcacagttctcgacgccggtaggccaatgcatcatcttataggccgcgaaactcatcttctctaccggaatctgggattcagagattctaattctaaaaattgaaattgaactaagaagattgggaagtgagtgtgagagcaatttagggtctcgattttgtgaacattaaaagatcaaatccttaaacccacgggttttaattttaggttggtttttttttttaaggggaaacagtatatactctttattacgagtttggtctttacgaatttcttttcctttagttttttttggggattatttgtttgcaaaaagaacatgaaatattttgcgaaatccgttatatgtatcaaacttgtattgtccaaaaagtaatacatttttaaaaaaataaatgtaatgttctgtttttaaaagcattaaatcaatgatgatgtggatgcataagaattgagaagagaagagaggaacttgttatgaactttctgattgggacacatatacacatctttggtcaaatgatgtttttccaatgatctttattttgtttataattttctatatcgtttgtcaacaaataatgcccaaaaaaagaggtatttcttatcactatctatgacacaccaaagccaaagggaagatagtccaatctttatttaatacccaatatataccatgaaaccaaatttcttctagaaatatactacaacataaaagtagtggattttgcaccatgattttgtttttgcaacataaaagtattagaaagtgttatcaatcattttgagtttcattactgcattaaaactttatatatcgaaatatatcattttgtaaaatatttttgttttcctttttagttctaaaaaagatccttagtatcaaatttccccaaaaatctttatacttctaataaaaaaatctcagcaaaaatatgtaagagataaacgtatttattatttatgttttagattgtgtttttgtaattagtattttaaccccttaaacaacttagagacgataaaaaaaaatataattttcacttagaaagaggatgacagtaattgttttggagaacaaggggatgccttataaggtttatgaaaacaaatgctaataattaattgatttaaagatacgttcatataatatttcttattaattgttgaaaaatcttgaaaaggaaaataaccaactttgggcttcctctacttctcacctcttgtcctcataaaataagaaacctcctgcaagtctctgtgaaacgattttgagtgttcctcccccatacaagacgacaacaatgatagctttaagtttaaccacctataactactctttttacatacttcttcttctgcttcatcctctttttctccaaatttttatcttatttctcattaccagaagaaaaaatgtcaaggaagaaaatttttacactgtgcttgttaaaactattcacaaagagatactctcttaggctccaaagcctcgattccttttcgaggatttttggcatcctttagtggccaaaggagttcaacgtgtggttcaggagaggaaagagggacttgaagctcaagggaaagaagagggagttgaaaaggttcttgtggagaaggagaaagaagaggctcatgtctcatgggaaaaggatggatctgtgtctgttgcatacacatatgccattcatcactttaaccttgaacgtgaccttatcaactactccaagtggactgtttctgcacctggtaacgaaaatgactactttgatacaaaaatccttgaagaagaagttggcattatctgggatctcaaggagaagaagaaggacaagaagaaagaggaggaggaggatgacgtggagaatgacataaggaagcttatttctctgtgaatcaagtttggaagtaaaatcaaactaactactgcagatttaaggaaactggcaaacgacaagcagcaacttaagaaacttctgagagagtttgagaaaaagaacgatgagtttattgaaaagttgatgaaggagaagaagcttgaaaagaacaagcgcaagaaggggaagaaagggaaaacgtttattgttaatcgagagtgaggattttgatttattttcaagttaagtttgatataataaaaatctaatagtctaaccaaatgtagttcggtttagtttaactaataatctagttcaattaaaaaagttggacatacacgattaaactaattatgaaatataaccgtaataattataatatcatgcaaaatgaccaaatcaataaaaaacttcaaaaaagaaaaaagaaaaaactcctaaattgtttagtttattttttgtttagtttaatcaaaatgaagagtgaagattttgatttattttcaagttaaatttgatttaataaaaatctaacagtctaaccaatcgtaattcgatttagtttaactaataatctagttcaattaaaaaagttgaacatacacgattaaactaattatgaaatataaccgtaataattatatgaattataatatcatacacaataaccaaatcaaaaataacttcaaaagaagaaaaataaaaaactcctaaattgtttagttttttttttttttgactaaaataagtttgactttaacaattcataacattgttcttccttccacgcttctctctcaaactcccagatcttgtcgatttatttattcctctccaaagcaaaagcttcttcgatcgtccttgtctcgttttcaattctaaatgtaagtttttctcttattgattccttttttcacctaatagagattagtaaacaaattgtaaaaatcgaaactttattgtgatttagcggaacccagttagatatgtaatccatcaatgaatgattgctctgtttttttttataggttttgtgcagaaaaatcatg

SEQ ID NO: 1840 - DNA, 3000 bp, Unknown
  misc_feature (1)..( 3000): cDNA_ID_3064683_gDNA_ID_1620455_Annot_ID_157616 3000 nt of promoter + ATG
catgaagaccattcattcttacaaccgattatccgaaaaagttagagaagcaaatagagaatttagaagttgaaagaccttattgttttttttcttctttgaccgtgacttcttctcctcctcgagtaaaagataagctgctgctatatctgacttggcgttggattccatattcacaatttcattctagataataagatacatactaacatataagaaacaattcaaaggccaaatcagatggtaaacaaaagctctctatatataaccgaagtttcagaccaaccagtaagaaaggtttcagcagtcgaaggatataagtgcggttgtcaaaagcagaaagcctggtgaggttggttagcaaagtaatccttgaattatcaatcagcaaaatcttagaatcgattagtagaacctgcgagtcatatagatatttttagatgggctattctatgttattatgttgtaatgaatattaacatcaaacaaaccttgtgggtgaccactgatttcaggtggtgtatggacttcaacgctatatcatcgccgagacttttacgctgacgtataagattcatgcaatcttctgaatcgaggaaatcaaatgtcggatgcgatgctccttggagaacatctcgtactgcccacaagaaaaaatttgcagtgatggaattttcggagactctctcttcacagctatcgcatagaagagatgcatatttattccactgatcttccagaagattctttctcctttcatcttcactcatacacaagttctcaacgacagtaagagctgcatcataatctaagaccagatatttctttgcatatttttttcccaaaaacgaaaatgtgaactgaacagctttcagaacagccacccagataccaaaattgtgttccctgataggtctgggaaagatcgtatctactgaattgtagtcagttaaccaggatatgatatcatctccctgagctggtgccttggcgtagtgagcattgggatcaaaaacattgattgtcccttcatcatcgaatggaacatctttgcattttagcagtcttttatccagaagcagaaatgaaaactgagggtcaaagtcgatcttttctttgactcgagtatgatccaagaaactgttcactgctctgcaaaccagatctgtaccatcattccttttacacttgatggtttttagaaagtctaggatttgattgagttcatgactttcaagaaaacagatactctgaggtgttcccactaggtgagaatcaataagactctgttcggaaacatcaagttttgcaagatgttgaaccggaaaacgcatcagccactctcgaatgctagaaggaagaattttatggtcacaaagtgacacaaggagcaatttgatttccttgagtaacttactgcgatcttcatctgcagctaaaggccactcttcggaccatccattcttaggtgcaaacgctttcacatctgcgagccgattcttgatcatttcaacggcagctactgtatccactggttcccaagctccaaccgatatcttacgagcccagtcctttcctatcctctggaccatatcctttttcgaagcatttttaaaatctgcatcatgttgttgttcaaaatgattcttacattcttcagcactagaaagcttcttcaaacatttacttctacacatccaaaacgtccattttctatctgccttagcagaagtgagaactttctcaaaaacatctcgtccctctctgttatgtactccctcgacaaaacttttaagctttgcaatgcttactttcataaagtctcttttgatcttaatatccaatcccatccaataagacctcaattcttgaatctcgtcgtcaacaaggtctgaacttttctttggctcccaaactttagactcagagcttaaaggggaagtcttggctccagcgatcatgcgctctgcatctctgattaaagtattgaattctttgttcatatctttttttagctcttgcaacattgatcgagcaacaggactcgtgttttctgggtaagtaactgataaatcttgttttgatttcttcacgcattgcttgtaatacgatactgacccaagctgtttggccaaattgtagaatcccattgcacaaagtcgtgataatatcacatcttgagaatagcattgtacagaagccaccaagtatgcgaaacccacgtctggattctctgttatgtcctctagtttcacgaacattgtaccttgtttgatatgaagaaaccatgagtccttgtctttcttgtggtcaaaaatcaaatcttcaagtatctccaaggccttgcagtgatttcctttaacgaattcttctctagatttcgtgatgagttttatgacctcaacatcttccaggaaagatggcttcatcatagtaacgactctcaagattcttgcgttttcttgctctccaaggtttcctttgcttcggagagaaatttgtcagaatgtagaaaacaacagcaacagtgagctggcttttctcacgtgagagccacgtgaaaagggttgatacaaaaaaaaaaccaattatgagcactgaggaattctgtcgaaccccttgtaagcaatatccgtttgggattttcacggagtagcaaaccaaaacaaatcccaaaaattgtgtgaatcttcgattttgggttaagacccaaatgtagaacgatcttcatgttggtgttacacaaaattcgtggaaatgtttggacttgaaaatcaacaatctcaatcttcttcgtcggatctctaataagtgttttgagttttactgttaaagaagacacattagctattctactgttattaagttctcgtttcaaacgccatgccgtttgttatatttaaaaacggcagcgcatcgctctatcccctactaaaccctgagcatttttaagttaaactcagaggtcctctgtcacaagccgcaagaagaagcagagca

SEQ ID NO: 1841 - DNA, 3000 bp, Unknown
  misc_feature (1)..( 3000): cDNA_ID_2145738_gDNA_ID_1620455_Annot_ID_157607 3000 nt of promoter + ATG
actccaatgttgggatgtgttgagccatttgaccggttgcaatgcattctatgaatttggctttaggccaaagtcttggaactataccttcccatgatttattgttgcattcattttctatgagatcagccaattcaggattaggctctccaagaatctttgaaacggagtctctacaactaatatcagtgatccactcactaagatgaccaaaacggatattagtgcaaatttccttccaagaattctcaagaagatttattgctcggaccaaaatagtaacaaaggcggcaccaaccttcacaacatcgtctctttgaacaagaccgcatagaagatgacagtacaaagtctgcttggtgtctgaacacaatatgacttcgtcagggcttgtgtaagaccaatgccaatacgatggtcggttcttgaaataatcactcttgaagaagctcgtcgatgcagctgatgatggcaaaccagaaggagttgtgttctctgatgtacaaaagttaaataccattccctttccatgttcaagaccatctatatgcctatcatgacaccaaaagagactttcatcaataatctacaaatataaaaatgttttattaaaagaatatgttgtgttatcatcattacttgcttataacgagcgatcggtaataaaagatgaattttatgttttccaagtacttgttgttacgaggaaacatcttctgttttcctccggatgttccagaactacagtgaaaaaccattagagcacattatctctagagtttctaacatcactcacattgattgtataataaccaatgataaagttgctctaatacaatttttgaaaagaagaaaaaagccaggaaatgaaaagtatataccttagaaggaatccggtaatggggttgccagagataatatcagagggctctccattcgtgacacgatcgataaaaggcttcacatcctcgtaggtcaccacagggacgttcttcttgaaaagctctttactagagctcccatggagaaaacgtcgaagatactctgtgttagcattaagtgtgagtatctcctccaatacgttgtcttgtatttgcttcacattggacgtcaagtcctctaaaatctcctcgtctaatttctcagtgagatcagagcataaactcatatttggttgtcttttacttcatctgaaatcaggaattggacacttggctctttttatatagcaataatggggtcatgccatgaatattcaaatattgctagtttatgtatattaaagacaaacgagccttctctatatatgtaatctttataatctttagattcacgggtcacttgagatatttttacagtaaaaaattaaaggctcccatgcaccaatgacatacctttacgtaaagcgcacggttgaacaaaagcacgcttctccaactcacaatatttcacaattcacatgtaagaatctgagacctatatatatccaatttttcatgttagaattcttgaaaaatgaagctaaacatcgttaatccgacttaaatatataataattatgtactgtcagaatatctttatgatttacaaagtaaatctccgttttctactgaattatactttgggatattcaagatttgatatgggggttcgaattttgcagattttattcaaaaatttgtaaacgcatatgtaatataatcatgcttattcaaaccaagtatggcttgaaattaatttatgcacatattttccatggcactatttggcaattccacaactgcatgcagttgcaaaccgttgataaaaatcaacattgttaatgttcatttcaagatggatgaagatttgtggggttgattggtggagacgatagaggatttgatttttaccaatataacacttttaacatctttttaaatctcttaattgttttcctagctcatcttgttctatttattctcgtcacattcactttttcaaagtcaacaatgataaattaatttttttaaaacaattgtgactttgtgagtatgtagaaaaaccttaatttccaaatcttttctaagcaaattggaaagcatcaaggagtccaaaaaaactccttaaatttttatggtggatgcctttccaatagcttatgagtggcagagcaaacttagcttgacaaagtctaacgaaagacactttatgtcctacatattgtaatcaagtggaggtgggtgaactttgatttttcaatgttatttatccgcgtcaggtttggactatgttaccactcatgtagagtttgcttgatgcttcattcacaatcgaaattggaagagttgctcgagctacaagcgcaaattaattatatatggtttctttgcaaaaattggtgagttgaagaatttgttttgcacaaaaccctttatcaaaacccatccattttgaaaacattttgtggaaagttcttttggtaggaaacggcaacaagaaaaatgtaactaaaagaaaaaatacaagttcattatgtaggcctgaattaaacaatgtttcagagtcaacaaacctaaccaagattcataatagagataagcgtaataaagttcactcaatctaacaaactcatagacatgaatgaaaaaaggggattgttattacatttgaccacacaagaaaacgttatatacaatatgaagaaaataacaagtaaaccattaccttaattctgattcttccactaatgataccggtattgggaagtagtcaaatacgttgttctccataagaggacttgatacatttcaagagtcaattacgcattttccacaaagaaaaaaaggagtatccgcgtaaccttatctttattacaaaagaaaaatcattgaaattatcatcgcaacgtgattacgtgagttcatttctctacatatattcatgaattcacatttcaaaaactcatccttttaaaactacgtaccggaaaaaaaaaaacgaccatactataaaaaaatg

SEQ ID NO: 1842 - DNA, 3000 bp, Unknown
  misc_feature (1)..( 3000): cDNA_ID_3064692_gDNA_ID_1620455_Annot_ID_157611 3000 nt of promoter + ATG
atcctgcctcgcctgccactcaaaggtcaagccaatgtaataaccgcacaaggtcgtactgatctatttcagaacacagggatctctattcataactcaataatcatacccgctcctgacttaaaaccggtggtccgtagtgttaagacatatatgggtcgaccctggatgatgtactcccgcaccgtggttcttaagacgtacatcgatagtgttgtgagtcctgtcgggtggtctccgtggactaaaggttcgacgtatggtctcgacacgctgttctatgcggaatataagaatatcggaccggcttcatccacgaggtggcgtgtccgttggaaagggtttcatgtgttgagtaaagcttccgatgcatctgctttctctgttggaaaattcatcgctggtactgcgtggctcccaggctctggcatacccttcacttcagaactctaaggccatctttgattttccatgctttaactaaaacgatgtcaaagtttataacatataattcatttttacaaatcatttcctattgacgtagcaaaaataaataaataataataattaaaaaaattcctatttcactctcatttgactaaaagaggagaggcgtgaaaaaaaaagttatagcatagtttgacgtgaacgtggctaagatcaattctcataaaaattatataagtgtatttgcatgtgtcaagagtgagggaaatattttcgataagatttggagatagtctcttttgatcctgcagaaaccaaattttagcatgtgtatacgaatcttaagtagtaatttacacttccatatataagaccataaccgtctacttcaatcacctatataagtcaactcatgttgaccatcccatctccgatcgaaaatttacatgaaccttggaaaaatggggtagtaaaagaaacggtttatatgaaattttatcctaatgaaattagaaaaataaaagagacatcaatttttaatgtgaaaatgaatacaaatgaaaaggtgtgtcttgtcttagctcgagttagccgaaatattaggagcaaacaaaacaagagttgagtttccgtctatattagtgatcaagagtctgatcgatggaacatgaatccatgcggtggaagagtctggttcctagctagaggaacaaaataaggtttctagtctttgggtctaagttagggacgtatgtatttcgtggaatatatgttgaaaattggttagtgtcgacctaaaagatgtcttcgtatcaaataatcataattaagcaagatcatattgtaagagcgtagatacgtagccaaatctcaagttgtgtgtgcgtttcttatatttgtttttacagtgattggagtgtgtgcatggacactcaaaggattttcaactgctcttttatttgctgaaaacacaattcacacaagtgcatcttttagttctcacgaatccaaaatgtcgacactcaaggaatcacatgggtcacttttatattatttgcgagtattaattagagaagaagactaacatgccatctttctcgacaagttgaatgttcacagtcaattaaattagagaaggctaacatgccactcaagtttatgttttcaatagataagcattactccccaaaccagtttcaactccggttaagatgtgaatggtatcacacattctcaactgatagttaattaaacaaagaaaaatgttcacaggttttgcattaattaatgtaaatttgaatgtaattgttaattatgttattggttgacgatataaatagcatgtgaagtgaaggattcacagcaggagagaagaaaaatgatgtatagaagcgtttgtttatttctaggattctagataggatgttaataatcatatttaataccttcaagtgacgatatttaattgttgtcggattgttttaattagttttatttttcagtgtttaattaagaatcaagatctctcgtacacagcgttcttctaggaaaataattgttcaagaactagtattttcgtttagtgttacaataggttttttaaaaaaaaccaagttttccgatgatatatatattttttttaatttaaaccagaaacagatggcaatatgttaaaatttatattctattttagattcttttgaacttctaatgtgaaacataacatatatagtatctcgattgatgagtcttattagtctatcttgaaccgataaatcgtagctaattagaccaatgaattagattttgatatcatattaaatttcatgaatttctaattcaatattttcctacttttaatgtggaatatttctcacattagtatatagtgaagtaattgctttgaaaactagttcttgttgcttttattaccagtactactaacgaatatgaattcttattttataaatttgtgtttaaagaatagctaaaataaataaaaaatggtcgaactttttgttagtattcctcctgaaaatctccctaaaagaaaatctttagtagaaaaaggtgataggaatcgttcacgcaataagaaaacagcagcattcgagctaccaaaggtagatctcactcataacctcacaatataaattttgtttgcttgtgttgctttaaatgtcaataccaccacaccatatatttttagatttaagatatagattgaagatcatgttcccactctctagtctctagcattgtactttgagttacattcaactccaccttctcaaaccaaaacaacatcaagttaacaaaagaagcaacatgaatatgatgatgcaaaaactctctattctatttctacatttaatattactagtactactctgcgtccatcctctcaccaccgtagccgaccgcaattccaccgattggtgcgacaaaactccataccctgatccatgcaaatgctacttcaagaaccacaacggatttcaacagccgacacaattatccgagttccgagtaatgctggtggaagcagccatg

SEQ ID NO: 1843 - DNA, 3000 bp, Unknown
  misc_feature (1)..( 3000): cDNA_ID_2145740_gDNA_ID_1620455_Annot_ID_157608 3000 nt of promoter + ATG
ggttaaagtagaagaagaagatgtagaagaaaagtggttaacgttaatatatattacaaatatgcaagttagaggtttattgttacttttcggctttatacaaaaactaccgttgagatttaacttaacggtatcggaggagagatcacatgatggcttaaaacatgccggagatactttttccgaccaatctctttatcttctacaactgtaaattcctccatctccggattaattcaagacatttttgtttaaaattttatgtgaagtaataactttttaatagaacaaaatgcaacataacgttcacattcttctcaatcaaaattgagcaaagctaaatttgcagagaggaaaaaataagatggaatattttgattgtttattgcttattgtatttgtttgctttatgttgagttggtttagtcctaatttcataaaaaaaaaaccatagaacctattgataacatattacagtttgggacaagcttaagctgcacgatactgaatccaaagaaatgtctattataaatagttgttgctagggcactagggttttgtacatcgttttggcgagcctggtatatttgatgagcctggtctattgggtggccctcttccatgtgcatgcggtgaacaacttccacctacctcagccttgatctctgtgatcaccttttgatcccaaaccccttctcctattaatgaaacaaacagcactttcaatagttagagtaaaaaacatttttctatattttagttaaatcaatccaaatcaaacaaacattgtattaaaaaccagttaacatatctagtgggagaaaaattataaggatttcagtttttttctcttttcttcatatgctaagaaattgtaatattaaactgcaaaaaggaaattaaatggtttaaactttattttctttgagttttctattatttgagagatattttgctaaagatggaatctgaaaccaaaatcgagatcaaagtaaatatggagtaacaatggacccccattcatttttaaatccaaaaactgaaccaaacttaaactgggcatatataaaaacttactggcttcgtatggtactcgagcctctgctgtgtttgatagtccagtgagcaacagaaaactcaaagtcagtaagcaaaccacaacgttatacatttttttatagtatggtcgtttttttttttccggtacgtagttttaaaaggatgagtttttgaaatgtgaattcatgaatatatgtagagaaatgaactcacgtaatcacgttgcgatgataatttcaatgatttttcttttgtaataaagataaggttacgcggatactcctttttttctttgtggaaaatgcgtaattgactcttgaaatgtatcaagtcctcttatggagaacaacgtatttgactacttcccaataccggtatcattagtggaagaatcagaattaaggtaatggtttacttgttattttcttcatattgtatataacgttttcttgtgtggtcaaatgtaataacaatccccttttttcattcatgtctatgagtttgttagattgagtgaactttattacgcttatctctattatgaatcttggttaggtttgttgactctgaaacattgtttaattcaggcctacataatgaacttgtattttttcttttagttacatttttcttgttgccgtttcctaccaaaagaactttccacaaaatgttttcaaaatggatgggttttgataaagggttttgtgcaaaacaaattcttcaactcaccaatttttgcaaagaaaccatatataattaatttgcgcttgtagctcgagcaactcttccaatttcgattgtgaatgaagcatcaagcaaactctacatgagtggtaacatagtccaaacctgacgcggataaataacattgaaaaatcaaagttcacccacctccacttgattacaatatgtaggacataaagtgtctttcgttagactttgtcaagctaagtttgctctgccactcataagctattggaaaggcatccaccataaaaatttaaggagtttttttggactccttgatgctttccaatttgcttagaaaagatttggaaattaaggtttttctacatactcacaaagtcacaattgttttaaaaaaattaatttatcattgttgactttgaaaaagtgaatgtgacgagaataaatagaacaagatgagctaggaaaacaattaagagatttaaaaagatgttaaaagtgttatattggtaaaaatcaaatcctctatcgtctccaccaatcaaccccacaaatcttcatccatcttgaaatgaacattaacaatgttgatttttatcaacggtttgcaactgcatgcagttgtggaattgccaaatagtgccatggaaaatatgtgcataaattaatttcaagccatacttggtttgaataagcatgattatattacatatgcgtttacaaatttttgaataaaatctgcaaaattcgaacccccatatcaaatcttgaatatcccaaagtataattcagtagaaaacggagatttactttgtaaatcataaagatattctgacagtacataattattatatatttaagtcggattaacgatgtttagcttcatttttcaagaattctaacatgaaaaattggatatatataggtctcagattcttacatgtgaattgtgaaatattgtgagttggagaagcgtgcttttgttcaaccgtgcgctttacgtaaaggtatgtcattggtgcatgggagcctttaattttttactgtaaaaatatctcaagtgacccgtgaatctaaagattataaagattacatatatagagaaggctcgtttgtctttaatatacataaactagcaatatttgaatattcatggcatgaccccattattgctatataaaaagagccaagtgtccaattcctgatttcagatgaagtaaaagacaaccaaat

SEQ ID NO: 1844 - DNA, 3000 bp, Unknown
  misc_feature (1)..( 3000): cDNA_ID_2145634_gDNA_ID_1620456_Annot_ID_157641 3000 nt of promoter + ATG
tgagaccacctccattggagggtccttaagagtttctagtactgaatccttacaaaaagaagccaaaattaaatcagaaaaatgaaattaatcaaggtacgcaccttagcttaggtattttgtgatgttttaggtgcgtatacgtggtggtttcccattgggtaaggtaagagacaaaacaattttttttctttcctctgtttgcgaaatcattgtctctcttctcttgttttctccggatgaattctctctcgatcagcttcatgcggcgtccacatcatcaaattggagaagataaccgaagaaaatcgtcccccttccgccgtgatcatcatctcaaccgacggtctcaacatctgtgacttcgaacataatcggcgattttgatgaaccaaatcggagagagaagattaataagatagttttgaggaagaaatcacaattagagcttaaagcaagaataaatcacaatcacaagatgggaatttttcggacaacgtagtgataatcagtcaatcggagaaagaaggtgacccgagtgttataaccatcaattgtcctgacaaaacgggtctaggttgtgatctttttcgtatcctcctcttcttcggcctcaacattgtctgaggaggtaacaattccatctcatcattacactttgtgtggttttcaaaaatttcttatttttgatatctgctgtggtttgtgacttgaatgtgttcgatgaaattcctctgaaaagatgtatcaactaatggaaaatggtgttacttggtcttctaggtgattgggaaaccaaacacgagatggaatctgttgaaggtgagacttgttgaggcaagtgcttctttttcttaggcctttggtatctcaagatgttacctttctcatcttttcaacattcaggtttgtgcaagtctttaatgtggttgtgagaatgccgtgtggtagggtcatcatcttagagggtctattgcagggcttcactctccttcgcaactattcctaatagatccttcaaaagagaaaccgtcatggaggatcctgaatgtcccagggaaaccacccaagttagcttggggacatagcacatgcgttgttggaggaactagagtattggtccttggtggtcacaatggtgaggaatggatactcaatgaattacatgaactctgcttggctagctggcaagactcggatctgtaaagactctttccttattcatttggtttgtggttatgtatctgtcacattccaaactcttatgacagaagcgtgtgtacatagtaaattagtgattgttgtacgctttagatattaatgtaatgatgttaatgggtttgctgtatgagatccttctataatatacttactccttgttacatgaccatgtagcatttgattttgacgtaccaaaaggcttctctgaagcatgcgaacacataacatccaaaagagaagccactgagttatgacatatgtcaacaaacccaaaagtagaaataatcacacacacctcaagtaaatagaatgaagaaaccgaacaagtaaagtacacaaactccaatacaaagctaaaacctatttaatttcatcaaaatactagttcatccaaaatggcaagttcttcatccaaaatgactggttttttttaaaaaaaaaattcacttaaggattctaccactggacagtaaaaaatgtaaagactctacaaaaactctaaactttaaaattttcaaaatttattattatacaaatgtaaggattcctttataaggacttaccaatggtcttgctctgagttgctttatttaatttcttgtttcttcattagttttatggtgatttgtttactgtcttcttactatggttcgtgttctctgaccatttaggagaagaaagtttatttggataaagctgctcaactaaaggcagaatataaacaagtcatataaagtgaagatatggctagtccttggacgaattcaaatgcagcaaagccgaggaagagagtccaagtggaaaatagcagcaacacctctacgactacattacgtcacgctaaagatgatagtatatggtgagaaggaaacatgagacgtcatggtgaggctccaacacgaccctctaaactcattggatttatcgataagagtgttcatggttgaccaagcacaatgacattgttgagattacatgattatgaaggcggcttacgctactggtttcacatccatatccactaatcttattttacaagttgttatattatctaaaattttcaaagtcttacaaatctttacattcatagaaaaaagaatgtcatatggtgactatcaaacatctagttgagaagatttaagtaagaaaaaacgaatatctatttttagtatttgatttgtttcataaatttacagatatacgattttttctaaatcaaatcgagtcgaatagtagatggaagcgaatccaacaaatattttgcccaacagtaaatcaaatcaaagaggcatttttgtcctataaaaaaacaaatgttattttaacaaaggacaataaaataaaataacagaatggtaagaaaaaggtaaaaaatttactccttttttccaaagtctccatttttactttctttttcttctccccagcagagagaggggaagtctctaaacccttgcttgtcatcaaatcgattcctcgagtgaggaaacatttctcttttcgtggatcttacgagaccgagaagagagtaagatatgtccggcgcatcgtctgaggatagcagtattttcgctcgctggtgatttcttcttcttcgttgaaaacttttttgaaatcggatttgtgtttctaattttgttcgaattagggttttgttacaaagatttagcgattgggatttctagggcttctcacaagtttttgttttttttttgttgttgaaaattcagtgaagacgtagactgtaacaagaaaatacctgtagagcttgtaaggatg

SEQ ID NO: 1845 - DNA, 3000 bp, Unknown
  misc_feature (1)..( 3000): cDNA_ID_3064730_gDNA_ID_1620456_Annot_ID_157645 3000 nt of promoter + ATG
aaaatttccatcgtttggaaatagtagacactatcacactaatgatccggtagtaaaccatgtgcatgagccatgaggttaatttgcattctttcatttgattttcactccataatctttcgtttttatttggtcagtcaaaactcaaaataataacacatctaattttagtggcttatccggtggactgaccatcttcaactatacattttgaaaattatttgtattttagatcaaaattatttattattaacaaaaataaaataaaatacaacttatatccaatgatatatataaacatatatatcaatggtcaaaatttttataatttttaaaattgtaaagcaaaatattaaggtcgtaatagtaaaatgttaattatatcttcccactgaaaaaagaaaaaagaaaacgaatcagttttattccacttgcacaaatcttcttcacacacatttttttttcttcactcggactgatatgagtagccaaatcgctttgtcaccggccatcgccgccgccattcgccgtccgtcctctcacgactgtctatccgcttccgccactactgctaccgccacccccatggctctcaaatcttgcatcgtcgcacctctctcgctattcacctctcaatctcaaatcaaacactcaagctcaagaaaaacttctcgaaccacgattcgatgcgatgtagcgataaaatccgcagattcgataaacgcagacgccaatccttcgtcctcaccgtcatcagaggaagaaatcgaagcggaagcgaaggcgaagataggatctagggttagagtaactgcaccgttgaaggtttatcatgtaaatcgagttccagaggttgatttagaaggtatggaaggtaaactcaaagattacgttgctgtttggaaagggaaacgaatctcagctaatcttccttataagattgagttcttcaaagaaattgaaggtcgtggtcttgttaaatttgtttcacatcttaaggaagatgagttcgagttcattgatcagtgatgaaacaagaaagacaatttttgttttcctttctcagtgtttgtttttgtttgttgtgtttactggaacctgggaatggagaatgatttgtatgtagtgtgatgtgtattcaacctttagcaatcatatacataagggtttcttcactctctatttatgttgatttgattcattggcttgatcttgttattggtttcttagtgttcgatagattggaagaaacgaaaagttggatctagatgtggtttcttgatgattaataagggcaattttaggctgcggttgtttcaaatgattccattagcaagatcaagatccaatttgggataacacctagtttactatgtttgctgtttaagactagtatcattgaagtatcttgaattgaaagggtggatcttggtcatgatggtaagggtgattagggagtggagctcagactctctactagattgagttagcacttgagatgttacatagtgtggatcgtacttgaggagtcttagagaaacagttccttaggtattcagatgattttcctatatgcaaatctgtgttgtctctgtttggttcatgtgtctttagcttataaaatatgtttgattttgaatcaaaggtaaactattgtcattctcctcttctgtcttttctagtatttgtgaattcagcagcttcgtggctgtggtattggtgatgatctttatgctcgtggtcgcatttcgtcctagtgagatagaggagaaggcaatctagatttgtagtcgtcatcaatcgcattttgatctaggagatgattgagctacgattgttagtctttgaaaccttgtgaatttcaagcttttgttgttgatagagtatataagcttaaagtctctaaaggaaagtgctccaaaatatgtcatccttatgtttagttggtgggtcagattaggcccgtttttcgttcgtgggtcagattctaggcccgtatcggtttagctattcctattctcataaactttaaaacaagatattttaggtagagagaagcgagtcgtcttagtcaaatacatatgccctaaggtagacaggttcatcatcatagatatcacgagtctgtcattattctcagaagaaaactaaaaaaaaaatcttagtaatatgtttagattttgtgaggaatattattatggttgtttgatcaactctaacgtactaacacgtccatgtatcacgtcttccaaagttcaacgttttataaagattggagtattaaaattggagtggatggagattcgagcttgcatatgaataatacaataattggattacaaaactcagatttggtgacagcacatctaggccaaggccaggccagaccatggtggcaatgattgatttagctttttaattagctaatgcattgtgcgctttcaaaagcaagcagccaaagtatatgtaatgagggacaaagtaatttaaactctaaaaagtcaaaacgcttatatatgtccgtaattttaggtttctatttcaaaattttgtagttactgtaatcttgtctttaaaagttgttacaatcatcttccacataaaaactttatcttaccgaatgtttatttaattaacatctatccataaagttgttttcttgatgttacgtaattgatttctaccacctaatgaatttcttctttaacaagagaatataaaaaacatgattttaaaataggtgttcctgatattttaatgtaatgtgaaatgtcaattctacttaaataacattgcaccaataaatcaagtccctaattctaaaaattcgacgacggataaatgattaaattaaccattcaaaataattatgaatttttggttaaagtcaagattcaagaagcattgcaacattgaaatcatggtttcacaaaaaaaaactctttattaaataaaaaaatcttttgtttttggagttagagtttgtgtacttgtaaaatg

SEQ ID NO: 1846 - DNA, 3000 bp, Unknown
  misc_feature (1)..( 3000): cDNA_ID_3064722_gDNA_ID_1620456_Annot_ID_157647 3000 nt of promoter + ATG
catcttcccatctaccaacttcttccactattaaaccttctctaatcatccttttaagattataaggttattacttaagctaaaccatcatcaactaacatagcataatcgttttctgaaagctaaattattaaatctggctatggaaatattgacagctaagctaaaccattttaagaaattttttgtttgttatattcagaatattcggcatctatagtgagaaaatatggtaaactacaaatagtagtagtagtttgtgaccaataaatatatcatatctaaatttggtgtaacggtggttgactttcttatcaattttgaaattatttatttgaaaaaatagtcgtttcttttgtcaagattcaagaacataagtaaattaacaatcatatattaaatttctttgaatgtgaaagtcggtgatttttctttaaatagaattaggttatatcatggcaatttccaatttatgttttttttgtagtttctataatatgtcagaaatcacttagcattatggtttacgtcaccagtcacttagatacatataatatatggtatatcatttcaacatcatgtttttgtatttgaaagtgttttcattttttcttttctttttgaatatctaaaagttcaaacatgaaaactttactttccctaaatttagaattcacatctagttaaattcatatttttggaaaaaaaattcatcccaatagaaatataatccagaacttctacctgtgagatttatcaatgggccaactccgtattgataaaatgttttcatttatctacaacttcttctaattttgattataagtaaaattgtcatcgtttttctatgtaaatatttaaatccacgtatttgatgttccttcttttctatatataatatataatataaataaaatgatttattgttatttaaagattaaaaaataattatagtgtttgatgttgtatctaattgaaaataatatcaaatatctcattataaatttaaacaattaaatttttaaaatatagatatatatttggtttatgatactacgagcgttaaaaactcaactcaactcattacccaataagtttatagctaaatgagtatatgagttgacccaaccaatttgtttaaatggattaacctatgcaattaataactgtttaaataattaataaaaaaactatttataatgattatatgaacgtaatttgtatcgattaacgagagtaatggaatgcaattaatgcactgtaacatttttaagtcaataaaacttcacattattataacaattcacgattacaagaatgtctaaaacataaccaaagctatccactaccatttgaaaacatcattcatattttttttccctagaagctggatctctaagatctgatcgaataacattctagatcaacttactatacaagaagaatgaaccaaaagaagaaaataaaattgcaaatcaccaattgcaaaacggaaaaggaataacaaatgaaacaaagaactcgtctccaacaaaaacgatagaagaagaattaacgaaaaagctctgataccatattaaactccgatgatcggagaagagatgataacgaaaacttaacaaactttcattacacacataagtgtttgttacaaagcttaattaatctgatcatgaaaataagcttatatagtatatacttctctcccaagtcatctacaattcataacaaataaatatataaaaaatcatttaacaatagaagaagatgagacatgaaatcatatcaatgatattgtatcacacttttatcgtcaatcacaaaaccatataaccaggaacaagtacacaatatagtttggacattgttaggaaaactttgatttatgatttatcgccttgttatatatgaaattttttaaaacatttccagaaaatatatatgtatcaaaattagagtttatatgatttatcttagatggatattatactttgataaataaaatttgttacttattaagttttttgaaatataaataacatttttactgaattttaataacattgttttgtttcattttataatcaaggaaacaaattcaaatctaattactaaaaaaattctatgagaattcaaatttacctactaaatatataaatataaagttaggactaaaaacttatattaaaaatgaggggttttaaaaaaaatatcttgcgaataaagcaattgcaagaataaaatatttcgaaaaataaagtacaaaataattttaaaacatagccattaaagtaacaaatactactataatatcataaataaaatagattaaaattttggaaaaaagaagtccaaaaaaaggttctgtagtggaaataaatccgaaaggagggggccataggtttctgctgtcgagtcgaatccaatcgaaatcgaatcgaaattgagtcgagtcatcatctcctccgccattatcgtcttctctctctctctctccgccacctctcttcaattctgacgcttctcagatcctccgatccggcggcgttacttttgctgatacacttctctccatttcttctttttgttcgccgagaagctaaggtaagacgaataaatagctaaaagcaagctctgacgacgatttcgttttcagattcgtttatcatttgcttccgattcctcatgatctgttgtatagtgttcttattttgattgaatttccatcaaatgctggttataaatcgatccatggacatgaattttgttacaggagaattcttcctgaaaacgcgttgatggatctgatgtatagctacggattagaattgtgtaattctctctaaaatctgttcgttgaccagctcgaacgaggtttgattgggtttctctgtttatgctcatcaggggttttgttttgtgtatgccttccgatcactgtttgtcgtctgtttcgtccgcggaactcaagagcagagagattgttagtgtacggatatg

SEQ ID NO: 1847 - DNA, 3000 bp, Unknown
  misc_feature (1)..( 3000): cDNA_ID_3064726_gDNA_ID_1620456_Annot_ID_157646 3000 nt of promoter + ATG
aatggtctgcttactcgaagcaatccgaaagaaggagtttctatcccaattggaatagtacctgctggttctgataactcgttagtttggactgtccttggtgtaagagatcctatttctgcagcactctctattgtgaaggtaaccccgcctaaaatcctattggtccctgctttgttttatccagccgccaacattaattagcttctacttaattaatattttctcagtgaaagatttttttttttttggtttagggtggcctaacagctactgatgtctttgctgttgaatggattcataccggtattatacactttggaatgactgtttcctactatggttttgttagcgatggtaagtgaggatacctgtgtgctttgtcttgtatgattttctaatgataaacagtttctcaagtgtagttaggtttgaatctgtattcctagcttctttgtttcattcaccgtgtctgcaactgtttagatctttcatgcattttagaggagagtttttaaatcttccttactgtaatttttcagtttatcttctaaatattttaactggcacagtgtgaacactatgctgactcccaagacacataatttcatagaatattgcagaatgtgcactcttctgatgatgagttagaagcagaaaatcgcctagttattcaaacgtatcatggataaactcaaatacattgaacttgtgcaaaaggctgtaaatctctctccatttctttaacagctccggtgtgtgtttgatgtattagtttgagctattggacgctgtctcgtgtttgacgtcaggattattgcacatataattaccttcatgaatactgtataatgtttgtggcattcacctgctataactaaatttcatggtttttcttgtcattatctatttgcagttttggagctctctgaaaaataccaaaaacggtttggtcctttgcgttactttgttgctggattcctcaagttcatgtgtttgccgaagtatagctatgaagtggaatatcttccggcacaaaaagaggatgcagaaggcaaaattcgacttgaaaaggaagctgtggatatgcaagatctctacacggatgtaatgaggagatcaagcagagaaggatttcctagagcctccagtttatcaagtattgactccataatgaccccaagcgtaggcgaattagacacttgtagcagcacacatgccagcactgagccgtctgaatatgtccgtggaatagatcctaaaatgaaacgcttgtcctctggaagaagagatgttacggctgagccagaggttattcatcctcaagcacagtcaacaacccctaattggccaaggacaagatcaaagtcaagaatggataaaggatggatggggttaacatccgtgcaggatcctccaactcgatgttcatgggggaataccggtggtcaagacagggaagatatatcatctactgtatctgatccaggtccaatctgggatgcaggacccaaatgggacactgaaccgtctgcttgggatgtagaaaattcgatcgagctgcctggtcctcctgaggatatagagacaggactgaggaaacagagcatcactccaatatttgaggataaatgggtttcgagaaagggacatttcctcggcatcatggtctgtaaccatgcttgtcggactgtgcaaagttcccaagtcgtggctcccaattcagaacatgatgatggtacaatggatatgctcttggttcatgggtgtggaagactgaggttactgaggttttttatacttttgcaaacaggtcgacacctttctcttccgtatgttgagtgtgtaaaggtaaattatctttcctattttcttacattacgaaacctgcaactcgctatgtgctaggaaatgctaatcaaacggtcaaactcaatgcaaatattataagtctagaatagaatgtagttgatcaaatgcatgacaattgcaggtgaaatcagtgaagataaaggcggggaaaaatacgcatgacagttgcgggatagacggggaactgtttgcattgcatggagaagtgatatcgacaatgctacctgaacaatgcagactgatcggtaacgctcctggacgacattcatagttaattaatctcatctaaattgtgaggatggtgagagagtttggatgtttatatatctggaattcatttttattgttttttgttttttgtcggcgtcaagtttacggtaagtaccatctatgtgataagagaagcaaacatgagagagtataccaagtacatccttttgtgccataacttccctataactctaaaaccctttgtatattcttttgcccttttttgtgtgttttgaattatatatgtactgtgtacgtgttttctacaacgatttgtgtgtttccatttctttgtttggattagtcgatcaataacgaaatagatgatttgaagtaacgaggtttttggactaggttaactaggtgaacttctaaagtgatattatttgtggattaagaagattttattcgaagatatttaactgatagagattctttctgtctgactcggaactttgaagcatcagagtctcacagatgaatatagtagaagccgcacgttcctcatcccgtgaaaaaggacacacgtctgacttctttatattgctgggtcttcttctccctttcctttttacttcttaaagtttaaacctttgttattatccatttcattcacatgtttttttttctgtctgcttatcatttacacgtttcttgatttgtttcattcgaaaaaaaatcatattaaattgcatccatataaatttgtagatgaagattttgacatattaaaaaaatgtaaatgcatattttagcatcaattcttccaactaataatgataaaaaatttccatcgtttggaaatagtagacactatcacactaatgatccggtagtaaaccatgtgcatgagccatg

SEQ ID NO: 1848 - DNA, 953 bp, Unknown
  misc_feature (1)..( 953): cDNA_ID_2145696_gDNA_ID_1620457_Annot_ID_157657 3000 nt of promoter + ATG
agcagcattaggaaataaatatctcttcttcagagcttctcattaaagtccgtataactaactaaacactcttagtagaatttacttttgacattttccaacgtaaaaaagatttatgacccaaaaaaaaaaaaaagagtttgaccttgtaatcacttaacttgtgtcgtcgttcaagtacaacgcatgtgtgaggaaaaaaagaataatgtgtttttataataataatgaaaagccaaaacagaccgatcaggtcaaaagaaagccgtaaagaaaatccaacttaaaataaaaataaaatctcttttaccaaacagatatacagagagacttcaatcagaggaaataaataaatttcattatttctctttctgaattaataaaaaggtttcttgttgaattgaatttgtagctgtgtttaacgtagtagcacttgggttttagatagacaacgtaaccaaaactgtttcatgttctgtctgtattctctcttttgcttttttgggtttcctccttctttctcatctttgctgcggtgcatttttttctcgggaaaatcctttctgggctttccgggaaagttttcttgtcagattcggaaaggtaccaaaaaaaataaattaataaaaacttaccaaacagattttgtgtttatctctctctctatagattcttttgatcacaaatccttttcgtttttgatcatattttgattgagaacaaaacaatcttcaaagtctcaacctttaagtttgattgatctttttttggtaagtaaatcttctgtcgtagattcgatattttctgatcttctcttttcgaattcttcaatcttcaacgatcccaatcttcttcttctggaaatctattttgcttcttcttcaaattttctggggaaaaaatcaaattcttgagttaattagactccgattttgttgaatcgagaaacgatg

SEQ ID NO: 1849 - DNA, 3000 bp, Unknown
  misc_feature (1)..( 3000): cDNA_ID_1009146_gDNA_ID_1620457_Annot_ID_157664 3000 nt of promoter + ATG
cagcatggaagctttcacaagcaagtaagcttccaaacctgcaagttacatcacatgaagattcattttactaacagctacatttaggagggagaacaatcttaatcataatattgaatttcaaagatcttaccacacattaagcgcggtaataaggctgttttcgggactggaaacaagtgatcttatagagtccagatcagtcagaggaactccatatagcctctccattgtaagtacccgccggctgctgcagtacttatatactcttggagcagtagcttgccctgtcaaccccatggtttcaagatatctcttaaatgactcaatgttttgagcctccttattgaaatctacttcttcaagcattgactcacgaatatctttgacaattccaacctatccataggataatattgtttagagagtatcttaagagcgactgcaaatcaaatacagaggagattaccagtgaagtacggctaaactcaggactaaggaactcaaatatacgggaaacaacgtagataaagttcaaatctgccactaagaaatcttctatcccaggcttcaagactttaatcacaacatcctcttgggagcctcgaagccttgcaccatggacctggtcatgatgattcccttaagcagaagaagagtacatgaacaaaatgaattttgatcattgaagtacaagtagaagaacacacttgtgctattgaggctgatgcaattggcgtagggtcaacatattcgtatacactttcaatgggtctcccaagctcctcttgcaagattttacgaatttcttcaaatggcacaggaggagctttgtcaaagcagttctgaaattctttgacatattctggtgggaacaaagttggcgcagatgctataaactacaaattcaaagatacattacaagtattgttaaatggatagaataggaaatatatagagaagcaacaaaatatgataactaagcttactttagacatacacagttcacatggttctagatatttacatgatatcatcagaggatacaatatgctctacatttagcaacatgatttacctggcccagcttaatgtaagtagctcccatgcgttcaaagagtttcctcaaatatagaggagacagtagaccaagctgcaattcacttggtaatccaccagacgcgcttgtagactgcagcgagtgagagagtagttagcaatcaaagatagtttgacatcataagcaaaaagataatttcagccaccttagataaatcatttagccactctcctccaacccctacaaaggcttgaacaccttggacaaggcgtgtcacacctcgtggacctgtgtttatcgatgtctgaactatatcctcaaccaatttgggcaatttctctatctggcctgcatcaaaagccatgtaaacaagtaaatggatcaataaactgtcatccaatatgtagatttttacaaaataaatccaataagcaacaaagaataccctaacgagatacaattcagaatcatagatgtatacaatgagattgagtttacaagaagaaggaaatttctgtactttgaagacgagaagtgaaaaggtcctgagtttgcgaatactgggctgtaagaacaaaacccttgaaattcctggctccgatcatcttcttagacgttcctgacacagttctcgcgacgggaaactgaaaaatgaagctatcgagattgagcagcgagtaaaggacctttgcaaattttggtagctaagccataaagagcagatcaaggaaacgactttactgaaggaaagagaagagaaaacaagtaaacctgagaatggtgaaataacggtaaccgcgtgccacggaaagctgagaccgccatcgttcgccggcgattgaagcagcagagacaagacactccggtcaagctttattactcacaaaacgcacagaaaagcgacaccgttttgtatattttgaaaattgaaaatatcctgaggcggagtgaaggggaatatgccacgtggaaacgtgtaagtggttgttttcctcctcacaagtcacaacatattcgtgaaaaactctcggtacgattcgatttccggttaacctcttttaaatcccattaaaccgaaccgtttttgcgacgctggaggagaagttgagataacgcggttttacataaatacccttataaaaattgagaaataacaaaaccattcaaaccctaaccactttcacggaacctcttcatcttcgtctctctgtcttttttcttctctcaacgccgttgattcgccatcgtcgctaccggtgagattttccttcgattgtctttcttttattccatcaattcgctctctttccatctgggtttgtgcttgtagcttaaaaaaattgattatagagtcagaattgtttatcacttaagataatgagttctgagttataatgattcctgaactgatatgtagaaacttcaacttttatttgtttctacgattcatccttgtttgctttagggttcttctattctttgtaggataagatttgtttctttggcttgtttatgtttgcttcttatcctctttattcatcctgagcttgttatactggggaaacttgttgtattatactaaggtttctgtttctcttctggataatgaataaggatatttgctcaattacacaacttggaattttgtttttatggattaatggtgtctacaaagtcatcttctttagttctgtatctatctagcaaacgagtaaacttggtgtcacttgatgtgattcagtgacttgctcgattctgacaagatgcaggaaattctgaatgtatttgtaccagcttagttatagctatgtataatgtatatcgaaatacatgtcttatgatatctgtagtctttcacagttactaatatatccttgttttattgctgcagattgtcttgaggtttacgacttttggactaatctcctctgtggagagca

SEQ ID NO: 1850 - DNA, 1612 bp, Unknown
  misc_feature (1)..( 1612): cDNA_ID_2145723_gDNA_ID_1620457_Annot_ID_157663 3000 nt of promoter + ATG
cttctgtgaagccaatctttccttctctatcttctccttcagtaaatcgagagtcgtcaaagcagacttctctgggtccaacttatctctcttcgccttctttaggttgtcatttgtttttttcttggctctagctttttgagccttgctaagacctggataccatttcctttctgtctcatcaggtaagtagaatctagcaggcgtgagctctatcaacttatcgaaaaattcagtatgctgatgagtcttgaaatccatttcagaaacatgtttaccctttttctttgtcatctacaacaataaccaaaaccaatcacaatcagaaaaaagcccttttggagaaatgacaaataataaactaaggactcatagtccaagtttcataaaaactatagaatcaagacttacaatggcagattaacaaaatattagatgataaaaagttaacagtggaaatcaaaacttacatcagtcccacgagttttagtcattgctctccacagaggagattagtccaaaagtcgtaaacctcaagacaatctgcagcaataaaacaaggatatattagtaactgtgaaagactacagatatcataagacatgtatttcgatatacattatacatagctataactaagctggtacaaatacattcagaatttcctgcatcttgtcagaatcgagcaagtcactgaatcacatcaagtgacaccaagtttactcgtttgctagatagatacagaactaaagaagatgactttgtagacaccattaatccataaaaacaaaattccaagttgtgtaattgagcaaatatccttattcattatccagaagagaaacagaaaccttagtataatacaacaagtttccccagtataacaagctcaggatgaataaagaggataagaagcaaacataaacaagccaaagaaacaaatcttatcctacaaagaatagaagaaccctaaagcaaacaaggatgaatcgtagaaacaaataaaagttgaagtttctacatatcagttcaggaatcattataactcagaactcattatcttaagtgataaacaattctgactctataatcaatttttttaagctacaagcacaaacccagatggaaagagagcgaattgatggaataaaagaaagacaatcgaaggaaaatctcaccggtagcgacgatggcgaatcaacggcgttgagagaagaaaaaagacagagagacgaagatgaagaggttccgtgaaagtggttagggtttgaatggttttgttatttctcaatttttataagggtatttatgtaaaaccgcgttatctcaacttctcctccagcgtcgcaaaaacggttcggtttaatgggatttaaaagaggttaaccggaaatcgaatcgtaccgagagtttttcacgaatatgttgtgacttgtgaggaggaaaacaaccacttacacgtttccacgtggcatattccccttcactccgcctcaggatattttcaattttcaaaatatacaaaacggtgtcgcttttctgtgcgttttgtgagtaataaagcttgaccggagtgtcttgtctctgctgcttcaatcgccggcgaacgatg

SEQ ID NO: 1851 - DNA, 3000 bp, Unknown
  misc_feature (1)..( 3000): cDNA_ID_2145707_gDNA_ID_1620457_Annot_ID_157660 3000 nt of promoter + ATG
tacttcaatctccagttctttaaccacagctttcagttcctcaacagtgttcttggcatttcctgattcagacacaagctctgtctgcttatagaccagctggttaagttgctcctccatttgctgaatttggatgtctcttgatctcatctctgcttttagattgtctacttcagcacatactccgtctttctctgccattaacatgtcgtacctcagcttgtgcttgtcgaaatctttgtttaatgcttcaatatgctcaccacgtgtggccaagtctgtcttcaatgcactgatttcagcttgcaactcaacctctttcctctgcatctccattttctctgcctcagaatgctttatctgatctaccagttttgttttctcaatagagaaattttgctgacaatcacacaacatttcccttagcttagagatttcagaaaatgacacatctaaacagtccctactcacctcatgctcattcactagatgctcaaatttgaaacttaagtctgaaagctcagtttccaaatcaaccacctgtctttgcacctcgagaactcgctttctctcagtctcaatagctatgtccctaatcgcaatttctccttgtgcgatttctcgctcaccacgtagatactcgccaaacagaacaaccgattcttttttctcggtctcctttagtttctcaatctcttgctcaaattcttgaagtttcaaactcgtagtcctaagctcttcttcacactggacatatttcttcatcaattcttcataactcatttgtttctccggggataagtcatggctatccattgaccctggtgatacgaggtgatggttaaaagatgagtaaaaggcctccgtgtccgaatctaaatcggaataagaagagttagaatcatgattgccagaaacatcagaacttccttggtcaaagttggaagctactgtatcagactttggagttacaggaggtgaagatccattgtgatctgaaacttgacaattgatatgtctaataagatttctacgtttgaacggaaacgcacacaaccaaaataagacatgaatgaattatacggttatacctgttgagatgtccacaaaggaattcgaattatgtggccactcatctgggacctcaactgttgtaaaatccattacacttaaacaacaaaaagcgaatcaacttaaaaatgatcaagcaaaaaaaaatcaaagaaacgtaaacatagaatgatgtaacagaaaaaccctaaaaatacagaagatatacgagatataaaaactggtaagatttttatttactttttttttttttatactcctaagatttagctataactaaacgtatttatattttttgaccaaaaaaaaaaaaaacgtatttatatttatctctacaataatttcgattaaaaatatctaacaaaaaaaaaagttgtgataataatcagtggaaaactatcatgaagagacaagctaatgttctttaattgaaatcttagaaaataaaaaaactagggttgcgtaaattttaagactttcttatgtcacagaactgaacttttttcactacatgtaaacagaaattataactcatttgcaacggtgaagaaacatagacaaagaccctccataaatctcagaaaaacagagcaagtaactcagatcataagatctacaaaacacatcaacggaacaaacaaatatcaaaccctgaaatctgattcacataggaccaaataaacatgagatttcactgaccttgaaaattgatatgatcgagggaacaaaagagcagatttacaggaaaagtgaaggagaaacaaaggaaggtttaagtagaggattgctagggtacgagagttacgaagcagaaggtggaaaggtttaaagggacgacaaagaggagggaagatttgtcggatagcgaagagaaagtggcgctctttgggattcaaatgtttgccattttcttcttttgtctatctgacagtctgttctttgctgcactagtggccacacatctccacatgcaccaccagttatcaaagtttgacctattaattattgggttcggttcgattcaattttctctcgtaaataacgtaaaccgaacatataccaattttgtctgcaaagtccaacaaacccattttctcgattctgttgggcttgatgatactagagttggacctttattttttcagcccgctggttttagcctattttgatatactagtaagtaaagcatcactatcaatatattttgatttattcattggactaatccgttgattaattaatattttgaagttttatttttgtcggcaaatactttttaagttttatctgtaagaaagttagtgacgatgaatatcctttaccccactacttgtgatttgttgtgttcttcacacttctattttagttatatcactatcaaatatcaattactattttgatttagtcactaattcgatgataatatatttctaaggatattttaaaggtttatcggccgttttttcactttttttacagccactgtaaaactgtaactagaaaaaaatcgactgtggaagttgtcggtggtggtggtggttgttgcttggttggattatgatttgtgacaaatatattaatattttaaaaatctggaagagtgacgagtagaggagacaaatagcttgctctttgcatcttcttagccatcccaagattctcctcttcgtcttccttataaactatctctctgtagagaagaaagcttggatccagattgagagagattcagagagtcacatcaccacactccatcttcagatctcatggtaaagcttttaactcttcttacactcatgatccattctcagatttgacttcctttactcggatctcctcagatctaatcgtagtttctgtttttgataattccgatcagatttgaactattccgacgtttcggtgttggaagcaactaagtgacaaatg

SEQ ID NO: 1852 - DNA, 3000 bp, Unknown
  misc_feature (1)..( 3000): cDNA_ID_2145829_gDNA_ID_1620458_Annot_ID_157667 3000 nt of promoter + ATG
aataatgttacttttcttgattggtgataaagtgtgtttttcgaagaaaaaaaacggtctactacatttatcagtctaaaaattatcggtttttttttttttttttttaaacgcaaaatattgttatttttcttgattggtgataaagtgcatttttcaattaaaaaaaattcagttccgccaactaaaagctatcaatcaagaccagaatatagtcacgtaaaaaatgctaagtagaaaagtagaatcgattatttggtgtgccaaagtcaaacaagacaatttaattaggtggttgatttgaaaataaacaattctttggtgtgccaaagtcaaacaagaaaatttcattaaggagatatttactttctcccacactttctcaacttcctcttcactattccatactttcatctttcaacaagatattttcttatgttattacctaaacaccctcaactaatgtttgtcataataaaggatctctctctctctctctctctctctctctctctctctctctctctctctctctctctctctctctctctctctctctctctctccatgatttttaccgccttcctctctccatctctccagcacttattggatcaattcctcttctcgatgatagcggtggctcaccagaaatcggtggtatcgattcagcaaacggatgggagaagcttcttaaactattcgatctggattctttcaagaattcatttcataagctttgtaagctacttcaatggagttgttctcataagatctggattctctcatctctaaccaaagtctcgttttaaacacaaccctaattgaaaaagagcgtgtggctttgcatattatggatttgcatacgaacgtgtcgcgcaaattatgttgataaccatactatccatgacattgtgaacaattgttcgtttcaacaagttcataccgtccatgtactagtctactggattcaaaaacatataatctttgatggacaccttacttgtcatgttcttctcttttatttgaatcaaatcagatgagaactcttgaattaagaaatctgcaattttgttttttcaagctttgcattcaccttctctcacctgtttggatgatcaatagttataaatattggtatagtatatttgtttaagtaccttttaatatctatttaataataaacaaatgttcaatcataaaaggataatagatagggaattggacttgtttaggcacttctacaaacttttattctttttgaggcacttctcacgtacaaggcacttttccttgtttttgaaaaataaatggacaattatatccccactcatctaaaccaaaaatttacttaaccggttagaaatgtttgttttgatttggtttccttctaataaatcgacagttgatatttacagatgagaaaaggaagttaccttcgccgagtgaaattatctcaatgtcgatggttgttaattctcacagtgataaatatatcacagtgataattgattgtaacactgatagctaaaggctatatcgaaaatcaaatctgacggagccgcgcaggacccgacggcggagatggatttaagatgcgatgaaacgattctcctccacataatggtctcgattcttcggggaaaattaggaaaattagcatcaagagaagaaatcgcagataaatcatgaaaatgagattacttacaggaaaattagatccggacacgcggtgaagattactgagagattagagctctcagaggagattctccgatctacgatagcagagagtgataaagagtgtgacagagagaaagagagatttgttggagaggcctatttgcgtcgattaggaatctccccctgaattagtatcggcctgcaatagccatttttttacagactttgaaaatcttaatatgatggaagttgtagttatctgaaaggtttagaataactagagtggagggtaccaacagcgatactgatatccacgtagtctctgtaaatgatatcatctccatcgataactgcatttactacaggttggtgctggaggtttgacttgagcaccattaaacaagaaactcgtatggaaaaaatttaagaaattgtttcggcaaaaaaactagtatccaacatatcaagtccaaaaaaagataaactgcaaaatattaatgtccacttctgtatgtccaactattttatcatatttgttcactgataattgtccagtatcgtcgaatgtttaaactgttatattgattatgtttgatgtaaagggatgtaaattatatctttcatgtttttgaccttagttccttcttggacttttttagacaaacccaaaaaatataaaaaagaaaaccatgatttatattggttagtgatgtatctgtttttgttgtagggaaaagaggattcctaataatttggtcttctatcatattgatgcttctcccaaaatgttcagctctacttgagtgtatacatgcaaaaaatgaattgaagattttatttgattatttaaaatttttcccacaatgttttatgtgttttggtttgatttagtttttgtttgctgatttttaactttccattatactgattgtgttctatatatccacaatattatgtccacaatataatgtccaataaatccaaaaaaaaaatgtaaaattgatgagtgtttcatacttgtgtattgttgagtgtccaatatgatcaatcaattagttaaccggttatcttgctaaggtttgtagcggtatctaaaaaaaacgtatccagtcagtgcataaagagacggttgagatcttcacacaaagaaaggagttacttgacgattacagacggttgtaatgcagtcattatttcgatgtcgacaaaggtacaatgaaaaaatatccttaaaagtcgtaacacgtttacgatactcaattacgctattaggtaattaacgtgaatgctctgttttgttttggttagggattgatg

SEQ ID NO: 1853 - DNA, 3000 bp, Unknown
  misc_feature (1)..( 3000): cDNA_ID_2145892_gDNA_ID_1620458_Annot_ID_157684 3000 nt of promoter + ATG
tgatttgaagagcttcgcgcacagtcgcgtcattggcccagtaggtagttagcaaataccgataaatctacaaaagtatataaattccgtttctccaaattgtttaacggctaatagaggacatttagatatatagattacttacatagcaatctggagtttcagtttcgcacaacggatctagtataagttgttggaatattctgtttgtgcactaaaaataaataaccacaaaaaaaaagtgtctgaatttagtgatcatgaatctttaataaccacaaaataaataaggcgcttgagtgtgtaaaccttattaaattcttcaacgaatttcaagcattgtgtgttacgtggatgaacatttgtatattctcctttacaggttttcttcaacgactgcgaaccaaatggtatttttttaaaaaaaccggtttccttgtaaggacaagaaacaaaagcaaaatctaatattgtttctaacctcgtagagttcatcagatatcagtgccattccatgggcaaatggaatgcggctgttactaccagttgtatagtctgttaacgggttaccgagcacatagccctgaagatttattggaggattgcagcattcataatttcctgcatcaccatgcatgattcttttgttagaattattagggatattgtcccacatcggaagttgagtaggatcttaagtggtatatataagatatgggcctctccacctattgtcaattggttttgagttggaagcccataatctaataataataattaattgagaaaaaggcttgtgggattgatattgtaaaactatgtagtgtatataccttttgagatttcttgaacggtagcgggaacaaccaaaccggaataagaatctccggcaacatagaaagggttggaggaaaacacttgatgctttcctagccactacaccacaacaacaacaagaaaaatagaaaaaggatcctaactaatttgtccatgcacaaagaaacgttgcatcaagatttgccatttactttttgaagaaactcatggatccgtttggcttctcctgaatcactaggtttattaaattgttgagttcttgaataggaaaagccagttccaacaggctgatccaagaatattatgcttgaagtctgaggaaaatgatgatcaagaatatattgattattgggttttgctgatcggcatatatatcaagaatacacacttttttttgtattacctttgtccaagaatatgtagtagagaccaaagaagggagagttccattgtaaacgtcaagcttcatagttagaggccctgcttatatacatatatagaattgactaatcaaagacgcagaagaaggagtttatcaatgttttcgatttcaccattttcaaaaagaaggccagagatggcagagcagccaggtcctccagttagccagagaataagagggtcttcttttgggttcctctcagacttgatgaagtagtagaatagttgcacttcctcttcctcaccaacaccaatataccttcattcacaagaaacagtaacatacttttaggttatctgcaaacacagaacacggatttaaccaagtaaaaacatggaaaacaaacccggtttcaagctcaaagggaagttgaccttcaaaaccaggaagagacttgacgattgaggcagagtcaacatgttgcttactcaagaatacaaggtgaagaagcacaagcagcgacttcagaacagaggaaacgtacttgtttgccatttcgtatttcagattctgattagcaatgtctttaaggctcaactctatataactattagaaacggactacaaaattactaaataatcgtcatcgcattttgcgatcatagaaaaataattatatactattaatcttttgctctataattgtatttgattcaaaacgcaaccagagtatcttcaatgatctggatcaatttttaaagcagcaaaaaacaaaaaagtccacacaaaaaaagaccaactaaccaatccaataatttgatttgttttggactcgtatggtttcaagagatttgcttaattattttatctaaattatatcagattgactcaaaacctaacaagaataactcaaataactctcaatcaaactgtaaaactagagtaacccaaatcttgtgtaaaaaaacatattaaattttaatctaattttaataaaaaaatccttaaagaaaaaattcaaaaaaaattccgacaatatttttccgccaaaaacaatttcgtcaaaatttttccaccaaaaaaaagaaattcaagaaaggttttacaaaatttaggaatgattttaagcaattcaggaaggtttcacgaaatttagaatttttttttgtctgtaatccttcctgaatttcatgaaacccttccctgaaatttgtagatttttttttatgaattttggcgaatcattcaaataatcattttctgaaatttaggaaggatttcactaaattcaggaagggtttcacgtaattttttttccgaaattcttcctgaattctgtcaaatcattctcgaattttgtaaaaatttgatgtatattttttggtgaaaaaatatttatgaatatttttggtgggttttgaccaaaaaaaaaaaagaatatttttgatgggaaatgttttggtggaaacttttttaaaaaagttttgacgaaaaatattttttttgtttatttaattaaattaattatttatatttagtatttaataaaaacttgtagtactatttgtggaattttttaaaagatatactactttttgaaaaattatttttttcattactatcttcgtcaatctcttttctttaatccattaaaaacccaatttttaaatatattccacaatttaacttttatacttaaaactgatgacgtggctgctagctttgtatggataacttggcaaaggtcagaaatctgaagaaaagctttgagcagaaacatg

SEQ ID NO: 1854 - DNA, 3000 bp, Unknown
  misc_feature (1)..( 3000): cDNA_ID_2145889_gDNA_ID_1620458_Annot_ID_157683 3000 nt of promoter + ATG
gtcaatctcttttctttaatccattaaaaacccaatttttaaatatattccacaatttaacttttatacttaaaactgatgacgtggctgctagctttgtatggataacttggcaaaggtcagaaatctgaagaaaagctttgagcagaaacatgtccatggagctcaccgttctcggacccctcgccggtcggagtttcgcaatcgccggaaaacctaaacttctgcttcttcgaccaacaaacctccctcttctccgtctctcactcccgctttctcttcccaatttctcttcgtcctctcgttttaattcgcccagtaagttcttctctccctctcgctccaacttcaattttagatttcaaatttgtgtaaaccaatttcttccgaatttcgtttcagtagtattcgctgcacaggagagtaacttgagtgtatccaacgaaaacgaaaccagtgagtggctgatgcaaggtaccttcttatcaccattgatctatcaacatatttcccagtgaatctgaattcttagggttttgatttcttttgtttcattggtgattagatttttatacattgagaaaagatgtagaaatagcatcagctcgtgttgaagagattagagcttctgctaatttacaacaactagaacaagagattacaaatctggaatcaaaagctactgatacatcgttttgggatgatcgtactaaagctcaagaaactttatcgtctttaaatgatcttaaagatcgtatgcggttactctctgagttcaaaacgatggtattgttacatatctaaggtttatatgtttatgatgttgaggctttgagataatgtgttgttgcttgaggtataggttgaagatgccgaaacgattgttaaactaacagaagagatggactctactgatgttagtttacttgaagaagccatgggaatcattaaagagttgaataaatctttagataaatttgagcttactcagcttttatcaggaccttatgacaaagaaggtgctgttgtttacattacagctggagctggaggaacagatgcacaggttattattatactctcttagaggtttgtgtgtgtttgtgatgtgaattgaggttcttttaaaacaatgataactttcagtgcaggattgggctgatatgttgcttaggatgtatatgagatggggagagaagcagcggtacaagacgaaagttgttgaaatgtctaatggagaagaggcagggattaagtcagcgactcttgaaattgaagggcgttatgcatatggttacatttcaggggagaaaggaactcataggattgtccgacaatcgcctttcaattcgaaaggtcttcgccaggtaaaaataaggtctatgagctcaaaaagcatatgtggttgtgtgctatggatttatattggtattgcatgcagacaagcttttctggtgtggaagtgatgccgcttttgcctgaggaagcggtgggaatcgaaataccagaagaggaccttgacattagtttcacgagggcaggtgggaaaggaggacagaatgttaacaaggttgaaactgctgtacggattactcatatccctactggtgttgctgttcgttgcacaggtttgtatttcctccccactaatgttacaacctgaatgtcccgtaagatcgtgttatcaatgcatcagaactgactatggtagttgattaagatcgcgttggatgttgcagaggagagaagtcaactggcgaacaagacgagagctctgatcagactaaaagcgaaactgatggtgattgcggaggagcaacgtgctactgaaatcaaggaaataagaggagatgcagtgaaagctgaatggggacagcagatcaggaactacgtgtttcatccgtacaaactcgttaaggatgtccgaacaggtcatgaaacttctgatatcacatctgtaatggatggtgacttggaccctttcatcaaagcttaccttaagcataagtacaccttagccatggcttctgctgtaaccaattagaatgctgaggataggcttgttcctttatatttctctacttagatagaaatcatctcctactagactgttcaattttatagcataatcttgaattccaacagtcaatgtgggattgtgagtcaagtctgtttgtatctaaataaaaccgcattttgttttaaacaaaacgaaacataaaactaaccataagccctaccaaaccatattaaaaaccattgagggtaataaaacttcgatatcttccgtaacaatgggtacttgattttcatcgaagttgtgcttcatggagacttatactttagtgaacaaataattcaatagctccaaatgaccaaatctattcttcaaaaccatcgagtccgtactattagagctcacactctttatcttttgcttttgttgagctgatcatgtcttggttttgtcttcatttgctggtgaccgttggagctgtgggctaaatggatttgcttctttgttgggccttatacttcagtttggcccattctcattttgtcacatgggatgacatcgttttgagaagctttggatcttcttcttcttgtctgatttggatcttctcttctctcttctctattctcctttgtaatgttccaagagggagctgtcactctaatactattatgaaacgatttatgcgtaaccctaactttttaaaaaaaattatatttatgtagaattgtagatagtgttgcatacttgcatgtagtcaaaaataaaataaaaaagagaaaaaaacaaagataccctaaactccaaaatcagtgagtaagacatatcttaaattaaatgacaaaatttggcgttttctctcataccaaaataaatgaaatagtttaccaacgacaaccacaccagtcccattcacaaaccattcataaccaaaatcgtcggtgtcacattttgtcacgtctcttcttaaaaaaaaaaaaatg

SEQ ID NO: 1855 - DNA, 3000 bp, Unknown
  misc_feature (1)..( 3000): cDNA_ID_3064774_gDNA_ID_1620458_Annot_ID_157675 3000 nt of promoter + ATG
gtattgtgctttcccacattaaaacgtaactcaacttctttgactttcccataacacagtgttcacagaaacccagctctttgatatccttcttttcaatcaaacctttctcagtcagaatcttcatgttattcacactcatgtgaccaagtctgcaatgccacaaacttgtcctttttgttgacccttcagcattacagctttcattcagaactgtgtgaccatcaaggacatacagtccattaaccaaatttccacgcaaagctgttttgttttctttgtaaaacctgatcttaccgtctccaccttcatgcttaaagcccaacttatccaaagtacctgtagagatcaagttccttctcagatttagaacgaatctgacattctttaacattcttatggttccaccatgagtgttgatcttaactatgccagaacctcttgattcaacagtgtgatcatcacccaacaagattagtgttgactcattttcattgaaatctgtgaaccagtccattcttgaagttatatggtaggtacatccagagtcaataacccacttctctttagcttcttggtcatgcatgctaagtgcctctgagtacaccaacttctcagtaatcacacctgcctcaccttgttcttcattttcgaacttcttcttcctagcaaaacaatccttctttacgtgtccctctttcttgcagaaccagcaggttacacgagatttggaattcgacctgcttttgccttttccttgatttttaccttggttattaccttgattgttgccttgactaccattttgatttcgggtttgtggtctgcctctttctgcagtgtatagagttgtattcaccaccttagtgttttctttaagctcagccatttctctttcaagagactttgaagaagatactacatctttcacagacaaggtcttatttccatacttcaaggtgtgcttcaactgatcataggtaacaggcaaagaattcaagattaggatcgcttgaacctcttctgcaaccttgatatcaagacttcctaattctgcaactatcctcagaaaatcatcaacgttttgatcaatcgtctttgaagtcatcattctaaacgagtagaatttcaattgtgcatagatccggttaggtaacaacgtctccatatacaattcattcaacaattcccacaatgtagctgcagtcttacagtgatttacttttctcaagactgtgtcacttatgtgattgatgataatgttcatcgcttgttctgatttttcaatcttgatcggatctggaacttctttagtcaacacagcacttgaatccgatgattcatctccagaagctacttgcttctcctcactctttgttaatgtctcagtctttgtcaaagcaaagtcagttagagttcctttcaaaccaagaactccgagctgtgccattatcctgatcttccataacgagaaattgttatcgccgtcgaaggctttgatctccactctcgtcgtcgttgccatcgaccgatgcgatgtgaacgaaacacccaaagcctgggctctgataccaatctgttacgttttatgctcgattcacaacgcaataacttcacaaactttcgaaaactcagtaatcgaaactttgaatcagctcaagaacagaaacgaattgaagaacgaaagaaacaacacaagagatttgattacccagttcaacaagatcggtatgatcaagtctacgtctggggccgaatcagttcggcaatccactagaacagaatgagaattacagagtacaagcagagctcaacaatggagtctcaagcttttctttttgtttgttacagatgaaaacacgaataatgaagaagaagaaataaaggccttttatactaagtccgaaatagaaacagaagaccctctctcgtgaaaagaaggtttcctttagcctcttcaatccggtttaaaacactccatctaaccggtcctcaattcttcttaaccacagcacctaaaccggtcacttaaagttgaatcagaattaagatccacaacatcatcaatggacaactatgtttttgatttgttgcgagtgcgttttactgtttagtaaagttatcacccttttttatggttacgatatatttatatgctttcatggagagaattgttctacgtagagattatttgggagaatgaagtagatggagcagatttatacaataactttgtgtagaatggatatggctcagtaaaaaggtttttgtatggcacatatgaatggactcgttattatgtacaccgaattttttttttggtttttgtttaaatttgcagagatctctaccttcaagacaatatattgatattacgagaatagaccatatgcatcagatctcgtcgtcttgacaacacacaatttcgcttatgtgaatcatgttttcacaaaataaagaaataaacaaaattgtgttcgttaaatagaggttacgaacctacacaaaatcgaaatctagagaggcttctccgtaaagtaaatacagaaggtacactatcttcacaaactccatcattgctctcatcacacactcagcacttacaaatcttcaactcgccatttgatttttggatttgttttagagagagtgatagaaaaaacatggttccttgtagagaagaagagagatgttattatctgatctagataacaagagaatgattttttttttatttcatcttagccatagattttaaaatatatttttttaatccaacggtctatactaaaaagaacataactagactgagtttttcgtaaatatcttccttgttgaacgacaataaaaaacgaaggttagttattttgcgtcaaaatctcaggggtaattttatccattttctcaccaaaagtaagtaaaaatacttcatctctgaaaaatgcttcataaggaataagattctctgaaaatgcctaactagtatacgcgttaagaatg

SEQ ID NO: 1856 - DNA, 3000 bp, Unknown
  misc_feature (1)..( 3000): cDNA_ID_3064759_gDNA_ID_1620458_Annot_ID_157679 3000 nt of promoter + ATG
tatacacacacaaaatacatctagtcaataatttgcacaaagacttcaagtaaatctctataataaaacgaaaaatattatatgtacaagattgatgtctatgacacaggcacagctaataggtgacgtttgcatgttatattttattaatctaatttttttttatgtatttgttttttttttttgtcttcactggagatacattattggaactaaaacagaaactgtgcaaagccggcaaagattgagactttcttccagagacaaatcaggcaaaggtttaaatcctttggagaacaaagtcaaagagtttgcataggtttaaatacattattacttagtctgccgattactaaaatagataaaattcagaattttccttcgattctctggtatatttaaattagaaatctcaaaatgataagatttttgacaatttggatccacgtggaatccttcggaaggtgaacctcaaacatggagcctgcatggagcttggcacaagtagatgttatctaggagcctcatgatactactgcactatctctcgagaggagtgacttcaaaagttatcgttgatttattgatggttcatgaaaagaacatccgaagcacaagttgatcttctgaaattttgtttaaacatttgctgaaattttccaaagttttttgatcttcttctctatctccgaagcacaagttgtaaaaccatatatatttttcttttaaatataatttgatattacattaaaaaaaaagaaaaaaaaaagaacatcatccttattcaggtttaggatggtattgtgcgaacatcaacaatgaggcacaacccatggtagcttataatctttgctggaggctctctcgtttacatatcaaattaaaagcattagtgtgaacgataagatatcgatgcttaattgctgaacttgagactgaagttgctttcatcacggacagctctgatccggtgaacattgcatctataccaatagagtggccggcatttatgacgtacgcaataagaagagaagtgtaagaaaacattctcgtatttttcttttgcttctcgtaatgctaatataaaaacggatacgttagcaaataatgtccgtgtctaccagtattatatttgttcccccataatgacttatgaagcctctcaattaatataaagttgttgacgggagaataagatttacttaaaccaaaagtccaataaacgagaaaaatgactgtccgagactccgagcaaatgtgatacaaaaaccaaattttcaaagcacagaaaaaaataaaagggagaaatccctaacccggaaaacataacaaaactactaatattattagtttgcttctttgttctttatttgtccgggtgtttttcatggtcatggtcaaaaattggtttagcatctatgggaaacagatgccatcaaatccgaacgtcaggtcttttattcgcttattttttggagacttgaaaattcgagattttaagcaatttgaaaacggcaagaaagaatcttagtagaagaggttgaaatcgccaaatgtggtgtgaactgatgatggagatattaaatcagactaggtccggtttgaaagagtcgagacacatcatatctcggccagatatgtatggttttttagtggaggaagcttaaaaaataccctaattactatggtaccaacagtaaaaacgattatgggtagcagtggatctatcggttgaaggcagaaaaaatcattggtgagcctcgaacaaattcatattcgaaaacgaaacatagaagaaaatgagatcaaaacgcatgaagcacaccattaatcgaagagccctctcacggtgccgataaagattgctagacagtctcatgttaatagacagcagagaggagatattcaaatcgttttatttttttctctttttggcggtaagggtttttcctaatattttttatttttttcttatttttggtaaggatttgtttacgtatcttgaataatagctatttaaagaattagacctgttattgtcgcttttcttatataaaatatctataaaagtttaaatattatataagaaaagtctggtgattcttttgaaagatatctactataaaatttaaaatattatgtaataagaacaatcattagtgtatatatatgggtacatgtgtgttacatttctttcataattccagaagacaacctcatacttacagaagctttctagtccaagctcaagccagcagggtaagagatctggagtttgattgtttttaaacttgtatttgtagtcaacagaagctctcttatcatcattttttattattatattaaactctagtgttattaagacatgaactatttataattttatttattaaaaataattgcagaatataaaaattttgaataccaaatattctctacgagtttataattttttacaaccgaataaaataaaaacagaatctaggaaaataaaattttcccaagtgtaataacagtatttaccactagaatagaaaaatttactaaaggttaaaaataattatttttctaagctttatcattatctataaacaagtttccaaaaatattttttactgttcaatcaaccaaacactagttataatagtttcttaaaaacaattcaacacaagttaatgtaataaaatcattcttttaaaaatcattgagagttctttgtaaattcttaaatcaatatgcgttaagttatcatcttaaaagtaaaaataaaactaattgtacatctaaagatatactgaatttaagaatatttttatggaaaacagtttgttcatttaactattatggatatggatcactttcacaatgaagtatttttaacaatcaaatttctctccccgtgtgtggtagggaatataacctggtatacataagtgcaaggaaatagacattattaacacaaaatatgtttgttctttctaggagagttattacaaaatg

SEQ ID NO: 1857 - DNA, 3000 bp, Unknown
  misc_feature (1)..( 3000): cDNA_ID_3064770_gDNA_ID_1620458_Annot_ID_157676 3000 nt of promoter + ATG
gggacttatcagtggtagcagagtggtcaaggagtttcggaggagagtgtgaatcgtttggtggacttgaaaattggataaaacatagtttatctctctgattacttgttattgtgtgtcgttgtcttacacaaaacacatctctttggctttgaagagagctcatctcatcgctaggagtgtaacaaaggaggatcaccgccaattatattagcaaccggatttcttttgttggttgaaacaactgtttgaggataataatagtattcccgaggcgtagtactcatatgggttgaactagattgattgtcttttatcccccgacccccaaatttatagtatataaaacttaacacaatttaaccaatattaagacaaactgttaaataaaaatattcaaaaatataaaacaattaagaaattttgtattaaaacgtgagaacatcacttactatgaaacaaaaaaaaaattctaaaacatcaaatatgttgaagcagaaaaagtatattaataaacgtctatattcatatcaaattttacaaaattcattcacatatacatccgtgaattaacatatacattcttatgttaaaacactgctcataaccaaaacaaattactggaagaattgtcaacaatctgtgatctcacttgtgtcaaattacaaccaagcatttgcttcaaagctctcatggaaccattgttgatttaccttatctatctttttgtggtattggggaatgccctgttttgttatgttttaaactctgggatttctgaatctctctcttattgtacttatttcttttgtccaaaaaaaacaaaaaaaacaaaccaaaacaaattacttagcgtgtaaaagtctacataaacttctatttcaccagaatcgtaaatttttgctgtgctttacagtttacctcacgcagttaaaaattcgatcgtggcgaaatttcctaatgtccttgacctgcactccctgatgtactgcctcttacttcaatcttgatccctctaatcacctttttatcccaaacttgtcctatttcagttaccaacaacaaaaaccattgatatagctaaattttttaagtttttgaaagaaataaaaaaagagactaaagacggtttcgagtatcataaatggaaacgaattcttatcgttgagaacaatagaagatgatttacaatttacttatgggatcaataaccttttgcatggtagttcaaacaagatgttgttcatacattttatttaatcgagttgagagactaataaattatttctcataattagatcttacttgtttttggagattcatatgggagtcgagccaggactgtatttgatgatgcagataacaagagaagaagcaaagttatcaaccaaaccatgtacattttgttttcttggtttactattacgagttttgaaacatgtaacatggtgtatttatatgtaagcgaaaatgcattcaggtcaagtggaatataggtcgttaattttgaagctagaaaagtattcattcttaacgcgtatactagttaggcattttcagagaatcttattccttatgaagcatttttcagagatgaagtatttttacttacttttggtgagaaaatggataaaattacccctgagattttgacgcaaaataactaaccttcgttttttattgtcgttcaacaaggaagatatttacgaaaaactcagtctagttatgttctttttagtatagaccgttggattaaaaaaatatattttaaaatctatggctaagatgaaataaaaaaaaaatcattctcttgttatctagatcagataataacatctctcttcttctctacaaggaaccatgttttttctatcactctctctaaaacaaatccaaaaatcaaatggcgagttgaagatttgtaagtgctgagtgtgtgatgagagcaatgatggagtttgtgaagatagtgtaccttctgtatttactttacggagaagcctctctagatttcgattttgtgtaggttcgtaacctctatttaacgaacacaattttgtttatttctttattttgtgaaaacatgattcacataagcgaaattgtgtgttgtcaagacgacgagatctgatgcatatggtctattctcgtaatatcaatatattgtcttgaaggtagagatctctgcaaatttaaacaaaaaccaaaaaaaaaattcggtgtacataataacgagtccattcatatgtgccatacaaaaacctttttactgagccatatccattctacacaaagttattgtataaatctgctccatctacttcattctcccaaataatctctacgtagaacaattctctccatgaaagcatataaatatatcgtaaccataaaaaagggtgataactttactaaacagtaaaacgcactcgcaacaaatcaaaaacatagttgtccattgatgatgttgtggatcttaattctgattcaactttaagtgaccggtttaggtgctgtggttaagaagaattgaggaccggttagatggagtgttttaaaccggattgaagaggctaaaggaaaccttcttttcacgagagagggtcttctgtttctatttcggacttagtataaaaggcctttatttcttcttcttcattattcgtgttttcatctgtaacaaacaaaaagaaaagcttgagactccattgttgagctctgcttgtactctgtaattctcattctgttctagtggattgccgaactgattcggccccagacgtagacttgatcataccgatcttgttgaactgggtaatcaaatctcttgtgttgtttctttcgttcttcaattcgtttctgttcttgagctgattcaaagtttcgattactgagttttcgaaagtttgtgaagttattgcgttgtgaatcgagcataaaacgtaacagattggtatcagagcccaggctttgggtgtttcgttcacatcgcatcggtcg

SEQ ID NO: 1858 - DNA, 3000 bp, Unknown
  misc_feature (1)..( 3000): cDNA_ID_2991486_gDNA_ID_1620459_Annot_ID_157691 3000 nt of promoter + ATG
attattttgaattatttaccgtttaaagaatcaatgtttgaactcgaaaaaattgtatgatttgtcaagtttttgtctgatattaactacgtacaacggtacaagtatcctttctttaccttttcttatttatttaccagtctcatctctgtaaatgaaaggttccgagattcttacatcactagaagaagcaatctcattcccagctgatgttgtttgttgctctctgtaagatgcccaagtaaccatataaagcccgcaaatgatgaggattccacccaaaacgctgcggagagaacaaaaaccaaggtgtttatatgatccaatacaagaagacagaaaggtttgtatgtgtctggatgaatcaaagatacaaagaagagtgcataaaatttaaaaaccttccaagatagatcgggctgccgaggaaaattgtcgataaaaaggccgatgttgcaggctgaagaggattgtatagggaaaccaaagcagctccaagaattttattggaccaagtcaagagtccatagtttagagctgaggcaaacactccctgaggaataaaaaccgaaaagaaaacaattaaacacaaactagtaagatgaatccgtatgtacagaatcgagttccaatctttttgagttcaagttcaaatgatttgagctcaagctccaaaacacaaacacacccaaataaacatattacatctcggttgtgaaaacttactgcgaatataacagcaagaacctcagattgtgttaagctccaatctttaggctctctaacaaacaagatagctgttgtgatcattattgatgcaccgaagaagtatgaatacgcagcaaccgaaaggtaggcaggatacttcttcaaaaccggtgcttggacagcgagaaaagcagccatacacatacagtttccaatcaaacataaaactccaatgtgccattgatcaaacccaagaccaagaaaactagagactaaccacccattaagctctggttgacttctatcaataattacacttttcactgaatctgctgcatctttacctccaaacaaggctggaccacgaaacaaagccatcgctatagcacccgaaacacaaacaagagtacctccaactttcgtttggccctcgactttcaacaagttcactttttctgtactgtatacaaagaagaagaccatcaaaagattgaaactttatattacaaattttcacattttacagtaatgttgaggaaactcatactcaccccatcaagacagccaagagaaatgtaaagacagggattgatggttgtatagcagcagcataagttggattcgtgtaagataaacccataagaaatagtaactggttcccaaatatcctatcaagattgagattgaatgttgttattagaatctttcattagcatgattcaaaagataaagagatacaagctgattactttaccctgctaaaccaagaaagaagagtgaaaagaagatgcttctattcataggaggtctgatcgttctacaagaaattaaaagagcaaatctttatcaaaagacaaatccaagtcacacaaaattgcaatccatcattaaacaatagaaccagaattaacaaagaaaaacaaccctaattccaattccagagagatcaaactatttgtctgattttgccgcatataaactcatcaaaacaatcagaaacagagacttcagagactttagcaattcaagcaaaaggataaagaaacagagagattttgagaagaagataaaaagggacctttcacggaaaaaagcgagaggtgcgagaatggagagagcaagaagatcgcgaaagacacaaaaaacgagctgatttacaccaacgttaagagctactttcgtaaccacatggtatcctccatttatgacctgaaccaatgtcattgcagagtgagccattcgtgtttctctctccgtcgcatcgccgccgtttaggatcgccggagctgccatttttcttctctacctccgaatcgaggaagaagagaaggaacacctgttgactaaagaaattgagatcctttgatttgctctgtaaattgtaattctaacttctctgttttttcgttccaaaaaaaaaaaaaacttctctggtcattgtagtcgttggtcttcttcaatttgttaactatgattttttgttaagttgaggcaaaaaaaaatttgccagattattttcttaaatcttatacacattgaagcctaacagattaacacatttgttaaatatgctcatatatcctacttaaaaaatatgaaaattttccacaaaaaatggtgtaatataaaaattcggtttactcgggttaaacggttcggtttgttcggttttccgggtttttcggttttcaaaaattctgccgaattgaaccgaacaaaaattcggttcggttcggttcggtactcggttttttcggttcggttactaggatttataattcgccgaaattaaaccgaattttttttaatcggttaacctaatcagtttagatcacaatattaggcatagtgggctgtttttaaagcccatatcggcttttgacatttaaaaacccaaaactttttttttgagggacaagtaaagtcaaaaagcccatgacggtttttaacttttcaaaacccaaattctttttttccagggacaagaaaagcccatcacacccatctagggttttgttttgttttattttttggaaatgacggccgtcaaagaaaaacaagggtgagatgaagaagaagaacattgaaaacagagaaaatagatttgtattgtgcggtggtgagaaaagatgtagagaaccatgaaatcattgccagagaagatcgatgtcgcggtggcttaatagaatatttctgcgaacctaaaaggtggagaagaagaacgaagacaaggagaagaaggaggaataaggaagaattagaaggttaaaagataaaaatgggttagagatg

SEQ ID NO: 1859 - DNA, 3000 bp, Unknown
  misc_feature (1)..( 3000): cDNA_ID_2145953_gDNA_ID_1620459_Annot_ID_157707 3000 nt of promoter + ATG
tcaggaaattgaaggtggaggagtatgatgaatgctacaagaatacacagtctcatgaagtgcccaacacgagtactaagaaaacaccatttcttaaaaggattcttaacaggattctcagggtgagggagttgaagacagagaagtctcatgaagttctcgacaagagtaccagcaaaataccaggtcaggaagtgcccgacaagagtgccaagacaataccatgtcataaagtgctcgacacgagtttcatgtatcgccggtggtctgagtatgtacatgcacacaacctgatcgaatactgcctaggtttaaaaccgaagcgaatccaccataccaagggtttcatacacatcgcctttgacaaggttatcaacatactttacattggccccgcattcacaaaacttggaagtgtcattgaatcctgttttagagtcacaaaacagagaattcatcagactttcaagtggattgacggtaaagtaagtcgtttatgcaagaaatacccgaagttgaatgaagagtacattaggtttagcttcttctgcatattttacattcctagtctacctggacgctggataaaaagttttatggagttctttggcatccgagctcagctagatgaggtgatctacacatctagtgatcgtctcaccctggatatgtgggaacacatattcggagaggttaaagccaaatcccgtttcgctgacgactctgaaagcgccatgagggtatcttcagcaagaggtgactggacactgcgcgacatacaaggtgacccagaaacagaaaaaaaacgtgagaaacttctacgctatgtgatggaaatggattacgatcagagccttcttgtatggcatatagccactgagctcttataccagacaaaaaaaggcactaaagcgaatcatagcgcccgtgagttcagtaaaatcctgtcagactacatgatgtatctcctaatgatgcaacccactctgatgtcagctgttgtgggtattggaaagataagattcagagacacgtgcgaggaggctcagaggttcttcgataggaggcatatcatggggatatccgcaaagaaggcccctgatgcaaaggaagccagcgtggcaattttatcagtggcagttccagcaaaagctgagcccattgacgtgaaaggagatagaagcaaatccgtcctgtttgatggggccatgctggcgaaagagcttaagggtttaagaaagaataaggaggacgactcagagatgtggaaaataatgagccaagtgtgggttgagttgctttcgtatgcagcgacaaagtgtggcgctatagaacacgcagctcagctaagcaaaggaggagaactcataagctttgtttggctattgatggctcattttggactaggagaccaattccaaatcaaccaaggagatgccagagccaaactgattataggcaagtgatcatcatccaataagcaacgaaagtagcagcaattgattagtttccctcatttgcttccattgtgttttttttgttttgtttcaaagagtagtcttcaactgtttgccagcaaaacaatctgttcttgaatcatctgcattgttgtaactcatgtccttcttctgtccctgataaattcatttatgtgagcttgattgatttctctgatactctctatacaaccaaaaaagacaactctctctgtaaacaaggacttcaaattccaattagaagcactagaacaagaatataacctctttgaatccaccattatgaagcagcaatagtgaacatcatccgaccagagaaaaacttcagaatctcagaagtgatgcaaccaagaatctcgatttagtcctgaactctgaaataaaattgttggcaacggtaaaaactttttccatctgtacaaaaaagtaaatacagtaaataattcttaagtatgtttaaaataaaataactccaattttagactaataattactgagatgtgaactcttcatgtaacaaaattattagttggacctaattcaagttattggttgaagagataatatttcaaaactcaattttatttacagatattcattaaatgaacctcaagttcaaattatttatttagtagacaagtatatatacatatagaggtataaagaagtaaattctgccagctatagaagtatttttgaatcttcattatttctttaggtcaatgcctcaatagtcactaaataatgaatgactaacttcagaaaaagactaacccgggacagtctttaaaataatataagttataactatggttatacagttatacttaataatattattatataaccatcccaaacataatagtctaaccattcaaatctgagtttagtggatcattttatatttactaaaacgacgcgagctcaactaatgacacttgaactttaatactactaactattattcaacatacatatatttattactatcaaatatgaatagaaaaaagaccaatagctaagtcgtctcttcacgtcaaaaaaaaagaaaaagaaaaagctaggtcgaaaatgactcattgattgactaaaacaaaagaaataaaagaatatttttatggtgtccataccagcagtaaatttttaataaacaaattgcaagaataataataattgacgaaaatgcaaaatacaaaaactattattttgcaaaaaataaaaaattatacctgagttgcagagtcgtctttcttctcgctccagtgagagcttctggtaaaaaaagaaaagaaaagaaaaagaacaacatcaatggcgtcccaaaaacattccacaaaccccaaacttttcaagtaaatctgaggaaaaaaaaacatctcaataaccagaagagagagagagagaaaaaaaaagaaagaaactcaaatttctcaagtaaatccaagagagagaaagagagaaggaaaaagatctatcttttttcctctgagagagagcaaaaatg

SEQ ID NO: 1860 - DNA, 3000 bp, Unknown
  misc_feature (1)..( 3000): cDNA_ID_1022586_gDNA_ID_1620459_Annot_ID_157720 3000 nt of promoter + ATG
gcgaccaatccagttatgaaactggcgagttcctctggtggcattttcgatggcagtatctatggacaaaatgtgaacggtctggtgaaagaaactgtgtatcttacccttggtataatggattctcttgggacgtattcccaaacagaagccaatcaagttgtaagcatgaacatactcagaccatctgcgaaacataaagtttctgttgagcacttgatgtccatcctgggaacatttggatcttttccacctcagcgtcttgaaatcgaggatccagttgagaactctgtctgtcaaggtgtctttctcttccaggtcctcctttagtttcctcagtctagcgatggtccagtcagatacacagaacatgagaagagcaatggaatcaagagctattccacatatgagcaatgcgtaagtaaggacgacatcgaatccatcatattgatctttcttattcatcttgaagaggcagagagatgcaacaaggcaccccaaagctataaaccggaacacagctccagtccagttatgcagaatctctgctttggtgaacagacaatcatagatgagtccgagctcgacttcgatgatacgtaaagcttcttctgcagtcagcttgtcaaagaatttcctgctctcgtcgcgctcttgattggtgaagattagatcaacaataagacctttgaagatgttaaagtatttgtaagcatactgaataacttgtagtgcggtcaattcattgtcgggcctaactggagtattgccttcccgtcctttctctggatccttcaccactattacatcagttggcatattcatcttcttcctagcttcatattcctccatgagtttcgcgtaattagcaccagggtcaggatcgtcgagcatagagtccttgaacttgtcaagactcgctgagaacaacgcagctgttctctcgacatacttgatcactcctcccacaaacatgattaatgttggagtcagaagcctatttggtatagacaacaagatcacatacacagtggctaccgcttgacagacaagactaaacaagtgtctgtcccaaagctcattatcctccaaggcaagtgctgtaatggtatctggacctccaaggtgcaagagaagaaacggtgaccaaaatgctagcagctcacggttcttggatggtttgtttgattcagcttcttcttcttgactgtctgagatttgcccaaccgcgtaatcagctgcccaatcagcaagaagataagctgaccatatgaggacaaggaagagcttctttgcggtgcgtcttcggctaggtgcaaagaaaataaggattgtttggaggaaaagactgagtattatgactccacgtatgttccatttgtcccaaagtttcctcagatgtggtggaatcatgtcagtcatcttgtcttcttcttcgttggaccgcaaaactgcacttggtttactgtggatgttcacagtagtgtcaaaggttagtgaacgtttctttcacataaagtttaagtttttgtctatgggtttctttgcttccattgttttgagacttgaaatagaaacacaaaccatcaagtgttattgttacactataagtaactttataccttgcttataaacaaataatatcttaatctcttttgctttttgtttttattcctagtctttgttcttttcttatgaccataagtaaactactaaaaaaagacaaaagcaatcgaatgtagatttatcacatggtattaaacgtatgtacatttaaatgtattacctcatagcttctctaaagttaaaagttaaaatattctacttgaagcttgtcttcactttcactgttttttgtttctaacactaatagctttctggataagtgacaaggtctctatattcgttgtctgagtattgtgtgaagttaaaacttggaaagttgataggtaaaaaacacattgggaaaaaagttgcatactcatttcctacattattacacactcttcaacataaactctctacaccacgtcaatccaagatggaaacacttgctaattgggacatatcttgctggtactttcgtatgtctttcttacctttggacttaaagggcttgattggttcttctgatattaaccgcaaacgcttgctagtatttaaacctaatcatagagacaatttcaaactgctccaaaatactctaaaccatttgtaatagctgaattttaaaaggtccttgcggtggcaagttaaaaaagaattcacataaacaacaaaaaaataaaattatcaaaccctttatatattaacgttaattctcaaaatcctaatttgatttcatgttgtcaatccaaactggagaaagtcaaatattgtaataatattatcaatttggaagatttaagaattcaaactcacttttagtagtttgtcaattatttgatgcaatttttggtgatgagctaaaatgaagtaataaacatttcactattaaatttctttgtctttgaataattatgtaacattttatttacaaattttattattagttatgttttgatgttttttctattttatcacaatagtagaaatttttgatatatctaataaccaccggctttgaaatttgtcctaagttctataaaaacatttcagacagaaagcaactgttttttttttctttgtatttttgcttgcccatgaagacaaattccagtttttcactattgtgtgtgtagtcaagtcacttgaattttccagctaataattgattatttaagaaacttaaggtaaaataccaaacattctgaaagttaaggggttttttaaaaatatgacagctaataagaagagagagttagagagaaagagaatcaacgagtctttcgtcttcatcatataaatactctctcactttttcccgtctttcagagactctctttctcatttccacctgaggaaaaaagctttttcgaatctcgcttgctttttgtcgcc

SEQ ID NO: 1861 - DNA, 3000 bp, Unknown
  misc_feature (1)..( 3000): cDNA_ID_3064810_gDNA_ID_1620459_Annot_ID_157715 3000 nt of promoter + ATG
ataaataactaaaagacggtgatctagtggcaatacaaggggttaattctatatgtctggatttaacttttcttggatataattttaaaaaaatagaaatagagtaaataataactctggatactaaaagagattatagaccaaaaattcagaattttctcagtttaaccaaacataaataaaaaataatgagataaggaaattaatcatgtcttacttacaacgttatattaattgtattgtagactgtactataatttttataattataataaaattatgatatttgatcaatttgtggagatatttataaaaaaaaatatattgtttgatttgcagaaattgtttgattaataagaaaaattataaaaaaaatattggttatatattggtttaaaaaaatattttttattaatcagaaaatattgtttgattaataaaaattttataaaaataataaattttgtggagatattaattgatcaaaaataaatcagaaaattgattttttaatatattattagtttatagaaatattgaatcaaacaattaaatgtgtagaagtttgattatatatcattacgcacatgcgaatcctacaccgttcacattatagagttactcttattatattttaagtacaattggcacataattcaaaactaacaacatgatttctagctgtttaatttgcaagttttgctgtcaatatatactattgcaagagttttgactgaagttaataaaagaccaactcggtttacatcatttataagtcatttgccaactgtaacaaataataatgacaagttgacaacaaaggataaaataatctttgtaagcgtattaaattttacactggtgaagctgtattgtctagttttagtgtcattgattaagatggtactgcatactttttcctcgatcagatacgtgcaacagcatcttcatgtgttgtctgtcatctttttgaaaacttggaatggtgatgttgttgaaatgaatttcgagcactaattatccttaacaaacttcttaatgtgtatattaattaagttgagccatatatttcgataatattgggccaccatattgggccatacatatttgaattcggaccgtaactttcgctatacatctataatctattttgattaacaatatattttaataaatgatttttacaataaagaatagtaatagtttgaagttcgttcttatatagtttcataaacttattaaaaaaataaattaataatattagtactaatccaaaatataattttaaacaaaacaaaaacagtgacaaataaaagaaaacaaaaacaccaatccaagctaaatggagactgtctagattcttttgattatttttctaactcattataatttttatttccttcacattatttcaaaaatatttagatgtttttgcataaaaatttgagcttacaagcaaaaagaaagtgttgtaaataaaatttcatggggaattgtccaaaatccttgattcaccgtgattcacattgccttccaaaatctctaactccactctaagattcgatttctccttcctaatctcattaagcgtcaaattaggccgtgtatcatttgtcaaccaaagcctagaactttaacacaacttctcctcatctctaacctagctttccatccgatcacattttctcattctgattctcgcatcagttttatttcaaaagataaatcatttttttttttaccaaaaaacgttataaatcgtactctactgacaagtaagtagtgttcaaacaatagctgaaggagtggatccgctactagaaatttgtaggatcatagcttgggttttcccaagtgggttaatctataaatgtgatccgaacaaaacgctcaaagtaaaataccatgtgtgtttattcatagagaaaaaaaaaaaaattgataagaaatagggtatcagcgaggacagtttacagtgttctcagtttatgttatcttaaatcatgaacgtatctgcataaatatatgttaactcaatacatgtcagaaacgatgatgtccaacttgatcatgcactcgttcacattgccccactaaaacttaatccaattttatcatataatttaagtttttgttgttgcaagtttatatataattttataaaaagtcaaaaatgtaaatcaaactcatgaagttatattattttttattttattttgaaattgaagttatattaatttacaatataacttgttgacactattgctaagtttattaaattattattttaaatttttaaaatgaagcatttacataaggccggctcaacattactaatttactatggtctctaggattttttttttgagccctaattattatttttaattgtttttgttatgaaaactatttttttgtgtaatttgacaacaaataattgttaaaaaaacaaaaaaatacagataaattcttctaaattcttttgaacatttttcaatatcatatataaaattttttaaaatatttttgaatattaaaatagtatgaaacttcgatatacacgcttataatgaatagtccaattgtcattttaagaattagacactttaatatgtgactgtaaaaactctttaaatatgtatattattggttagatttaattacatgagtttgatatatatatatatatatatttgcaaattgaaaataaatttaaagaaaattgttatttagaattttaatttcttacgagaaaaatcctataatttaattttagcgcctggctcaccccgtctggctaggaaaagaaatataaatacgcatgtgattattagaagaaatgatgttaaaagagagagaaagatacgagagaaaatggagagaaagtgagagagagagagagagataaagcagaggttgacttcgctttgctgagaaggcaaagagctcgaaagagagaagactaactctcatcagcgacgaatgtctgatccgttgaag

SEQ ID NO: 1862 - DNA, 3000 bp, Unknown
  misc_feature (1)..( 3000): cDNA_ID_2145912_gDNA_ID_1620459_Annot_ID_157694 3000 nt of promoter + ATG
atcaaaggatctcaatttctttagtcaacaggtgttccttctcttcttcctcgattcggaggtagagaagaaaaatggcagctccggcgatcctaaacggcggcgatgcgacggagagagaaacacgaatggctcactctgcaatgacattggttcaggtcataaatggaggataccatgtggttacgaaagtagctcttaacgttggtgtaaatcagctcgttttttgtgtctttcgcgatcttcttgctctctccattctcgcacctctcgcttttttccgtgaaaggtccctttttatcttcttctcaaaatctctctgtttctttatccttttgcttgaattgctaaagtctctgaagtctctgtttctgattgttttgatgagtttatatgcggcaaaatcagacaaatagtttgatctctctggaattggaattagggttgtttttctttgttaattctggttctattgtttaatgatggattgcaattttgtgtgacttggatttgtcttttgataaagatttgctcttttaatttcttgtagaacgatcagacctcctatgaatagaagcatcttcttttcactcttctttcttggtttagcagggtaaagtaatcagcttgtatctctttatcttttgaatcatgctaatgaaagattctaataacaacattcaatctcaatcttgataggatatttgggaaccagttactatttcttatgggtttatcttacacgaatccaacttatgctgctgctatacaaccatcaatccctgtctttacatttctcttggctgtcttgatggggtgagtatgagtttcctcaacattactgtaaaatgtgaaaatttgtaatataaagtttcaatcttttgatggtcttcttctttgtatacagtacagaaaaagtgaacttgttgaaagtcgagggccaaacgaaagttggaggtactcttgtttgtgtttcgggtgctatagcgatggctttgtttcgtggtccagccttgtttggaggtaaagatgcagcagattcagtgaaaagtgtaattattgatagaagtcaaccagagcttaatgggtggttagtctctagttttcttggtcttgggtttgatcaatggcacattggagttttatgtttgattggaaactgtatgtgtatggctgcttttctcgctgtccaagcaccggttttgaagaagtatcctgcctacctttcggttgctgcgtattcatacttcttcggtgcatcaataatgatcacaacagctatcttgtttgttagagagcctaaagattggagcttaacacaatctgaggttcttgctgttatattcgcagtaagttttcacaaccgagatgtaatatgtttatttgggtgtgtttgtgttttggagcttgagctcaaatcatttgaacttgaactcaaaaagattggaactcgattctgtacatacggattcatcttactagtttgtgtttaattgttttcttttcggtttttattcctcagggagtgtttgcctcagctctaaactatggactcttgacttggtccaataaaattcttggagctgctttggtttccctatacaatcctcttcagcctgcaacatcggcctttttatcgacaattttcctcggcagcccgatctatcttggaaggtttttaaattttatgcactcttctttgtatctttgattcatccagacacatacaaacctttctgtcttcttgtattggatcatataaacaccttggtttttgttctctccgcagcgttttgggtggaatcctcatcatttgcgggctttatatggttacttgggcatcttacagagagcaacaaacaacatcagctgggaatgagattgcttcttctagtgatgtaagaatctcggaacctttcatttacagagatgagactggtaaataaataagaaaaggtaaagaaaggatacttgtaccgttgtacgtagttaatatcagacaaaaacttgacaaatcatacaattttttcgagttcaaacattgattctttaaacggtaaataattcaaaataattacttcgcctcttttttggtaatgcaagttcaactatggaaacaaatctctatttttattttaagaattggttgtttcaatacgttttttagttgggtgacaaagaagcgtatattttaaattcaatcttagataaaaggaatcaagaacacttaaaaagtcattgtacctaaagacaagcacgattaacaaaaaggaaaacattatatatgtcaacggacatgttacatacttacatgtcagtgtgatataagctgggaagaagacaacaaaagttttagcaacatattatcttgaatttgtgaagatagtgtctattccataattccaacagagtggtatgtctttgcgacatacacacatagacgagctcatgagaatcaagaatcaatatatattatctatatctaacatattccacgcatttcgagtaaccaagatagatgttttagtagttattgccaaactatgtgtgtgcataaagtattaacaagtaggtactgacctagtaaaaaaatgaaaggtataacttataagtttcttacgagtacttagatcactcatgacatcattgtccaagtggaaaccattaatagcaaataaacaaaaatcattgacttattgaagtacgaaattattgactttctcccatttcatcatcaataatggtaacaatttctaatttgtgtggatagtatcttatacgtcatgacaactcttgggaatggtaatttaaccatagaagagattcaatttctttttctaagtttattagattcctttgtttgctaaatcaagattctttcaagttgaagattctttctaatagtatatacaagagggaagaatctttcaactatcactccctacaaattccatgagaaaattcacttttccaatcaaaacgtaaagaagaagaggaaga

SEQ ID NO: 1863 - DNA, 3000 bp, Unknown
  misc_feature (1)..( 3000): cDNA_ID_2145935_gDNA_ID_1620459_Annot_ID_157701 3000 nt of promoter + ATG
gcattttccggcggattatcgctcttcgtcgaacctttagatcgcttattcaccgatttcctcctggattcacgttcgttatccgtggatgactcatcgtgaatctgttctggctccaagatctgaccataaccgacgcgaatcttacctccggtgagcgagctaggagcgaaaggaccgacgaggaaagagagggaaagccataatagtagcgatttggcaggttcagattcgaagtagaagaaggagagagataatatgatgagggagattgagacggagattgaaatgaaaagcttgttagggattctagcttcttcttcttcctccgccgtgtgagaagaagaaggacgagattggaaaacgaatctaggcctgtcttcgtcgaaaaaatccattgttgctctgttgcactgtagaagaagctgaaacaataaataaaacttagaaaaaaaaatctcagaaataagtgtttttgggcttttgaaagtccatatacgaagatttttgggtattgtaaagcccatatatattaaaatttagcatatgacaaaattggttatacgaattttaattagttaattttagagtaagcaaacccttaattaattaaattttagtggaaagcgtgtacactcgagatcgcagatagagatagtaggactcagagaagattgtgccactaatcatgctcttgagcctttctgttcaacaacgaagcaattgcagagaaatcacacgtttgtgtacgacattttttttttttaacgtcgatttattggttagttttatattgcaactatattataaaatgaaaatattgttgacggaaaaatggaaattttaggagccagaaaaaagggaaggaaacaataattcactattacgaaaatatataaacttgtacgaaaagtcaaggaaaccatttatcacctgttacaacttggaatggaaagcggagaatatattaggcaaaggctagagaagttaaataaaggataaaagcttacggttcagattggagatgacggcatttatgaaatatcgacggtttatctgtggataattactgtaggttgagatgcaggagattcgagcttagcaccaacagacactaccataataaatagcttaataatatattcctttttagctgagatattataaagtagggtttaatttgttattatcacgagaaccacacaaatacgcggcaaagagagagaaagatagagagagagagagagagagagagagaaagcggtggagtcgtgataagggagaagctctggatacagtctcttcccgtcgtcggagacggagtttatgcctattggctcctgaggtaaaatcgagatcgcctttttttattttgtttctcgtgttttgactgatgcgcttttgattctctcttcgtttgtttgctttgagtatatttttattattggagtcgcgtttctgagaactttggatttgaacgtatacggattggtttttttattgaattttagggttacgcttttttgtgggtttttttttttttttatgttatcgtttcggtttgtgaatttcttcgttcattcagatctgagataaattgagtctatggttggttggtttttatggtaaaacttcagcagagttgaaattaggtactagaattttagatatgatgatagtttctcagagattatgaattgggatctttctgtacctctttgcagtttggtttcttagggttttgaccttcgccagtattggatttggatttcattgttaatatgcctttgtgtaagacatgttctagataacattatttgtacgataccttgaattgcctgttttcgttgcatttctaatgtctttatatactgcttttgtgctcattatcaggttagattaagcttcgtatttagtggattttcttcttttgagatatggaacaagattacatctgctcagggtgctaccagtatcgagttttttcattgcaagaagcactcgattggcggtttcttgtgcactcagatttccttatcggctctttcgtgaactgcacctagtggtcagaccttctgcgatctttacggaaggtgtgatgcaaatttctgattcaggtatgggtttctgaataaatctgttgacacttgcatcgtagctttcacaagatactttgaatagatgatattcctcagtgtaagaattgttattttggtttctgacatattttggtttctgtgtggtaaaggtagaatttattttcagtatctaaataagcaaatattggatttatcaattttctctaagcctttttagagtatgaacgcaatatgcaaatttagaaaaaaggaaaaaagtgctatcaagaataggaaaattcgaaaaggaatattagatgataagttttggaaaaacacgtcaaatactccatacttatagatggcttatatgactatagttcttctttgaaattggaacatgattgttcgtatggtatctttgttttctgcagggctgatgtttgcaagttatcctaccttcacacagtcctagagtgtcatctaaatctgttccctgcactcaaaaactagttggtccttcttccatatcctgttcttatgagagcttgttgaagaaggatgaatcagttttttttcaagttatgacttttcttagctgtgtcttttcctcgagtctctgaaccccttgagtgaaatgttgtgagcataagtttcgtccagctacccagaacattactttttgttagtgcgtcttccaattctcagtatgttttgtctttttctcttagcgtctttcttttgccttgttggtcaacccattgatgttcaaacttcaaagtaaataagggtcagtctacccagcgggagaatcattgatcttgctgccatacgaacaactggaagattaaagtgatagacatatttcagaagttctttacagagaaatacttaaggggatactttgcttcacctagaggcg

SEQ ID NO: 1864 - DNA, 3000 bp, Unknown
  misc_feature (1)..( 3000): cDNA_ID_2146011_gDNA_ID_1620460_Annot_ID_157731 3000 nt of promoter + ATG
tttcgagttggtgtttatacaacgccgttaatgtaaaaagatataaaaagagtttctgagtttggtttttattttgtgtgtgttctcaagtcataatcattttttacatactcttatggttgatttgcttcccaagttatctccaaggtaacataacgaccaacagtttcactcggacaaatgatcttcacgacttcccgatccgataggatccttggaagctaacaaaacccacaaactaaacaaattatcaccaagaacaatgtttctgtctaaaaaaaacaaaccctttcactgtgtatctctcgagtaaagttttcttctcaatagtggaaagacccaatgggccttatgcgcatgggctatattgaaggcctaatgagctagttggacacatatcttcagttaatgttttgacatcgtccacactgttcttgttaaagaactattttgtcttcttcttctcctctttaatcccctgattccccaaactttagggttttacgttttccttatcaacaaaaaccaaaacaaatctcccttgaatccgaaaaatgatcactacattactccgtcgctctctccttgacgcatcaaagcaagcgacatccattaatggaattctatttcaccaacttgctccagcgaaatattttagggttccggcagtgggaggtctgagagatttcagcaagatgacatttgaaaagaagaaaacatcggaagaagaggaaggatccggtgacggcgtcaaggttaatgatcaaggtaacaaaggggaacaattaatagttagttattggggcgtgaagccaatgaaaatcaccaaagaagatggaactgaatggaaatggagttgctttcgggtacatagcatatttttactacatgttttggtgtcttgttacttactcttggtcgatttataagtattttttgtgtttttgtcgaataatggtagccatgggagacttataaagctgatctaacgatagatttgaagaagcatcatgttccttcaactttaccggacaaaatagcttattggatggttaaatctcttcgatggcctaccgatcttttcttccaggtacactcttaggtttctattgttccaaccgctaactaagtctttaactagtgaaaactgttttagaagatttggtagctagctatcatttttagaagattttagtatggactaattcttggcaatgacttaacgcagaggaggtatggttgccgagcgattatgctagagacggttgcagcggttccaggaatggttggagggatgcttatgcacttcaaatctctcaggcgtttcgaacaaagtgggggttggatcaaagcccttctcgaagaagcagagaatgagagaatgcacttaatgacattcatggaagtagcgaaacccaaatggtacgaacgagctcttgtgatctctgttcaaggggttttcttcaacgcttatttaatcggatacataatctctcccaagtttgctcatcgtatggttggataccttgaggaagaagcaatacattcttacactgagtttctcaaagaactcgataacggtaacatcgaaaatgttcctgcaccggctatcgctgttgattactggaggcttgaagctgatgcaacgcttcgtgatgttgtcatggtggttcgtgctgatgaggcgcatcaccgtgacgttaaccactatgcatccgtaagtgtatactctaaatgaatggaaattatataagttaaagatcgatgcttaattcttataatatgtttgtataaattgcaggatattcactaccaaggtcatgagctgaaagaagctccagctcctataggatatcactgaatcagaagagcttctagttttgttttgtcgctcttaagctaacacggtccagatttcttttgttgaagtactcatgactcctttttaattggatggtacggtggagatgagccaccaccacattatttagtttcctttctacttttgttttggaaaatcttagtttctctacattacgtaaccaaaatcccactatatagttcacgtttgctcaatggtttttcattcgaagctctcctccgtgaaagtggctctgttttgctctgttttaaggttcaaattactctgttttttcagttcctaaacatgttttaaattagctaaactgtctcaaactcttgttattatttttcttttttgttgattaattaatttaacattcaaaaaaaaaaatcccactacagtatatatgaaatataaaagtagtaagttaaaagaaaattccaatacagtaacttcaacatgtaacataatctgtgtaaatttttaagtattatttattttgctaaatgtttttttgtcatcattgttttgctaagtgtttattattaactttttatggaccaggtttctatttttaaagtatcatatattcttaccaatagggttttgtcatcctctcattggttcacccagatttgttttttaattttttaatttttttgacagcaatttgttttttaaatttaaattgtagagtttgtaaatatattatattatactaaatttaatcattattaaaaatttaactcttattttagtcatttattagctttttcaactcaacatttaattattattatatatatatatattttttctgtttcttattaattgatttttttttttataaatatttatgtattatttattagtcattattgatgaattttaaagtttaaaacaaataattgaatattattggtttagaattataaaaaatataactcataaaagttactacatttataatatatttttttaatctctgtgtttataatatagttggcaattagatttatggtcaacatcaaactctcgaatcaaagtcagcttcttcgagaatgaaattggaattttaaagtccaacttttaaaatttatctttctgctttcacagagacgacgagagaaacaatg

SEQ ID NO: 1865 - DNA, 3000 bp, Unknown
  misc_feature (1)..( 3000): cDNA_ID_3064839_gDNA_ID_1620460_Annot_ID_157752 3000 nt of promoter + ATG
gattttttttagtgtctttaaaaacacgagttcaagtttagataatagagaacattttgatagagtatttatactagaattttcacacatatgaaaacgaatataattttggaaattttaaattttctcttttcaaaaacaaattaacagaagatgttagtttgtaatatgttggtaattgtgattttcaaagttttaaattctggaattttcaattacaattttctacttggtgtacataaagcttgtagtaaatttgttaattcggaagttaatggattttttgtaacaagaaaataaaaatgattagtacttgagagttgacattagccagtagggaagtgcatataacgcgcttaagagggaagtaattaagaaaagagtcgtttccacttaattaaatcgtagccacaaataatggggtttcttaaaaatggcttaagtgtacttaaacttttgtatgatacgccaaattatgtgccctttcaaatatggaaactatttagttatgctttaacgagtaggttttcaatcactcataacccttgctataaaatctaaaatatatcatttttattttattttgcaaatatgaaaatctaatggtcttattagctccatagatcattcacctcctcaaagataacatagttattattattttttaaagttacttatcaaataaaagtgcaccaattcagatgtttggtatacgggtccggtaccatggacttggcccttgggtctacccatattcgactcgtacccaaacgtttattttgttcttttcaattgaactaacaaactaagcatcttaagtataaaaaaatcgttaattgtaatgtaaaagccaaaaaccaacagacaaatattgatttttgcgtttgtgcttaacataattatttaatgaaaaaattatatgttttaattttataactcaaaacctatttcttaaactgatgttgaattgtcgaaaaactaaattaataatgttggcagatatatatggtcacgtcaaagtctatctaatcaggacttttgtttttaatcttgataaacgcatgttatcgcattaaaaatgaaaagagatgggatgtggcaacaaaagcaagtatttgctacttgaagtgtgaaggaccatacatttgattaattttggatgtgtttttggttaggaattagtcacttttcactttaagataatggatttcgaatttggttgggattagagtgagataactttttagagtgtcaagatcgtcgcgtctccatcttaatttgtactttctttgtcatgttcttaatttgtttactaatagagtataataagttcagttacctacaattaattaagttaatttggcgtcattatttattactataaagtagtaaactaatgtacttttatcgatttctttatgagacatgccctactacaaaagcatataaagatcattgagttgttgaagtacatagcaaatttattctaccaatttaattaccatccaatctttttttcgtcaactatgacttgaatatatggacaatatggttgactaaagaaacgacaaggagtctcatgccgaaaacttagtacgtcgaggcttgtgtgtggtaacgatggaagaaatagattgagaaaaaaaagtgaaacggcaagcagtctgtttatgaagtctttggatctcttaaaccgggctttgtccaaaattagaatggaaaaaaaaaaagaaggatcccttaaaccggtaagcaacccgattaaattcaatatgtgtacagaaacttaatttgatttttttataaaatttaaatcaagactaatatggagacttacaaaagttaattatatgaattgtatgttacagattgagtgcgaaaggatgttccacgttcaatccactagcgaaacaaaaaaatcatttatttaactgattgtcttcgtaagtttacttagtaatatcatgttgaaacattaaatctgatatatgtgccactatgtaaatcatttagttaacttataattgaaacaagaaatgttatgtgtgccactatgtaacttttattagtacatatataaaggaaatagcgtttaataaatcgactgctaatctaaaactaacaagataattaattatgatcactaagcttcattctaacaaatcagtttatagaggacaagaaagcttataattactccaccttcttttgtctttttgtttgtgaaagagaaatatctgatggtaaaaaagcccaagaagacctcctctctacacctttaaagtttatgcaaatttagaaacaaacaaaacggaccactatagctaattatcttatatagataagatatgtagaaggagggatatacatatgtataataacaatcttgatatataacttccatcatccatggttaagattgtaacaccatgagttggtgcgaggataattcatatatacaaaccaaaaatcacgcgtatgtatgttattgcatgcatgtcttgcatcatccatgcatgaatgcatcaaagagtctccagtctttaatatacatatctacatggatggatgaaagtcatgaaaccatgttattaaaaccctttttcaaaacaaataataatgaaaccatgttgttataattggttaggtttgaagagatatacatagatagtccccatgcatgtgttattagtagtgtttaggatgaaaataacccctaatacataaattaattttatgattaattaacactctaagattaaggtaaaacataattaattaagactttagattaattaagggttagtaatcacgcggtgaatttagtctctataaaagcagtacctcaccttccacaaccttcaatatcaactcacccacatctttctctcttattctctcactcttttttttttatattcctctctctctaaatctataaaatatatttaaaaacttgatcgtatataataaagtaaataaagaataataacaaaaaaa

SEQ ID NO: 1866 - DNA, 3000 bp, Unknown
  misc_feature (1)..( 3000): cDNA_ID_2146061_gDNA_ID_1620460_Annot_ID_157749 3000 nt of promoter + ATG
tttaaaaaggggttttaaagtatttacctatgtttttaaagactttataaagattttaagaggttttaaaatgatttacaagggtttttagcaactaccaaagcttttaaaaaactttacaaggttttttaaaagagtttataaaaaatttacaaggatttttaaaagcatttttttggctgggaaaaaacatttacgagaaaaaattttggcggaaatttttttttgggcgggaactttttttttggcgggaaaaaaagtttggcggaatttttttttggcgggaaaaataaattttagcgccaaaaatttggcgggaaactttcagtttccaattacatgttcttaatagatgagggtaatttggtcattctgttcaagggaatggatatttttaaaaatgaacaatataaaagggtattgttgcaaaaaggtagtaaaaaaaggtagttttgtaaatctccccattttaaatgattctctatgcaataaaatttaaatattcttgttctagataatgccaaatttatattcaaaatcatagttttgtaacattgaattttgaacatcggttaaagcatggttacaaatattagatccaaaaaaccatatttaatacataatttagaatcaattattatctaacaatgaattaggttattgaataacactatgtcactgaaaaatcatagaagctcattgtccaacttacaaattctttatttcactactcattcacaacaagttggatgctctctcactgacccaataaacattagatgtgttcgtatgaagagaatcattatattcaatagttagccgagcattgcatttttttcttctaatagatgtgatacatcgaaaagctattttgttgcactatagctagcaacatcatatcccatttgctaaactaaaacatgtcgtagttggtcaccttacatttaacagctaaagtgactccaccaaaccactcaacacacatttgatcactagacctcggtaaatctttctaaattttaatacacaaaacacaaacaccattcaaaaagacattacatctaagatttgctctctcttattgttttttaagaaagactgtttcaacaccttaaaaccattatatgctcactaaaggagaattgagcctataatcacctcttgacctaagatgactcttatattacccatgtggtattttcttattctgaccatttgaaaaagtattctccttttctacaccagaggcctcgcccttgtagaacatccttcacatacgggcggactgtgcaacaccgatgcaacaatacaaaagcctaattaacaataaagaaggggataaacgtgaaaaagttctctcctttgaaaaaaaaatacggtggaaaagatctctgatggccactgacatgatgaattttggtaacgaggttacaaattccaactagttaaaaactgttattaaaagagttgaaccaatgtaatttggtagcgagtttgtttttggtataaaactgcacgggttcaaatcatatcatcgttattgttatggtatttactattacctataaggcttacaaaattgatttttctatctaatactgttatttggtttctaaggtgtacttccatgcttgaatttttaaagtagagtaatttcaaatttatctacatgtcttgagtttcttgtattgaaaaaattgacttttatttttggaaacctatggaattctttagatattcttaaatttttattaaaaaatattttccacctgaaagaattattgttttgcaatatctttcaaccgtttttccaaatacttcaagataattgagtcattactcttttaacattcaatatcatcacattaaatattcttttatttttggaaatgtcaaatttattaatcaacaaaaaaatatattttcaagtggaagggaataaaaatcaaaaccatagcggcataccctaaagataccctcaaacttgtgaagatattttgtaactcaattttttttttctactacacaaatcacatatattatttagataaagggttttgtggaacataaaattcatctatggaatttttatttctaatagacgatatgttgaatatcattttaaattgttaaagttggaaatatatgatatttttttcttctcaacatacattaattaattaaaattttcaaaaaaccaaaccaaatttatagagaaatgatatttatttttaaatactttaattttttttaaagtaactacctattgctaaaaagtgaagatataaattaaactaaatgtgtagtatcattaatttatatatatacttttcatcatcttagatttcttggtcaatgttttagagttggaccttgtgggaccaactaatttgtggaccctatgctgatacgaaccattagattgacattgcaacaccaaaaagataatcacacggctagtagaaattataatgcttacatgttttacacttgtcacaaatatgcccgagaattttccgcaacaatacaaactaccttataacgacttcatgattattacatgacaaattttagtgaccaatttacccttggactatcattttgtttttaaagtaactttttaactcacccaagttatcaaaggttagatctttgccaactcatcgctcttcacagttgttcttgtttataaagtcttaatattttacccttacctttacttctccctgtttttcctcttccttaaattcatcttcaagcttgaatttcatttcactaatcaattactttcctcgttatccttttttgcagtcaagttaaattgctctctttcaagacttgtgttctttaaaccaaaaaaaaaaaaaaagtatctgtgttcatcaccaactcattcttctttcagatctagggtttcatgcttcactcaatttttttttgtttaggtagttccatcttctaaacgttgtatttttttttttttgccatcataatcatatg

SEQ ID NO: 1867 - DNA, 3000 bp, Unknown
  misc_feature (1)..( 3000): cDNA_ID_2109192_gDNA_ID_1620460_Annot_ID_157747 3000 nt of promoter + ATG
ttgatatgcagcctcacacatatgaaataccatcaaaagaaaccattaggggcatcactccttctccatgcactgaagctttcgaggcatgttttcatggcacatccaacgaccatgttttttttggcatggcctataccaccccaccaactattgaacccaacgtttcacatgtctcacatgacaatactatgtgggaaaacgatcaaaaccaaggattcatctttggaaccgagtcaaccctcaatcaagccatggcggactctaatcaattcaatatgccaaaaccactcttgagcgcaaacgaagacaccatcatgaatcgacgtcaaaataaccaggtaatgatcaagaccgagcagatcaagaagaagaacaagagatttcagatgaggaggatatgtaaacccacaaaaaaagctagcatcatcaaaggacaatggactcctgaagaagacaagtaaattcaacatctaattttttggaattctcataaataattttcttaatctagtatgatattgtttttaatattaatattttctaatgattctacctatatttaggttattggtgcagctagtggaccttcacggaactaaaaaatggtctcagattgctaagatgcttcaaggacgagttggaaaacagtgcagagaaaggtggcataaccatctccgtcccgatatcaaggtctcttattttattttattttcattttcttattttcataggagaaacaaaaacaaaatatcatcttcgatactttcaaattcattacatgatacattgagaatcttctaagagaatattaacaaacttttttcacacttgtcaacatgtatacggttttatttcatgcatgaatactttaaacttttgtttgtatatacatatatgtctatgacaattctttaaggcattttgtcttcttgttgcggacaaaacttcacaattggtaagacatttaaactaaagtcattgtcacttggattctctcatataattcaacaaacataaaagagaaaaaaacatataaaaaataaaaatatttgtttaatattgtatgtattatttacatataaagcatattttatgtggtatgttacagaaagatggatggactgaagaagaggatataatactgataaaagcccataaggagattgggaacagatgggctgagatagctcgaaaactcccgggacgcactgaaaatacgatcaagaaccattggaacgcgactaaacgtcgacaacactcgaggaggactaaaggaaaagatgaaatttccctttcacttggtagcaacactcttcagaactacattaggtctgttacctacaatgatgatcctttcatgaccgcaaatgcaaacgcaaacattggtccaagaaacatgagaggtaaaggtaagaatgtaatggttgcggtctcggagtatgatgagggtgaatgtaagtatattgtggatggtgtgaataacttgggtttagaagatggaaggatcaagatgccgtcattggcggctatgtcggcctccggatcagcgtctacttctggttctgcgtctggttctggaagtggtgtgaccatggagattgatgagccgatgactgatagctggatggtgatgcatggatgtgatgaagttatgatgaacgagattgctttgctggagatgattgctcatggtcgtctttagaccgtgcaatataaacaagtcgaacttgattatatctacctatataattatgctatttatgaaattatgtttgtgcttttaattgaagaattggacatgtaatatatattgtggtttaattgaaggtttcttttggactaaacaaaaattgaaggttttcttgctttatcagattttttttttgttattctctaatttcattttaattaagaatctatatatattgttaaattttctgttatactatatgaatggtaattgcgtttgcggttaggagaagacgaccattaggtccacaacaagtacatttagtcactaaagaataattttatatcgactatgctaaagaaaaaaagtactagttgtttacaaaatatctggttagtatgatgtaatatgggataatatgtgtatggtccgttgtattgtaattttctggaatttgttaccttaccgtcataatgactatatggtccgtcgtattgtaataccagaaattttaggcaaaacacaaacaaaaaaaaacgtaatgagagttttgtatacattatattttggttttccatttgttttgtatatcaccattcgaaaagtcatacataactaaaagaaaaatacataaaacttttgggatctatattcattaatgatattttgactaactacatagaaaattgagatcttaaccaaatacaataaaccattacttcttattctttttgtgcaattcctccaacaaaaaaagaaaaaaaacttaacaattttagtcttaactacaaatagttaaaaataataatgggcttgtagatatctttccatttatatgagatttgtgatttaggcctatttaagtaaaatacacacgaaaccaaatcgacgtcgtttggcaactaagcgttggacaaacggagaaggtcccacctgtccttgtctccactctgtgttctccgattccagtgggcctctgacaccgccattggattgttcttcagatttatacatatctcatatctcatcaccttccaagtttcaatttgacttctccatcacacacaacaacaagaacaaggacaagcttctacatttctcttaacataacgtaagtatcaagaatcaaagctacttaatcttaacactaatatctctatatgtaaatcaattaagctacttttaactcctctgcagagacagtttttgatctgggttttcaagtccggtgttgatcccattgagtttcggatctaaaagatccgaatattcagacggatcaacaagagaacaagaaaaaaaaaatg

SEQ ID NO: 1868 - DNA, 3000 bp, Unknown
  misc_feature (1)..( 3000): cDNA_ID_2146030_gDNA_ID_1620460_Annot_ID_157737 3000 nt of promoter + ATG
aaaattcttatcttatgcaattgagaaagaaaaatctatagtttattttttctcacacattattcttacaattaaacttttgtatattcaagaagtggacttgtgaccatataataatcaagagaaactattgtactagtgtccccatgtatagaaaacctactgttttagtacttgctatttgagcaaatagacataactttttacaggttaaatccaagtttgaaatcaatctcatcgttaaaaaggtgaagatcacacaaagaaaacgtcaaatggatcatactgggcccattttgcagaccaagagaaagtgagagagagttgtcctctcgttatcaagtaacagtagaccaccactaaaccgcccaatagcttataatcaaaatagaaaggtctaataacagaaacaaatgaaaaagccttgttccatggactgcctacccgaattgattgattcgactagtttttcttcttctttgattaagacctccgtaagaaaaatggtactactaaagccactcgctaccaaaactaaaccattccagactgtaactggaccaatatttctaaactgtaaccagactctaaacatataaactaattaagaactataaccattaaccgtaaaaataaatttactacagtaaaaaattatactaatttcagctatgatggaatttcagctcttaagagttgtggaaatcaagtaaaattaaaatcataataatattcttcatccttatttttgtttcacatgcatgctgtccaatctgttattagcatttgaaagcctaaaattctatatacagtacaataaatctaattaattttcattactaataaaatgcttcatatatactcttgtatttataaatcatccgttatcgttactatacctttatacatcatcctacattcatacctaagctagcaaagcaaactactaaaagggtcgtcaacgacaagttatttgctagttggtgcatactacacacggctacggcaacattaagtaacacattaagaggtgttttcttaatgtagtatggtaattatatttatttcgaaacttggattagatataaaggtacagttagtgaaaatatttggttagcgggttgaattaaccggatataggagtcatatatacaactgtgaaaaaaggataaatacaaaaagggaagatgtttttccgacacacaagctaattaagtgcatcgagaggagagcaattgtaaaatgaatgttttgtttgtttttgtacggtggagagaagaacgaaaagatgatcaggtaaaaaatgaaacttggaaatcatgcaaagccacacctctcccttcaacacattcttacgtgtcgtcttctcttcactccatatctcctttttattaccaacaaatatatttcaatcccatttatatgtacgttctcgtagacttatctctatataccccctttaatttgtttgctcttagcctttactttatagttttatatcatatcaatcgacatggcgaatgtggatcgtgatcggcgtgtgcatgtagaccgtactgacaaacgtgttcatcagccaaactacgaagatgatgtcggttttggtggctatggcggttatggtgctggttctgattataagagtcgcggcccctccactaaccaagtatttttgtggtctctttagtttttcttgtgttttcctatgatcacgctctccaaactatttgaagattttctgtaaattcattttaaacagaaagataaataaaatagtgaagaaccataggaatcgtacgttacgttaattatttccttttagttcttaagtcctaattaggattcctttaaaagatgcaacaatctaattgttcacaaaatgagtaaagtttgaaacagatttttatacaccacttgcatatgtttatcatggtgatgcatgcatggatcatatctagagatttatggttggatatatatttaacattttgatattagcttttaaaaaggtctgaataaacaacacttgttagataaactcgatataatcaatacatgcagatcttggcacttatagcaggagttcccattggtggcacactgctaaccctagctggactcactctagccggttcggtgatcggcttgctagtctccatacccctcttcctcctcttcagtccggtgatagtcccggcggctctcactattgggcttgctgtgacgggaatcttggcttctggtttgtttgggttgacgggtctgagctcggtctcgtgggtcctcaactacctccgtgggacgagtgatacagtgccagagcaattggactacgctaaacggcgtatggctgatgcggtaggctatgctggtatgaagggaaaagagatgggtcagtatgtgcaagataaggctcatgaggctcgtgagactgagttcatgactgagacccatgagccgggtaaggccaggagaggctcataagctaatataaattgcgggagtcagttggaaacgcgataaatgtagttttacttttatgtcccagtttctttcctcttttaagaatatctttgtctatatatgtgttcgttcgttttgtcttgtccaaataaaaatccttgttagtgaaataagaaatgaaataaatatgttttcttttttgagataaccagaaatctcatactattttctattgtaacgagttttcttgtattaaatttagaagaatatacaaaactaaataattaaatcgaatcaaaataaatcacaatcttagactcctagtacggacttgaattaataattttgattctctgagttcttgaattaataattttgggtcggttcggtttctctattatcttattgggccaaatcggacggcccattatctagctccggcttatcggacttcctcttccccggcgctgtaaattccaagtccctccgttcacgtctccaaactagccgttgccttctctctctccagccaaagcg

SEQ ID NO: 1869 - DNA, 3000 bp, Unknown
  misc_feature (1)..( 3000): cDNA_ID_3064835_gDNA_ID_1620460_Annot_ID_157739 3000 nt of promoter + ATG
tgacgctaatgcaaggctaagctcacagcaaattgcgcaaagcgagagagataaagcaccaatgcttgtgaaagtgatgcattacatttgtgtagccttcagagatcatttgcctcttgagaaacagcttagacttgcttctatggacatgtcttaattccttaaaacctattgtatagtttttatatttaggagtattttgttgtatttttaatttttagcgggaatttcattgcccacactgttgtatttttgaaagatatataagaaagtgaatatgaaggttgaatacaaatttcaaatgaggtacatcgacatagtagccaactttatcataattaaagatgtctatgattgctgattaggagaaaactaattgaagaagttaatgagtatgaaagcaataactcgtgttttcccgtatcttattatgtatctaaacaatgtactatttccagatggggtttcagaagtgttgtctttcatttaaaaccatggctttcgaataataacttaaaagttgttaagaaaaatgaatgctgcctttttttcattggtcaacaacatagcgaataagagcttcatattttcgtattttttttttatcatttaagatgtgagtttttttgttctgattatttttgttgatgctattattatgaaattttcatatatgtcttttcggaaagaattcatcaaaccaaattatgatatcattttcttatatatttatatgaaccagaataatatttttatttatcatgggtggcattggcaatcgcaattcccaagcaaagccaataataaccaataagaatcgtaagaccatccttattgatgagttcttagtagaattcttaacattttggatagacaaaataatatttaaatattaaatagttcttaataagaagagaaagtgtatcaataatctcttatttaagagccaattttatttttctaaaaacccttttctattttttatttgtattttattttatataatattttaagagtttttctaaagtttttaagaacctattgataatgatgctctaaaaacatctttaatggaaggttttaagatgaatggattcttaaacaaagtaataaaaaaataaaaatttgaatgaaagaagaaaaagaatgaagaaaggcttttagctaaaagcatcaagaagaatttttgatactcaactaaacccatttaaatgacttgtctctcatacattggttcactttttttctaaaattaaaattttagttatataataaaattacaataaaataattatttttgttgttgttaagagtctcttagaaatgcttattgtcgaggatggtctaaaatagagttggattaaaacactaccgtcttgctcgctgacatgcccatattccacagccacaaaatcttcaactgacacgtggcataactaaagcctctacatatctcaggcacgtgaatctactttgtgaaaacactgaatccaatgtttccagtgtgtgcatagagttttatttttagatgtcaagatgtttaacttggttggtataagatatccttctgtattagttcttactaatagcaaatatgagatcttacaagtaaagatatcttaaatagtcttattaggtatacataaatctatcagaaatggattaaaaagaaaaaaggataaaatcaagtaacatttgtggaaaatcaaagataataaaaatagaatttaaaaatagaatttctttttgataatatcttatatatatataattaatttaacaaatagtttttgttacattttgttgatgatgcttacccatataaatgttttatttataaataataatacaacttttttattctctaatagctcgttaaattttttaatttatccaatcatatactttattcatatcaaccgacttttttaagccaccttctttctttaaatagattccatcttctctcgctctccaatcccaatcagctccattatcataagcagtatattgtttaaatgcggtaaaattttgataatgtctatagtttggtctttgtttcaaagtacacatgaaacgagtcgtaccccaaatgttagcgcgaaaactattcacgtaatcatatcccactggtattatttttggacctattacatcatttttggaataacacctcatccataagtttttatgagatttgagttcgttcacgattctaattccggtgccggatacatgaccaaaaatgtaaatactaaaaacaaatagaaaaactgaaaggattttcatttattttttttttgtttagggtagatgtttagatgttttgttttgttaccttgatttttgtgtttctctggtactatatatacaaacacatatctgtattactattatttgcacgatatatctttctttattagttctaagttataacaaatatgatatcttacatataaagatatcttataataaacgtactagagtactaggtatacataaatctatcggaattgaattttgaagaaaaaaagataaacattacgttggcttactttatatgaaattcaatgaaaatcacttagccaaagaaagatagaaaaaaatcttatgatatactctttgtgtacgtaatataactttgtttataattatttatcaacgcaatagcaagcattgccactaaaccaataagagagtgatcatgagcatgttgggaacaacactatccacttgttcgcttacgtggacatttttcactgccacgagatcttccactcccacgctgcataaccacaatctctacatatcttctacacgtgaatctagtttgtggaaatctaaaaccaaccaatctacactcgctgacgtgtctatatgttaatcttcccacaaaatggagtaatgaacactttactatataaacggcgtctccaattcaacaacatctcattctcacttacttcttttctttttttgtgttcttgtttagaagaagca

SEQ ID NO: 1870 - DNA, 3000 bp, Unknown
  misc_feature (1)..( 3000): cDNA_ID_2146040_gDNA_ID_1620460_Annot_ID_157740 3000 nt of promoter + ATG
agttgattcctaactattcctccaaaaagcaaataaattgttctatctttgaaaatagaaaaagataattaattttaacaagtataaacaactaggtgacactaacaacaaatatttataattcaacacactgaaatttatgagcgatatatagactaaaataaaggtaaatgaaaataaaacttccaaatggcaatattataatgaaaaacaaattttcaaactttttaaaaatttttttaacactatagccatagtaacatcaaaattctctacaatcaatcgtttatagtaaaaatctttgagaatattacattatagggaacttttataaaacatattacacgtttaggaactttctaaaaagtaggcactttgtataaataaatttagctatttaccctttaactatttctctttccttataatctttgtctctctcctagtttctcttctctctctctttctctcccttttcgacaaacacaaaatcactctctcctcatttctcttctctctctctttctctctctttgtcgacgaatacaaaatcaagcggaagataatggattcgctacaatcacgacttgggttaaggatctgtaccatagattttttgctttgtatgtgtttacttacgtaatttaagatcatgggttctgcccaaacttcactcattattcaattttatgagttttgtagctctgaaaccttaattgaagcttttatttttcttccaattctttacttgctagatcttagaatttcagaaacttaaaataaatagaacaaataaccatatgagtcaaacaatgaccatatggattgcaccgctcggacaaacatctatggacaatattatctttgtttactactaatgtgttttatcactagataaaatattctatgtatagtatggatccattttataatgatggttgtgtccatacacaagcaaatattggtcaaagaaaaatggacggtgtacttttaactgatgattatcgtgtgtattgatatgaattgattatgttaattactagatgaccatttggacttgacttcttggacacttgtcaatggacaactatgtctttgatttgctgcgagtgcgttttattgtttagtaaagttatcaccccttttttttatgattacgatatatttatatggtttcagggagagaatcgttctacgtagagattatttgggtgaatgaagtagaaggagcagatttatacaaaaatttggtatagaatggatatgactcagtaaaaaaagtttctctatggacacatatgaatggacttgttattatgtacactgaaaatttattttttgatttttgtttaaatttgcagagatctttaccttcaagacagtagattgaggctacgagaatagatcatatgcatcagatctcgtcgtcttcacaacacacaatttcgctaatgtgaatcatattttcacaaaataaaaaaagaaaacaaaattgtgttcattaaataaaggtaacaaacctacacaaaatcgaaatctagagaggcttctccgtaaagtaaatacataaggtacactatcttcacaaactccatcgttgctctcagcacacacactcagcacttacaaatcttcaactcgccatttaaattttggatttatttagagagagtgatagaaaagacatggttctttgtagagaagaagagagagatgttcttatcagatttagataaccagagaataatttatttttatttcatcttagccatagatctgaaaatatatatttttaattcaacggtctatattaaaaagaacataatcagccacaataaaaaaggaaggttagttaatttacgtcaaaatcgcaggggtaattttgtccattttttcaccaaaagtaaagtaaagtgcctaaactcttggaagtgcctaaaacgtcaaaacattttccaaaagtgcctaatagtgtcacattcccaaaatctttatcaatcagcaccataatcataaaggtatgaatggttgtgacggttatagccgctttttatttactattcataaactataatctataacaatctagattagaaaaaattgaacaaatccacgaaatactaactttgaaccgcttttacataactttaaacagagtggtttactttgctaacagtttagtccgctttgttcaaagccggacgagttttaaatttttataatttcataataaattacgaatacgaaagaaatattggggcaatttgtaaacttaaataaatattgggtcaatttgtaaaattaaagaatttttggggtagaaaataaaacattttccagtctagtttctgtcttcctcgcctttccttgtgttacttgcaataacaaataagcccctctttctctctctaccctctctctctctttctcagctattccacagctccatcaaaccctaacgacgagaccagtcgctatcggcgacgttgattctcctactaattccgaaacctcgacggcgcggccaaaaatctccgccgtggattcaatcttcattgacgattcctccaattttgtccaatttcttccccaaatgttccatccattgttttttatttaggttttcgtcgtcgtcggagccgaaaccgattttgtttgtctgtgaagaggagcgaacagagtcactgattattccaagagaacctgtaagatttatttcctttttttttttgaagatttctgaaagctctctaggttcgtataaaccctaagttcttatgctgcttgtagttagaattctggagttagtcttaattgattagtgttttcgagttgttgtgggaattatgaacttaatcgatagtatatacgttaggatttgagtattgattgctttaggatttcgttttggtattatactctttgatctgatggatgcgaaattgtatcagagttttgtatgagagacaagaagctctgcaatattgaagtggtttcatg

SEQ ID NO: 1871 - DNA, 3000 bp, Unknown
  misc_feature (1)..( 3000): cDNA_ID_2105617_gDNA_ID_1620460_Annot_ID_157745 3000 nt of promoter + ATG
aaaaacttctggttcggaagcactaaagtcatatgttcatctcttccagattatatatcaggtagacagattcctttggttattatgatgtatagtttgcaactttcagatttcttgtttcattagtgtatatatgatcactgatacttgtgtgttttggtttgttgaaaaacagatgggtgctggagcagctgtgcttacagacagtatatattggaccgtgattttcccgtttctgtctttacaggactatgagatgagtttcgtaagttttcgcgccatttaccgtatattagttaaagcttgtacactgctgatggcactttctacgttgcacttgaccctcttgaacttagtctcaacttctctagtgtcaaaattctgtgttttcagatgactgtgaatttgcacacaagcaacctcgttttgctgcttattgacacgtttctaaaccgtctggtaaaacaattctttcctctgcatttacgacgagttttcgttttcattaatgtgttgaacctgaggtctttttgtgatgttgctttgcagaaatttccattgttcaggttctcttacttcatcttatggacaggatgtttcgttcttttccagtggattctccacatgtttatctccgttgggtaaaactcttctctgtcatcttttgtatgttacacttaccgtcttgattaatcttacacttgtattcctcgattgacttaggtggccatatccatttctcaacctgtcattagacatggctccagtgtggtaagccttgaaaacatttacatactagacactagtcaggattggtttatatcataatgtttcattccttagaatgattacgcctatccttaatattttaattcatgcatctgcaggtatttgttggtggcactcctgcatcttccttcttatggcctctttgcattaatcgtcaaaatcaaatacaaactcatttcttgaagtcatttcgaatccaagagtttctgccccgtaagagtcagtgctcaagggttacaacaatcaaagaaacaattttttaccccatatgtctaaaatcttcaaaacagatcattgtaaacgccacaacatttcaatgcataaactatttacttccgatccaattcgcatatcgcaatgaaccatttcgtaaatttttcgctacccgaattgatttcagctcgaaccaaatcgaaagaactaaccatagcaacagaatatagtgcaatctttgccaaaagtgtatgaacttaatcaaaaaccgaaccaaaccaaaccgaaaacccgaaaattcaaggttttagaattgaagatttgagtgagacttgagaagccaagtctggctctcctagtctcaagagacccttactcaaaacctcagcgacatactcatcagcctcccatgactcagacccccaaccactttccctcatcaaggtataaaccctaaccaccgactctctcctctcagctccaaccacagccctaatcaacttagctaaagccttatcatcacttctttgatcaattccatcaatttcaccaataagacgatctatctcatcgaactctttattcctcgtaagagcattaacaatgtctgcgtatagaacaaggtcaagaggaggatactctgtacggagagtggagagtacatggacagcgagtgtgcaatagtcttgacggagaagctcacggaggacggagatgagatcggattttatgagacggcggagaggacggagggtaagggagagggagacaccggttcgatgagctcgtttgagagattggattgattggattgcttcggtgcttaggattcggcctttgagaagtggtccgcggttgtctcgtggaccgcatcggatcgaaacgaacgttctcttaggaacgatgacgctaagggtatggctatggctaaggcttggtggtcgagtctggctgagagaaagcgccattattaatcacaccaatctttacgagtgtggttgtgtgagtgagagagatggtctttcattgggcaagcccatattaatttataaaaggcccatatgtgacacaaaattaattaatttatactttctaattatgcgtcgtttatatttctgttcccgctaatttctctacacgagtctatcattacacttgcaagagcgactctatcttcttcttttttttcaaattcttgtttcgttaaaaagttaaattttataccaatttgacgactttatcttcttctttttttttcagattgtttttttttttgttaaaaagttaaattttataccaattttaatttttaacataattacaaagattacaaaatacatataaaaataatctacagaaaaataaatacaacattactactaaaaaaggtttggatcgcttctaagcaaagaaagccaagttacaaagagaaccaccgaattcgatcttgtaaaacttaagaattcgcgtgattttaccatatgacctaagtactggaatcttcatatttgttgccacaattctaactgaaatcagtcttcaaaaaatcaagatagaatgctagcaacattctatcttaaatcttatatttctttaactcgtttaattactaatatcctaaaacatttttaccttattaaaatataaatatatgatttttttacttttatttaaccttatatttattctatttcgaatttatataaaatctatttatatatataattatttaaatattaaatttagacatatattcgatactttattctatttttataataaacaaaactatgattttcatccctttttatttagcaacaaaactatgattatgtgaccaaatttactagagaaaaaagtcaacaaaagtcaaagcaagatactgtaataataacaacgaattaatttcaaaaaaagagctatcgacccaccaaccctaaaaaaccttgacgccgttttcttcttcgatcttcttcttcctccagagaaaacaacatg

SEQ ID NO: 1872 - DNA, 3000 bp, Unknown
  misc_feature (1)..( 3000): cDNA_ID_3064844_gDNA_ID_1620460_Annot_ID_157744 3000 nt of promoter + ATG
ctaatgacaaacccacaaattggtaatactggtgtcaatcctggtaagtggcagtttcgaaactttcgtatacactaggaacttatgttctcaatgtttcttattacatttgtaaatgtttgttgtagatgatgaagaatctgggcaatgctttcttactggtttggtgataagaaacctaagcattaggtaagcattttccttgatgtgtctttccattatcctccattttaatgtccctgacttcttgaattgtgaaatgttcagtacctcaaactggagatgcacgaagacacttgctgattatctaaccgaaagggacatcatgggagtttgtaagttccttgtattcaacatactatttagattgtgcatgagataaagttgcatttgaaaacatctctgattactctattttgggatgtttttgtaaacactatcagatgatcttgacactcgagcaataacccgtcggttaagagaagatggtagtcttatcggggtgttgagcacagaacagtccaaaacagatgatgaacttctgcaaatgtctcgttcatgggatatcgtaggtcagatttctcctgccatttcctgtttttggcaattataatataacacttggaatattgaactccttctgtctgcttttttgaatctttgaatctttgtaggtattgatctaataagtgatgtttcatgtaaatctccctatgaatgggttgacaaaacaaacgctgaatgggatttcaacacgaattcacgagatgggaaatcctacaaagtgagtattacttctctacttttgctcttatcgatgctttttactctctctttctatacttttcttactctctctttctatactttgtctcttgaattcaaaggttattgcttacgattttggaatcaagcaaaacatcctaagacgcctttcatcttacggatgtcaaatcactgttgttccgtccacatttccagctgccgaggcgctgaaaatgaatccagatgggattttgttcagcaacggtcctggagacccttctgctgtgccatatgctgttgagacagttaaagagcttctcggtaaagtccctgtttacggaatctgtatgggccatcagttgcttggtcaagctttggggggtaaaaccttcaagatgaagtttggtcatcatggaggaaaccacccagttcgtaacaacagaactggtcaggtggagatcagtgctcaggtaccaatacccaacctcaaaatgttccatttaattccaagcatactaccaactaaggatttgaacttccacattcaaagttcggataattatctgataaaacgactgtgctaggaacattgttacaagcttgacaaaatctaaatatggtgtatcattgtctttttttctgtaattcttggcagaatcacaactatgcggttgatccagcttcacttcccggaggcgtagaagtaacacatgtcaatctcaatgatggaagctgtgcgggtctatctttcccggaaatgaatgttatgtcactccagtaccaccctgaagcctcccctggacctcacgactctgataacggtaactgtcctctttattccagtcacttggtgaaagacacttatgcttcagtcgtactgaaaaaccagaagattaatgtgattatttttttgcttatgaatgcagcatttagagagttcatagagcttatgaagagatcgaaacaaagctcctgatcaatgagaagtactctttgtttttgtacgttgctgtttttaatcatggcacttaaattaaaaccaactgttttgttagtgataatggattggcattattgtttctttgctttgactgtattgagcaaccatccaacctataaaataagtaagattttgtaaaagtaataaagagataaagagatgtgagagtttgtgtcttttgatataagaaagctgggaaactcttgtgacttggggtcaattcttggaacatttcatgatcctccatcctagtaccctcgataaccccattggccagaatgaggttcaaatggctcaacgtaacagatgataggaactgattaacacatagcaaacaattggtgtttctaactctggctctctgaccttggagccttagagaacaaccttgccgttcttcctccaatggtccactagttgaaactaaagttgtatcaatcatttatcagtgaattaggatttactttgaatgcagttatttagaaatgaaagttatgaaaaacaaaagaatctgaagcaaaaaccggattaaaacagatctaaatttttttatcattctgtaatttgcaaagtattggctaccgccaaaaaacttgttcccttttgttttgtattacatgaccaaaagtgcgtggcgttttttgtttttgggatttttaaattttcggagagatccaaactgcgtgacgttttgtgtttcgggatctttagttttgaaatagatcaaaactgcgtgatgttttcttatatgggacgcagcgttttcggccattaactagtaattttagcttgctcttcttcacaacaacggcccttgaatttgaattccgctctctcacttgtatcttcatctctctaagagatcgttgctcttcaagtttggtctcgcgcaagcttttcatggtgatttaacggtgagatttttgtttctctgttcaattttgcttgattcgtgatcggttttaatggagtactttgtgagttccgacttgttcaatgttccgtaacttcctcacacgtttctctgaaatttcgctagcgtaatatctttctcagtttaaacttggcgaaattgagatttcaattggtgatcggagcagatgtcggattggatttatgttaatgatgtttctgatgtacggatagatttatgaagtgattgctatcggagatttaggattctgattttcacgctattggaatctgtagaaatcctcaaattagcattggtcatg

SEQ ID NO: 1873 - DNA, 3000 bp, Unknown
  misc_feature (1)..( 3000): cDNA_ID_3064832_gDNA_ID_1620460_Annot_ID_157735 3000 nt of promoter + ATG
taaatccgaaatactttaatctaacatccatataataaattagaccgtttacatacaaaacatgttaaaggaaaatattacataggtcataacaatgaagtataaaggtcatccaaacatgtcagaaaatttacacaaataatttatttgttccattgctattttcttaattgctcttctaaattttatcattggttgcaaatactatgatcttaaaaaacatgaaataattagttgaattattagcaaaataaaataaaatatagttgacacttgacaataagagtggacatcactaaaactaatcgtatatattgggttcgatgtatatgtataatgtaataagaaaataggtgtttaacaaaaataaagtaagaaagggtgtgtgtgtttttttggtgaaatgaaaggaggtgtgtagccaaaaacaaaagaagagaagaggtgcattatttctaaataaattttgatcaaataattgtgcttatgtaatgattgttgaggacatatcacacttgacttgcaatcattccgtcgacatttttctgtattatacatttcgtcaacaaccaatccacaaaaccccaacctatgataactaaatcacaaaagtacatttggttttatgggttgatacaaacttgagatcaagctaggtataaattaatctcaaaagtaatcgcaattaataggattcattcgttagttaatcgatcatatcctgtataaattttgttgtaacaaccatgcaattttctctaggatttaagctattgtcaaatttcctttcaaaataattatcgaaaatttttagttcgaaaaatttaacgtataacatcacttttaattttcattattcgtatacgctatacttacatttaaaccatttatttatttatttataaagtttatatatgtatatagagaacttaccaggttttgttatcccaattgtccaattgataattaaagtataccgacttctagttataggacttctaggtgcatgcatgatacatacatgatgcattatgcatatacatgaattcttctaaaatggatacataattaattagcacacacactatcttggcttcttcgtttcttggacgtcttggctttttttggtcgacccacattagcttattttatatacacgataagagacatacattttcattcgccaggcctgatcttatatatttatgtatagccgtatagggatatttgtatgcatgcgtattcaagtgcttcttcttttccgatctgaattggtccttctcttttcatattttcttcactttttctttcaattttctattatttttatactttctttgtacacatactatatgaagcatatctgtatacactgaaatctaatcaggaaatacgtaaagtatcgttacaagaaatacgtaaaataatgcttgccaatgattgattatcttatctaatcattggtataatctatatacgcacttgctaccaaatattgcacttatatggaatatgaagcatatatatgtttatggaaacaataatgccttggtatcatcatcacttatatatatcattttaattttgtaagtgcacttggattagaaaggatatataattatatatcaactactttgtttggtatatcttttaggtcttaatttcgttggatgattaaagttgtagctgaccaatactatgctaagtcgctaaatattttaattataggaaatataagatctataatacaaccacaagagttatccaacaaacaacaaccttttttgtgaatggtatctatattcgttgaaaatgacggtataattttaaatagaaattgattacagttttttcttttctttgttatgcactatagaaacttttttttttttttggattcaagcatgtggctcaaccatcagggtatgtcaaattttttgaatgaacacatcaactaattaaaagaacgtaaaagttaataactatttttcagaaatgtaaacagtaaaatcaagacgttaacagttaaattcaatcaagcaaaatgacagtacacatgtcggatttgctcagatcctcaatagttctgatgttcttgtaagtttgtatcccaaaactttctgaaatttagtttaaacaatatatttaagtggtccaaagacttcacaaacattttttttttacggaataataaaacgtggaaaggtcaaaggtaaataaataatactaatagcttactaattaaggtttatcattagttttaaataaataatactaatagcttactaattaaggtttatcattagtttctttataaaatggttcggactcctgagggtatatggctgtaccttaatttaaatacatgaaagtattggtttactatcatttgattttctttcattgttaaattatctcatatattcttaagttacataataaaagagtattttttcatgacaaattatcgcttttatattttacatacttactgaaccgtatcatatcacatatataaacaatattatatactaatggctcgtttaatttttttctttttaataaattagttgacaaaaattataaattagttttttaaaatttaatagaaaatacgttatgctgtcaaaattaaaaataagatagaaaatatgttgtatatttagttatttactaaaagcaattgaatggagtaaaatttgccacggtcagagttattctttcttaagttcactattttaggtcctcaattaattgaggccaatttgtctttttgtaatctcattatattcatcttctttctctttctcatcgcaccaaaaatgccttttgcccctctctctctatatccaacccatgtctcctctttatctctctaactttccccttagagagattcctctttctctcaaactagggtttcctctctgaaaacaacaaaaatatcccaataattgcaaaatctacttgaagatttttcattctcctttcttataatta

SEQ ID NO: 1874 - DNA, 3000 bp, Unknown
  misc_feature (1)..( 3000): cDNA_ID_3064860_gDNA_ID_1620460_Annot_ID_157734 3000 nt of promoter + ATG
acgtcacggtgatgcgcctcatcagcacgaaccaccatgacaacatcacgaagcgttgcatcagcttcaagcctccagtaatcaacagcgatagccggtgcaggaacattttcgatgttaccgttatcgagttctttgagaaactcagtgtaagaatgtattgcttcttcctcaaggtatccaaccatacgatgagcaaacttgggagagattatgtatccgattaaataagcgttgaagaaaaccccttgaacagagatcacaagagctcgttcgtaccatttgggtttcgctacttccatgaatgtcattaagtgcattctctcattctctgcttcttcgagaagggctttgatccaacccccactttgttcgaaacgcctgagagatttgaagtgcataagcatccctccaaccattcctggaaccgctgcaaccgtctctagcataatcgctcggcaaccatacctcctctgcgttaagtcattgccaagaattagtccatactaaaatcttctaaaaatgatagctagctaccaaatcttctaaaacagttttcactagttaaagacttagttagcggttggaacaatagaaacctaagagtgtacctggaagaaaagatcggtaggccatcgaagagatttaaccatccaataagctattttgtccggtaaagttgaaggaacatgatgcttcttcaaatctatcgttagatcagctttataagtctcccatggctaccattattcgacaaaaacacaaaaaatacttataaatcgaccaagagtaagtaacaagacaccaaaacatgtagtaaaaatatgctatgtacccgaaagcaactccatttccattcagttccatcttctttggtgattttcattggcttcacgccccaataactaactattaattgttcccctttgttaccttgatcattaaccttgacgccgtcaccggatccttcctcttcttccgatgttttcttcttttcaaatgtcatcttgctgaaatctctcagacctcccactgccggaaccctaaaatatttcgctggagcaagttggtgaaatagaattccattaatggatgtcgcttgctttgatgcgtcaaggagagagcgacggagtaatgtagtgatcatttttcggattcaagggagatttgttttggtttttgttgataaggaaaacgtaaaaccctaaagtttggggaatcaggggattaaagaggagaagaagaagacaaaatagttctttaacaagaacagtgtggacgatgtcaaaacattaactgaagatatgtgtccaactagctcattaggccttcaatatagcccatgcgcataaggcccattgggtctttccactattgagaagaaaactttactcgagagatacacagtgaaagggtttgttttttttagacagaaacattgttcttggtgataatttgtttagtttgtgggttttgttagcttccaaggatcctatcggatcgggaagtcgtgaagatcatttgtccgagtgaaactgttggtcgttatgttaccttggagataacttgggaagcaaatcaaccataagagtatgtaaaaaatgattatgacttgagaacacacacaaaataaaaaccaaactcagaaactctttttatatctttttacattaacggcgttgtataaacaccaactcgaaatctgaaggaggcacaaagtactctatacgaatattgttctgacatttcaacaccggtgggcgtttccttggagccgccggacactccggagtctttgctcctctcgccgtgggagtgatacaaattccatcttctgattctctctcaggcttaatgagtttcgtcttcaccggctttagtgaagcccgaatcgatgttttggcgaagataaacttttttccatcggtgtctaattctctgctaacttgagattttttcgaaattcccatttaaaacagttggagattgagactagtacaatgttttgaagatgaggaaacaagaaaaagaaaaacaaagaaggaagaagggataagtgtaaagtaggtgaaagagtttcttcttcttaaaggaaagagttttgccttttcaatttggttgcttccccaggaattaaaagagaatgaagctttcagaggaagattattaggtgcaagtagaggaaagggtacaattggaaatgataataatgttcagcccgggaaagctacgggtagtcaataatctttctttttaatatttggcgccatggttttgagactattttaataacagtggttcctaattttttatttttttttggttaatcagtgttcggttttaaaaatactaccgaaattaaattacctgaaaaagtatttggtttgatttgatttagttatcggttcgttttagttatcgattttagaagaattttggtatttttttcataaattttgatataatcaggtttattttgataaattctataaaaatgacatcaaattttgttttaatgataaaaattagttcaattaacataataaacttaaaaaataaatgggaaaaatgttaaaaaaaaatcacgaatttttaaatttggaacgatttaattttgaattttccggaagacaaatagatcgtaaacgttttgttgactttcgaaataaatgacatgtaaagtcatttatttaatacatgatctccaaaccaaatgggccatcatatatgggccttacaataacttaaaatgtatctttgaagatgaacttaaatgagtctttctctattcctctcagcataagaggtcaaacaaaaacattttcgattttggggaaaaattaattttcccgcgtcaaatgagagaccacaccgcccaaaaaatccagtatcccgccggattcaggtaataaactttttctccaccggcaaatatcaaaccataaactcatatctctccgccgcttctctctttacctcgattgcttcagagactctccg

SEQ ID NO: 1875 - DNA, 3000 bp, Unknown
  misc_feature (1)..( 3000): cDNA_ID_3064889_gDNA_ID_1620461_Annot_ID_157761 3000 nt of promoter + ATG
atgataatgagagcacaatgagcagtaaaattcagcagcaacaggatcatcacaacatgataaaggatgatcatgaaacggaaaggtgactacttcgacatcagtagaagacatttttttctaataaaaattataagaacaaaaagagagaaagcagttgagtttcagtttcattggaactcatttaatggtaattggcgcatactgccagctaatcgaaaataaaaaataaacaaaccaactaatagtaataacaataagatatgacctcagtccccagtcatttaaatacgatctagacagagttgtaatgtgccaaagtcgtcgcattcttaagaattcttcttctttatttttatttattgtcgacatcgtgcctacaacttcagattaccaaagtcgtcgcctcttgttcagaattttaaaaaaaaaaataaaaaaataccaaactgaaatattttttttttctttttttttaaattttaaatttccattaaaagagaaatatacaatgccaaatggctaaaaaggctcgcaggcctgaacattacacggcaaaagcccaacacaggttcgtaggccccaaaagaaacagaggaagagaagaaggagaaaaggaaacagagacttacccgaacaacctaaaccaggttgagagaactgaagatcccggtctggctaaccgctgggctctagcgatcggatctaggcgagctttcaagataaccaaattgaaataatttaattatctggtttaatttatagctgatgatggcgatctgtcgacattttggtagatctatctacgaatctcccttgcaaacattctgatttttgagtagggaagatttgactttcaaatatttttgagtagggaagatttaactcttatcgattttcaaaaaaattatacgtgtttttgccactgtccacaaacacaccgttaacgaacggttgtggttagatacgatatgcaccaatcataaataatcgttacatctcatttcataaatgtttataacacattgaaattattaaaatgaactcatgacttcacaagttcaattaaattttgttcaaacttatcaatataaccatctgaaaaaccagagtcagtcaaaacacatctccacttgtcatgattcttcctcactttctcaccgatctcactaccttcctccatcacactcttcacagcattctccaagctttgccgcgagaaccaccctttcttttccctctccacttcaaccgccacctccatctcctccgtcatcagccttgcgttcaaaatctgttctccgtgctgcggaaccaaaacgatctgacaatcactcatcaacgactcccacatcgacccaaacccgcaatggctaacaaaacaacccactgaaggatggttcaacaccaacggttgctgaatccaacctccaaacacaacgccacgtccttgaaccctctctttgaatccttccggtaaggcttcctcgacggttgatacacccgaaggaggcttaatggcaaccagaaacggaaaaccagttgattctagacctaaacagagttcttgaaactgatctatcttgtttacaacgggttggctaccgaaagcgcagaacacaaccgaaccgtggttgaatttggctagccactccgcccattgaggatctaaggagggctgattaggttgggatccagggagaaccggtcctgttaggtaaaccggtttactgtactgcctacttatgtaatcgcagaatttgccttctgtctcacggcaagtccttatagcgattgcgtcgcagtttctcatcgcggtaactttcccatcaaagaaagagccaatcgcctcgtgcttcctccacacgaaactcagggattttgcttcgtgcggacgtaagactactttcgaagatgggtaacctagaggcgtcttagctaactcctcccctgacatttccttgccatcaatgacctctctctccgcagaagggacaagagacagtgcgattgacgcagcgctaacgatgttgaagcaaacggttttagcaccgatcggtttagcaatttccggtatccaatgggcagaatcatagaaaaccaagtccggtttgattgtacggaaaatggtctcgacctctggccgggtttggtccattgcaactgcaagcaaatgtgtcaagaagaaagggacgtcggagtttgtctccgcacccggagggagccctttgacctgagggatagagatggtgtggaaagtgatgagatttgggtagagattaagaggttcaagctggtttagtgctttcttgggaagcaagaaaacaatcttgtgacctttctctgcgagcttgttggataggtgaagaaaaggagtcatgtgaccaaaggctaaccacggatacatcacaatactcatgcttgacgattcattcgatccaaaaacacccattttcttggactctcttgtatttcactttaactaccggaagatccttattagactttttttgttctcttttgttaatttctaagttgtgtgttggatgtgtataaatacataaacctttaacggatcagattggtgagtgtcctgatgaatggtgtgtggttattgggtaaccaaatgaccgggcaagtgtaacctcctggtaagtgcaaacacgtgatggtatcgtaacatcaacaaaagcaaaaccagacttcacgtggtaattgatgggcctgaaatattcggccccctttttaagcaaattaatagactctatttaaaagtcgttatttgttcgttacgcttaataatcccacagtcaacgttttatgtcttaattcaaaggttgtttacgaacgattgtcaaagtggtaactctcgtaattaatataacgtttctttacatattacccctataaattgtttgtttattttgataccaaaagcatcacaattaaacagtcgactaatcttcatagaaaacaaaagaaaagatcactagagtcact

SEQ ID NO: 1876 - DNA, 3000 bp, Unknown
  misc_feature (1)..( 3000): cDNA_ID_2146145_gDNA_ID_1620461_Annot_ID_157768 3000 nt of promoter + ATG
cgatgatgcatttttgggtgtttattgtgcagtttgatgagcaaaaggatcaagtagcagtggagcaggttcttcgggtcatttttattgatgcggaccgcccaagtgctgtaagctattcatgctgataagaccacatacagtctaaattctatagtttgaacatttcataaggagaattacgatgtaatgaatcaggcattggagaaactgaaacgtcaattggatgaagctgaagctgcagttgaagcaagaaagaagcctcccccagagacagggcctcgagttgtcggggagggtcttgtcatagacgaatgggtaacatataattataagatctttggtccgtttattgttgttccttctttctcccatatattcaccaaagtttgtgtcatctatcagaaggagagaagagagaagtaccttgctcggcaacaagtcgaatccgtagattctttgtcctaaacgcagagagcaatgtggacttgttctgcagatcatgtacataatttattatccctcgattatgtatttatctctagacgattactttgtggttcttgtatgtctctgtttgttgtgtgattcatgccggttttttctccttcatcaaattttgtttcggtcgtttttagttgatctagaatcgaaccagagtttgttcagtatttagttacaaatgaaaaatcctgttataccattcgttaaacgtttcttagaaatgagtcattaaggttagaataagaatgatggttttgtggacaattataaagtttccccaaccatgatcaatttgattggaacatttcacaaaccaaagtacaaatttgttttggatgataggctaccattttctgatatgtcaattgtcaccatgtttatttttagttttaaagtggtttttttattttgatcagactctaaactaaaggtccacaagagtgacctataaaagactgatacccactaatacaaaaaaaagacttatacccaagtactgagattgatgtgttgctacttttgctccttgcattcagaaactacgatattctctactggcccaaataattagtggacttacgtaactgagtactttgaggacacaattatagaaaacgttattgcatttagtttcagctggttaagctagtctgtcatataatctttcttcttactgtaatgaaaacaataataataactttactaattttctactaataattatgagattaactgaataagaatagccgccaaagagaacgagaaataattaagaatattttggtcttaaaactttgaaaacacgtaactcttaaccattttttcgtctttgtacgctgaaatctaagtcagaagattcaatgtaagtatatttaactagcattcgaaatatgatcatatttgtttgtaaatggtatactttatagacaatcaaatcacttgtatgaaatgagaatatgagatataagtaagattcacgtggtatataaaatttggaacaaattatgcttaattagaagcacacaaaaatctaaagttagatatgttttatttcgttattagaatatttttattcggaaaaaaggggaaataaaatcgactcgtggagattatgaaggaacaaagacaactagaggtgtcttttgatttccatgtcgctttatgaaagctttcggccaaattgcacaatcaacaaattcgacaatccttatctctctctctctcttttttaacctcaaatttagtcttatcaaaggacataagaatatatttttgtatcaaacttgaaaacatcacttaaaataaaacaaaataaattattaaaatatcactaaaatgaagaagagagataacttatatatacttttaccaaatatatatctaatgtaagattctgaaattgagtcatttttatctcagcaaaatcatttcataacccgggcgaataaagtgtgtgtttagtattacgtgcttgaaacgtaactagatcattaagctaagacttgtagaacacgtacatgcatcataattcataaatgattagtttaagaataatcaacatatggttaataaattggtaaaacaatattagaaaaaagagaaaaactaccgtttaaggtagttttccattatttgcaaagcatatatacaatatatcatttcatttcattatggaacataagtgttcaatactcgtcttaacacaatttaagaagaagaaaaaaagactaacaaatgaaaagcttagtgactgtgtcactgtctcttaacccgtcactaatctgttgcaacttctttaatcctataacaaagaaactgtttttaatccgaaaacttcaactatataaaccggcacaaaaaaaccgtcatcaatcaaaacaaattacttaaacaaagatctcgacaacaacgtctacaacgcataattatgtccatgcattgttttttccttttcacaaaaagataacaataaactaaaataaaaactttactattacaacaaatcgtatctcaatttcatgaagagatggccgaaaggaataaaaacatggacccacccgcccatcgaatcgtgcgttacgcgaaagcaaaatattcattaccattaaaaacaatatttatcaacccctttttaaaaatgtaacgaacaaattcaggaaataaaatatttatattcctaatacaaagtgcttcaccaccataaacacacattcactacatgcacaagcacgtatatatataaatgttcatgaaggaagaagctttaacagagagaacaactaaaatagcctaagcctcaaatttaatcgctatttagtttctaattttgggttaaaagaaattcgggtttcaattaattcgaaagagcggtcacgacgtttcttagagaatcgtcttcttcatcttcttcgtgaactttttgttttctcctttttttgattttcaccgccggagatttttgtatttttccgattattcgccggcggtttagagata

SEQ ID NO: 1877 - DNA, 3000 bp, Unknown
  misc_feature (1)..( 3000): cDNA_ID_2146123_gDNA_ID_1620461_Annot_ID_157763 3000 nt of promoter + ATG
acataagcttttatcatgggagttcatctcaagtttggatattgaggtttgtttataaggatcttgttttagctaccaacagattctcagcccagaggaagcttggtgaaggagggtttggggcagtttatagatggtacttgaacgaaatagatatgatggttgctgtgaagaaattgtctggtggttccaagcagtgaaagaaagagtttgtaaccgaagttaagatcattagcaaactgcgtcatcgaaacctggtgcagcccattgtgttggtgtaatgaaaaagatgagtatttgcttatataggagttcatgccgaatggtagcttggacactcacctctttgagaaaagaccccttatctcacctaggacacacagatcttcacggagagggagatcggtgtgtgttgcatagggacatcaaggcaagcaatatcatgttggacatcaatttcaatgtaaaagtaggtgactttgggctggctcgattgatggaccatgaactaggctcacatacaatagcgctagcaggaaattacataattgtcaaagacttttgtctgtgtgtggacatgtgtagggcaagtgaaccacgttttattgaaattcaaattcaagataatccaatcaagtttgacaaaagagaaacaaaaagatagggcaaaaaaagccagcacttaactaggatatgaaatccaaaacataaatagtcaaaaacagaaaagaagataggtgcaagcgagctacactggaatcattaatggaagtactgaatactgaaaattcaaaacaacgaacttgttgtccaagtgactccagtagagtttcagaacatcgccttctgagagatctaacgaatgcttcatagtactccaaccagtaccgaaataatatttaggtttatcgatacctgatactttgagcgtaactgtgtataagtcgtcttccattatgtcgtcgacttgcacttcaacaccgtttagcaaatcttggtcgttaacattcatcctcgtgaggacagacatcacttctgctttcggtaataccacattaccaacgatatcactctttgatagcacttttgttatgatcatagccggttccaatggatcgttgtaattcatcttgcttaattttttttatatttcttacgttctctattcaaacatatatataggagatttagcctaagaaaaaaggtaaaatacaaaagagaaaaaatcagaactctttttgaaacaaattagaaaattgtctaaatatctagatttctcttaatatggaattggaaagtaaactttttgcaaaatattagatttagataactttcacttggtaaattgagaataaagttttgtgcaaattattgatttagatcatttccatttctattctcaatctctttttgagcgttccaaccaattacattgctgccccgaaccaatataatatttacaatagtatcatagccggctccaatggatcgttgtaatccattatggaccgcccaacttcagcccacaaaagaaattgtccacacgaaaacgctcaataatctataaacggaccatttgacatatttaagtgttttgcaagcccaaagtaatcatattcactcaacaaaaagtataaaaaatctgaaatttaatttaggtcgttgctaagcttgttgtagggtacgtacgtttgggagcattttaattagaataagattagaaatttagaatagttttaatcctccgaaactttttgtagtacggacttttgggagcatttttatgagtcgtgccaatcttgcaaaaggacccatgcagagcaacaaatttggttgtggcatgtcggttaggtagcccaaaagcttcattttatattagttataaactttgctgttatatagttagtaaagtttagtcagtaaagtagactgttacttcttttagtactttgaatacatcttatttactacaatgttaacagtcaacatggtataaattctattccatgttttgtttcaaaggttgacataacggacgaattttaaaatgtaactattgtaataaacagtaatgagtattaacttgagttactctatacaattgtttgtttcttgtgataaccaaagccatcacaatcaaacatttcactcttaaaacaaggaaacagtaagtgcaatggaaggtaggatccaagtgcttctctcgcaacgattgtttggttgattctcgtaaaaatgtgagtatatgaaagaggaagttagaccgatgcaatggttgcaatgtgagcatagtcgaatttcacctgccatggtgtttcttcctttttcatcttcccaccggattcactcaaggctcgtcgtttaatccattatcgcctatgtaaccgtcgcttcttcacctgcggccacaaccaatgcaaccgctataacaagtttgtttttgatctctttatcgaccattaagtctctttatatattccttaaaactctatattgcattttgattttctagtgcgtataacattgacgttacagtaaaaatttctagttttaatattcacaagcatggctgctatttcaattcaatataagttttatcatcgtctacaataatatatgaattttatcatcatatagaagaataacagagctctgatcacagactcacagccctgtaactctagctaacaaaattatcttttaactctcttctttattaaaaaaaaagcacttgcatagtagcattttaactgatgtatatgctttccctaagcgacacttgtcctcatgcatgaaatcaaattcaatggacgaccgattcatcttgaccgaccacaaagatccaacggctagctggagatatacaggtgttaataaattgttatattccaaaaaaatgggttataatgtggcagctttttgatagtaacactgatgtatttcttacaataaacgaccaaaaagttaatacaagaaatagaaacggtgtaggaagctact

SEQ ID NO: 1878 - DNA, 3000 bp, Unknown
  misc_feature (1)..( 3000): cDNA_ID_2146129_gDNA_ID_1620461_Annot_ID_157765 3000 nt of promoter + ATG
aagtcctctcaccaggtctttttttaagctttacgatttcgtaaatacattctgtgaaatttgaacggatttgacttcagattttgtataggaagcttacgattgatttcgttttgttttgtagctaccaaatcaataaaccttcgccgtcaaaatccttcacttccaggcttctccaccaatcctcctccgccggtactcctccgcaacaacttttcggcgcccgtagcttctcatctcccagcagtgatttcaacaggtattttagttttcgttaaacgcattttgaaatttcgatttgacttcagatttttttagtagaaaccttatggatttgatcggttaggcttaaacggatcttcgctgaaattatttttttgtagctaccacattaatccgccgtctaactggggaatccgaatcgtgccggagaggaaagcttgtgtgattgagcggtttggtaaattccacacgactttgccggcggggattcacttccttgttccgtttgtggatcgtatcgcttatgttcattctctaaaggaagaagcgattcctattggtaatcagactgcgattacaaaggataacgttagcatccacatcgatggtgttctctacgttaaggttattatcttcgtttcagattccagttttgtatacagtttcctgtttgcttttgttgatatgtcattgtcttgaaatttttttgcagattgtggatcctaagttggcttcttatggcgttgagaatccgatctatgctgttatgcagttggctcagactacaatgcgtagtgagctcggtaaaattactcttgacaagacttttgaggaacgggacactctcaatgagaagattgtggtatgttctctctctctatggcttgagtttcgtttcattttgaaaactgggattctttgatgttcatggtcagtgatgttaatgtgaaatttgtagttcagattgtttaattgtgttgttcatttcacgatagctggctatataagttttgttagataagagtattgtagtgtatgtgttgtggaatgtattatgcttttgtagtgtatgtgttggatattggaagtatctgaacattttgaaatggacatgttcttgcaggaagccatcaatgttgctgcaaaagattggggtcttcagtgccttcgttatgagatcagtgagttatttttctgttgactctttgctggtgttagctagatacccttttggccttgtatctaatacatgtatatccaggggatatcatgcctcctaatggagtgagagttgctatggaaatgcaagctgaagctgaacgtaaaaagagagcccagattcttgagtctgaaggtaaaattgcttgaaagtatatgttctgggattgaactatgtgcttgctacagctcatttcgttcagattcttggctcaatttgattctcataatctgctgtactgactttaacaggagaacgtcaagcccatatcaatagagctgatggtaagaaaagttctgtaatcttggaatcagaagctgcaatgatggaccaagtcaatcgtgcacaaggttagtatttagtaagcatttaagattgaaaaacatgaaatcatcataataagatgtggagccattcgtctgttaacctcatatcataactgactcagtatgtttcaccataacatttttatgtatttgttctgttgctatccaggtgaggctgaagcaatattagctagagcacaagcaacagccaagggactggccatggtatctcaatccctcaaggaagctggtggagaggaggtgatttcctgaattatgagatcaatgaattaactattacttaggcgttaatactgttttatcaaatttggatgtgttagtgctacttaacccttcacatgtgaatgcaatgaatgattccctctagatgctgcataaagatttgagttgtttattggaattgcaaatgttgactctttaagtttatttgtttttgctttccaaaagagaacctcatatgcttaatggtggtgtgatatgcaggctgcgagtttgagagttgcggagcaatacattcaagcttttggcaaaattgctaaggaggtaaacacatcatttacttgatcccatttacttttctaatctcgtccttccttgggatttatctaatagagttgtatttttttgttcttgttagggtacaacaatgctgcttccgagtaatgtcgacaatcctgctagcatgatcgctcaagctttaggaatgtacaaagggttgtcaacaaaggtcccaacagtggtttcagggaaacttctggagtagaatcctctactaacgtggttgttgccaaacttgaatagaagctataatgtagctgaacctagggaacaactattcttttgatttgtccaggctttttagccattttcagtttgtttatttcttcatatgagaaacagttatcttaccatataaccattttgcaaactagaaaacagatctaatctcaaatttctgacagagtttttgcaccagatttggtcttctaagtgttggctcttgttatctttatatcaatatccaaattttgttatgtttgcttttgctattttgttgctattgtcttgaatcgaattggcacagaaagagtatctggctaaaaccaaaaacgcaagagcggttgagaataaggtttggttgttctcctgatgaataggtcgttgacagagaagagccttaaagaacctaaggtgacatgaaatttttagcccttttcctgaaatagctttgtgttgtgttgtgttggtacgaaccactatatatatctcttttgtgtcttcacctacatttgctcagcctctaataaggagaaaaaagaaacaaacagttttggcttcttgaaaggaatcagaatcttttagctccacagttcttcccattgtgtaaatttgttttcgtttcaaaccgatttctttctattaaacaccatg

SEQ ID NO: 1879 - DNA, 3000 bp, Unknown
  misc_feature (1)..( 3000): cDNA_ID_3064934_gDNA_ID_1620462_Annot_ID_157777 3000 nt of promoter + ATG
gatcgaagttcatatcctttaaccgcgtcgatggcgcgtttgagagagacgagtgtagggttaggaaggtcaaatgaaagcggagaagatgaaattgagagtgacgagagctttgaggatgataagagagaagaaagagaagaaaagaagaatttgaaagagaagagagaagcagataaaggaggaaataagagaagcttctcggcggcggagatcacgacggctaggtattgctccgaattgggtttgatcagaagcggattaagatctatcaaaagcacaaaacgctgcgttttggcgtataacaaatctccagccattgaaatgaagcagagagagagaagattcgattttggttttgaggttgaagaagagaggagggagtgagctacgaggttatgtttttggcgggaaacatattgccacgtcattagattgtcaatttattgggtcttgcttactactacatcataaggccattaatggcccaacaagagttttaatttggtgacgtggcaaaattgaagatagaacaaagattacgaaaacttcctccgcttcagatttttcctttctgcaagaattttcctgggaaaatcaggaattttctcggagaaaattctcgtaatcatgaactgtgtttctgcatttgaatttgttccttcaagtgctctatttccatgtgcacaatcatcaatccctgcgaaatttcttcacattttgagctcaaaagcctcgatttctcccagatgtcgtagtttcgcttcttcttcttcttccacaattcggaggaagcctctaactctagtatcttcaaaatcttcagacgcggaggaggtgtcagatacggaggacgaatggctgaagaagctaccagagaagaacaagccactgtattcgcatagcttaccttgtatcgaagcgtggctgaggaaattagggttttaccaaagtaaagacgatagagctgtttggttgattcagaaacctgattggcatgctcaactatctcttgatgtcactgatctctgcattaggtatgaagctgattgcttttgtagtttcattgagttcctgaagttctcagctctgagatgttgttgataaattcctgtttttagtatcctaaatgaatgatttcttaactagtttaagtgtttgtgattgtgtagttaaagctagttgtgttaacaatgaggatattgatgttgagaagaagagtttgtttttagcttggataagtataaaagtatagcatagtgtgatgaattaacctcttgaagatgattgtgaagtgaatcctagttcagtatttgtagtgcggaaccgattgttatgcggttggttgcatccgctgttggtgctatctaatcttgatgttttagtccaaggagttgagaattagaagctaatttaatgtctctgtgtatcaatccaacagaccaaataagttgatgcattgccatgttctctgatcatttcctttggagtttctctatgtgtaatcccgccaagttggactaactagattgcttgttatgtaggtacatgaaaagtgggccgggaaatctagagagagacatggaaagaaggtttagctatgcgttgagtagagaagataccgagaatgccatacttggaggaccttaaagaataaaaagagtttgtttgagtatctttgttcttaaactttgctttttcagtagtttctcgttatatgatgcatttgcttgtttgatccgaaaaccatttttatcacaattctttagcaggtacggtctttcaaaacttgaacaatgaatgtgaaaattatacgcatttggaaccagtaggtagataatcttactgcatcccacatgaagaacctatgcattatctaagctattactaatatgtgaaatttggtgtgtaggcatcggtgactttatttactgatgcataactttcacatcttctgtttcaaacctttagcaagactacatttacgttagtcaactcaaagtaatgagagaaaattaatacatcaaacttaaacatgagttacatattgaacacagaattaaaagtgatatgttactcttgatttatcaaataaagccttgtttcctgatactataaattctaagtttcttccgatatccaaaaccatcccaagcatctaagtctaacataaaaccaaaaagaaagaaagaaatacgtagaaaaaggattaacaagaaagatggcaaccaaaacttttctctcaatctctttaatggtttccctttgtgctgccatttttgtctctcaaggagtagctcatatgcaaacaccaccaacggttccaggacttctcctacctggcttacctattgatcttgtaaaatgttggtcgtctctcttcaatgttgaaggatgtgtgctcgagatcgccaaatcaattttctctggaaaattcgaaaatgtcgaagccgcatgttgcaaggcgttttcaaccttagatgctaactgttggccccatatgtttccgttgaatccatttttccctcctctcctcaaggacaactgcgctcgcattgtccccaactcccctacacacaactaagaacaagaattattgctggtctacgcttttaaattagtcattagctccaaagtctaataagtttcaatgtttattttgttagcaaaatgtgaactatatcttggaagagttctctttttatagtttttctcaatgacataaaatttcaatattttccttttatataataactcttataaatgtgttttgttggttgcacaaaagaaaaacattggaaccgaccaaaaaaaaaaaacattggaaccgaccaaaaaaaaaaacattggaaaatcgtacctcaaaatgcaataaccaaacaaaccttctcatatggatcctatagtatggttatttccggtttagttggttcggttctgtaccgaaattatatcgagcgttttaacgttatccagaacgaagcagagtaacgaagagtc

SEQ ID NO: 1880 - DNA, 3000 bp, Unknown
  misc_feature (1)..( 3000): cDNA_ID_3064922_gDNA_ID_1620462_Annot_ID_157784 3000 nt of promoter + ATG
attcaatcaaaatcatttaaaatgaatatattagccgaaaactaattcacttaacgatacgctgcattatgtaaacattttgtaagaatgagatttctctaaatcaaaaatttttaaattgttcaatgagataccttaaccgatcggttcaataaaatcttcgtaatttctgtacgaaaagttgtacaaatcaaacaatcaaacgtccaccatttttaaaaattacattgtttcactgctaatttgggtctttgcccctactagtttgcctaatacaaccaaaacatcctaaagattttaaaaagagggacaaaggttaaagtgcaaatattttaagaagcaatatttttggggaggaacaaaaagaattaaagagaaggtttagttaaggagattaagacaaaagatgagagattaagataataaggaggacagggtcgcacgtgcaacaccgaaatcttcgaccagagaaacgttatgaatcaaaagatgctgcgcacgtgcctcctcggtcaaagatatagagatatcagataccattgctaataccccttggattcaattttctactgatggtaatttctgatttgtaaaacttgaaattctggtactagattatgatatttctgtgtttacatttatgtagtttagaagtacaatgtttcttcagtttagatcttattcaaaatagacaaatctaattaagcattgcttgccttatttttgatgacgagatttaattcaagttaacgaataatgtttactgaatatttgcttcatatacgagcaggacccatcaagagaactagtttaattttctcaaaggtgcatggggtgtttaatttttgtttgtgtgtacttgtaatattaattaaccagcaaatctgtgtttttttcttcttcttatatatgaactagtttaattttttttccttccccctcagatgcaatggaagaagactagagtgtgtgtgtgtttgccaatcatggagagacggttttgctagccaaagctttgaacagttcagcgaccatctcaagtctagagatcatatataatgaaagtaatcatatcattgatgacttgctctcttgcttgtattatatcatcaatataatgtacatttctcactgggcctaaactacactactaagactagttaagtagtagtgtagtactaatcatgatcattttcaaatcataagttgacgaagactttttttatctacattggcattcatatcaaaagctcttttgtgtaatccgatcgtatattttttgtggttaaccgttaacctcgcctgatcattttgagagtggtagttagaaactttcagacgagtcaagttatcaacaaaaacaaaacagtagtagaaagcaaaggccattggaaaagtgaagataatttcattgggctattaatgggccggatcagtagcccattatccacgaccggtgggaggaattcgaactctagttgccgtcttctctgttcatctagttattaaaaaaaagaatggtactctggcaattacataaaaaagttcccagctttacagatttcgaaacaaaaaaaaagcttgattggttcttgaagtaagatcccaagaaagagagaagcttttgtatttgcatagttgtcatgatgaccttttatactaaactatgcctttcttcctcaccaattcaacactttacttacagaggtacttcagttttgttatccttttcttcttctatataaattttcaaattgtttaaacactgacccagctgcttgatttgtctctgttataatatactgaatcttctttgattttcactgtttgattggggtaaaaagtttagaatttagaatgagtgatgggtgatttgttttttcagcaatggaatgatatagttctcaagttgtttgtaataatgactcaaagaagaagtctttttgttacaacaacaaaagaaaattcaggatttcttatgtaaaattacaacaaaaatgtaaaggtgttagttaatgtcgatagtgaaatggaatgattgaatttacatggtccactttgaatatctctaatcatttctgtggtttcaatttctttcatatccaaatcatcgatcacttcataacagcttgatgaagagtatttatgtcgttgatacagtttttacccaaatgggaaagataaaaactcttttcatattgctgtgtaaccttttaccttttgagtttaaaaagtttccttttttatgttttcaattcaaaactataacattagtggtaatttgattatgtatttctcagtaataaagattggattttactttaaaacctagttaagttattgtttgtttgatggcttttgttgacaattattagtttgatcttgttctcagtaacaaacaatgggtagaaaaatgaattggagataaacaaaaatgaagcgattattggaatgaaaaagtaagagcaagtggggacgtgttaaggggcctttgtgttaacataaaaccaggagaagcatacatttcttgctttatctacctgtaaggatgatgatctcttacatgattctttcaatgtgtttttacatgtgtgtcagatctttcttttattcaccaaactttattcctctctgccatttccatctggaaaaataaaaagctcatgtaactcccactcaacaatataacatgctataccacatgtactttgcagttttcttgtgcttagacttgcaatttcactcaacctttttttaatgcttgcttaagatctcaggcatcctctgttttttttttttttttttggtaccatcttgaaccattttggcttttgccttggatgttttgctgattctttgctttctatttcactttgatttttggttttcctatcagatggatgatagtaggcaaaacgcttcttgagattcagatttagtcatctctgctaagattgattgtgttgttgccctttgtttttttttgtaagagcaaccacc

SEQ ID NO: 1881 - DNA, 3000 bp, Unknown
  misc_feature (1)..( 3000): cDNA_ID_3064916_gDNA_ID_1620462_Annot_ID_157789 3000 nt of promoter + ATG
taatgtgtgtccaaatcaacagctgccctttgttcaggggtctttgctttcagaaaacgtatcgcaatggaaagcgatttccggtcaagctgaagcacataaaaacaacagtgcatggtactcagaattttgtatccaagtgaaacatcaccttgtgacaaatcatgacaaataagaaaacaatagtttgtcttcatgataagaaaccaaccgatatacacgtatgaacaagtcattgctaccaaagaaagaagattcaacaacaacgccacgtatatcattcaagtaccttagggaagcattcaaaacctccacctgtaacattaagcaacgccaaagaaagaacccgttcaggcgccattgcagctaacttgcaagctatcattgctcctgttaatcaaaaagccaagagagactaaataatttggctcagaaaaacaatcaatagtcacttgagtgatcaaacatattacccatagaatgaccaattatgtgagctttcttccaacccaaatgatccaacaaactaattgaatcatttgccattatcgttgttctgtaccaaaacaaaacccaaattgagtgaagaagctaacaaaaccaatttcacaggaaattgttaaaaccgagattaagaacacaaagcagagaattttaagttcttcagtaatgaaattggctcacgtgtactcagatttgtgggtaggcacagagcttcgacccataccacgattatcgaaagcgcaaacctcgatgccggaatcatcggaaacaattcctccgtcgtcgtcatcatcgtcgttgggtttatccgttcccgtcaatcccatgatttgaggaccccatgactcatgggttccggctaaacctgaacaaaattagaaaaacccaattgaaatcaagctcggaattgctaaggaaactaatcaaatgggaaagatggagattacaacagacctatgatgagaagagctttgataggaccatgaccgtacgttctgtagaagattttgattgcggcattgttaagcgtcgtctctgggccgacatcttctttcacgacctcgcaaaacggcatcgctttttttgttctcaaactctgatatctgggtgggatcagattttgaataaccggagaggagaagaggagaagaaaggaaaggacttttctatcggaagagagagagattgggtctgtggtgtggttcggttcggttttttgggtggaggttaggactgccacgtaggattggtcggctggattttattggcgggtaatatctaacaaaggtcaacggtcaaattttttacacgagaaaactatgttgtatagaaatatagcacgtgaaaaacgctagaagtagaagtagtactacgtcaatggaattcatatgcatcatatataagagaagcgataatgggtctgaacacaagtggagcattaacctaaaacaatagcaacttagaccatttgttgaagtagtcactacactattttaatctccggttcaatttgttgaactttataatgttttgctattttgatccgcgttgctttatattatattggtgtggtttcaggagaagacagatcgagacacaaaacaaggcaagatcgttactgacattttatgctggacactagataattgttcaccaggacatgtgataataaaacctccatgacttcgtggctgctttttcattatatatagtttaggtcaccatcttgtcgtagcacaacctgaaaacgcaataccttctcctgaaacggaaaatatttgttgggaagacctatcatttggaaagtacttatgcccgtcaaggctcacaatttagacgaaacgatccaccaacaacttaagctttgagtctttgaccataagtgcgagacgattttcttgtattgttaatttgttattgcttgtttttgtgaactgatccttagttttttttttcatcaaaagtgatcatttagttaaagacttaaagtgcaatgagagtttggtttctttatttttaaactcttgaaaaattaattttgtcaatgaagcaatacaaattaaattgctgaaaagggatagtaaatcgttttttgtccttacggattggtgatgaaaatggtattcaacggatgcaatacttagatgcaccaaatgatttttaccatatgctaaactttaacactaaaccaattatactttacctggtaaatattaaaaggattttttgttttccaaaaacagttttagtatatgtacttaattacataataccgcggttaataaatagttaaaaattaaattagaaaaaaacacatacgtgtctacagttttagtctcgtacataacacgaaaaatcatctaattggttacgtattaatcatatcatttttacctattagaaaaaaattatttatacatttttagtatctactaatacgttacgtgagcacaaaaattcatcttcatcagtgctaataactatgcgaaaatctgatgacgattcatttgtctaacaatttatttagcttaatacgagtttttaaagatgaagcatacccaaatttcccaagagaccaaaacgacaacgtttgggagtagctaatatcgtagttagcgcacgccactaacatcacccattgcacggtctctctctactctcaaacttcaaaaagctttggctttttagattcacaggaaagaaccctcaaaacacacaaaaagctggtgatttttgcattgcaccgattcgcctccatcgattttggacattcttgaattctccctccaagtattcctgtgaaattgaccggaaagttccttcctttttcaatttccggtaaaaaggaaagtaattgggtactgtagacttccttctagggcttgtgaactttctaatccttcagaaaaccctcgaattcgaaaaatttgctgcgagattgataaatgactagttaaagatttgaactttgatttctgggtttgcgattttattcaa

SEQ ID NO: 1882 - DNA, 3000 bp, Unknown
  misc_feature (1)..( 3000): cDNA_ID_2146182_gDNA_ID_1620462_Annot_ID_157790 3000 nt of promoter + ATG
agaggaggaggattacggtggagttagacctggtggagggagagttgtgactagattagtggtttctaggatgcatgttggttgtttgttgggtaaaggtgggaagattattgagcagatgaggattgaaactaagactcatattcggattcttccaagagaaagtaacttacctcgttgtgtttcactctctgaagagattgttcaggtctgaaaaattgctattttgagaacatatttgaaatggtgaatcttgttgagattttgatatgaaatgtagtcagtttattgaaatgctagataatttaaatgtgtgattgtgaggttgaggttgttgacaagagttgaatcactcttatgtagttagcttggtcattatttgttatgtttaagctttctttggtgttttctacctatgggaaatgcatttataatgttggttctttcagattgtaggtgaactaaatgcagtgaaaaacgctttagccattgtatcatctcgtctaagggagagtcagcatcgtgatcggagtaatttccaagggcgttcacattcaccagaacggtcgtttgcagctgcgggggatgattacatgccacagctaagaagacaatcatccgataggtttcctcgtggtaattttagaaataacaacttcagttctcgccagtccaactatgcagaagaagctccagcagttccagttggtgagaatgtctactccgaagagcttgtgttccagattctctgcccagctgacaagattgttcgggttgttggggaatcgcaaggaataattgatttgcttcagaacgagatcggcgtggacgttagagtatctgacccagttgctggatctgatgaacagataatcaccatttcttcggaagaggtactctaaataccctcagatcttcttcaatattatctgttacatttacaattgtgaacttgaagttttgtattcttactttgcttaggcacctgatgatccatttttccctgctcaagaagccttgttgcacattcaaactcagatcatagatcttattccggataaagataatttaataacaacaagattacttgtcccatctagagactctatatgtttggaagggaaagcaggatcagtatctgagatatcacgattaactggaacaagcgtacaaattctagctagggaagaaattccccgatgtgcttctatcaatgatgttgttatacaggtatgtttgtctatttttgaggagtcgagcattttctaaacaacttctggtctcaaaagagaattcttatgtgaatgtcgatgtagattactggcgagatcagagctgctcgggaagcacttgttgaattaacattactattgaggagtcatatgttcaaggagctctctcaaaaggagacaccaccagcttccacatccacaactggccctctcgaaggtgttgcaggagtaatggaggtagcttcatcaaataacacaattcaatctcgtgaaggtcctactagttcgaatctgaacttgcagcaagttagcacaatcttgccacagtttaaggtttttgttctcatcaacaatcttttcaatataaaggcatctgtaatcagttagggtcagacttatttttgccatcgaaacaatgtaatattactatcaggctatgcataattacctgaatacttggaaagtagtctatggttcttgtccattcgtgcaatgtccctatatttacatatatttttctcttggtttttataggaaggtttcggatcagttgcaaaggcgggtgaaagtgaacaccgggaagaggttcctgtcacgacaagcaggtagagaaactcccaaatttgatatattttcccaaaaccgtacaagtgcttgtttcacacctttccttcctgctttttgtttttttctctagaatggcggtaccacttgttactagaagcactcttgaagttgtcttaccagaggcggttgttcctaagctcgttacgaaatcaagaaacaagcttgcacaaatcagtgaggtagaactctttttaactggaactagattggtgcaaatcatgactctaatcaaaatctttgacgctttgtcttatctctttcccacttgatcacagtggtctggagctagtgtaaccatagttgaagacagaccagaagaaacacagaatatcattcgaatttcgggtacacccgagcaagcagagagagctcagagtttgcttcaaggcttcattttgagcagtaagtttctctctttccaaacttttatatccgtattgtactgatctataagtctgatttccgttccttgtttggtgcagtacaagaggatggaccgtgaacttggaccagatcatcagtcaacacagagatgaagatcaagaaactgagaaatgtggagttatgtatgacttgttgaatattaggatttcagtaagcagtagtttagatgaacattccacattttgaccatcactctttggtttctatgttgtctattagtcttctttgtttacattgttctgtaacttatttaaaaaagtcattaaagtttaatccgaatgactaatcattaaagactcatctttaattcacaccacccctatgtatattggaagaacttaaacgctgcgtttcacttgagttaacatcattgagattggggtgtttttgccctagataaagtttagggtgaaaacatagataaatcttaagtcgtattttacaaaaatagccactgctaaaacctcacctgcggcttcacctttcttcgagttcgtgaaaaagagacgtcgcatcgcaccgccgtcgccatttccaccgtcgtagcattgccgcttcactggtgattgattcttccttaacttctctttttgttttctctgttctcttatatccgtcgttttctagggttttctcactccttgttgtggaatctctctttgtagactgtcgcactgaatattgttgaatcgagaaa

SEQ ID NO: 1883 - DNA, 3000 bp, Unknown
  misc_feature (1)..( 3000): cDNA_ID_2146163_gDNA_ID_1620462_Annot_ID_157785 3000 nt of promoter + ATG
tttacttatatataggggaccagtggtcatatttaaactcctgaaatcttagttaatagctcaatcagattattgaactatcgaaatttcggtttggtgttggttagcagcttgattagaaatccccatccttatataaaggaccacatgagtattataaagagaatgcaaggtaaggatgcttaaattggatgtgtctatctcttttggaagttgatagtaaaaagtagcttttggaagttgatagtaaaaaagtagcttttggaagtgatagtaaaaagcatttctatgtgtttttgctttgcctctttgtggaagcttcaaacattcaatccacaatgttttgtagttgccgtcttgagttatctcctccaattaaaatataatgtcataccaaaagaggaaagagattgttatttgtatatcataaattcataatacttagaaagtttgttttttctttataatcaattagaaattattttaagtaatatcatatccataataagtatatgttatgttaatatttttatattgtttgtataatatagattcttaggatttagcatacgattagattttatgggttttgtttgtacagttattgctagctttttagtgagcacgagtaggcgggctcgcccgctagagtcaaatttatctcaatttttcattgtgtcgggtttggcttcttcttgtagacttttcaaaagtcacttttgaatgtagggtgacgttcctataaggtaaataacatggtgacgttcttaaggcaaacaatatggtcaagatggtcttcgagaaaaaaaaaaatgaggattgtacttgataaaaattttacgatcaaatagggatttagtttaacttggatctaaattataaaggtgatttggtgtttagatgaacttaaaatgtggtttcatagatatatagatgaagtcttcttctgaagaaactagaggtctccaagaggtgatagggttgggaggattggatttctaaccagaagttttgatgaaatcaacaaaagagaagtggtatcttgaaataagatcatagaaccttttagtgcataactttctaatttaatttatcaaaaaaaaaaaagcaaaatgaatttaagaaaatgttgaaaatttgagaaatatttttctccacaaatacaaatttcattctaacacttcacgtttcgtaagcgcaatatcgaattgctttatgataaaaactaaaaggcagacaagtgccaaaaataagaggccttcgttatggttatctttataactccccctttaaattcttcttttatttcttgatggatggcatataattttcacattttatatattaagtactatcttatactatcaaacgtgaaagaagaaagtaacatttcactaatgtcagtggtctctcaattcgaataacctaacatgttaaattcaaaagcactcctcaattctcatcttacgaacgtgacttactttttttaaaatacttttctgatattaattaactaattagaataagatttaaccataacatataagtaacacatttttttatatggctttctattcaaaattttgacatataccaaagcttaagtatataatccgtgtgcaaataaaaccccaaatgcgaaaaaggaaattccactaaacaatgagactcctatcattttcactttacggattcatatacatatatagaaattgtagggcttgtaatcatgattgtaatatgaattggactgcctgtaatcaatccagagtcattctacttgactgtgatagttataataatgagcaaccaacttataatcatcataaatttccaagttagctgattaattttaaagtactagatggtaggaagaaaaatggaactatcaatcttttacttagttagtgtaaaattcgttgtcatttgcggtaaaaatttatgactcagtataactttgtaaaaaagatatttcaaaacttgcggtgtacgtggagagagatttcatacggttaaaagcactttttgcttcgtttattttcttgaaatatttgttgttgtttgacctaaatcctaatgaataatcaatgtaatataaacaaagtaagtgatctttgggatatattccaacaatacatgcagtttcaacatgttacatatatacagataaactatacttaatagtagtatacaacaaagtatcgcatgattattctcctaatcttcgcatttcgtttctacacaaaagtcgccgcaacataactcatgcaacgacaaagcgggatcgagggatagagagagcacacaacacaaagagctgcctttgactttttcaaaccctaaaccaaattgaccgtaacgtccatcaacaacacgtcccctcaacgtccatcgtgattacctttattatttcttaccaacaatatttttctgtttttttctttttacaaacactaattctatacattatcttacaagatttacactgcctaaaacaaactaacaaaacatgtgtcttctaagtgataacaatgaaattttctcacgtgtaacgtttcatactatagtttacgtacaaaaacaactgaaattggcataacaaattgattagatatttattggatctatcattcatccacgaatttttgatagtgaaggtacttaattaacaagtcgttttcaataataaacaaacaaaatgccatagctcgtgaacaaagaagcacaaaagaagagcgtacgtttcatttattttattaaattcaaaattttcaattcaattcattaatttattatcttttcttctccttcatgtcttctctaacctctcctcccactatacatcgtccttaacttttcctttttctcgttcaaatgaatccaattcctataaagctttctttaatttttctctcctatttaacccaaacccatttcatataacgtcaaaaaaaacattattaggtcttcattaactcatctccaagaaaacgaaaaaaa

SEQ ID NO: 1884 - DNA, 3000 bp, Unknown
  misc_feature (1)..( 3000): cDNA_ID_3064926_gDNA_ID_1620462_Annot_ID_157783 3000 nt of promoter + ATG
ttcaagttgtctctggctagaagcaagctcaaggaatgtcttcttttgcctccacagctcagaagaatgttcttgcacatctctctcttgtgtttcccttaaatcttgaacttccttttctgctttcactagcctttcctctaacaattcgcatttacgcttctcttcttctattgccttatctttagattccaataaaccttccttttcctttaatctttcttgcaattccagtaagctatgtctcttcctcttctctatattccttagttccttcatcagagcttcaatctgcagccttaatccatacctctcccttaaccaattctgtttctgagacgcgattatgctaactaccttctcgttagcttttgcatcatcatttctcactttcttcaactctgtaatttcacaattggcatcctcaagcctctgaagaagcttaccactctcctcatcaaagattctcctaatcagtaaaccaaatagcatcatttcgtttctcatctcacactgtttctcatctcttatggacatggtggttgctcttacaaaaaaaaacaaagggcaacaacacaatcaatcttagcagagatgactaaatctgaatctcaagaagcgttttgcctactatcatccatctgataggaaaaccaaaaatcaaagtgaaatagaaagcaaagaatcagcaaaacatccaaggcaaaagccaaaatggttcaagatggtaccaaaaaaaaaaaaaaaaaacagaggatgcctgagatcttaagcaagcattaaaaaaaggttgagtgaaattgcaagtctaagcacaagaaaactgcaaagtacatgtggtatagcatgttatattgttgagtgggagttacatgagctttttatttttccagatggaaatggcagagaggaataaagtttggtgaataaaagaaagatctgacacacatgtaaaaacacattgaaagaatcatgtaagagatcatcatccttacaggtagataaagcaagaaatgtatgcttctcctggttttatgttaacacaaaggccccttaacacgtccccacttgctcttactttttcattccaataatcgcttcatttttgtttatctccaattcatttttctacccattgtttgttactgagaacaagatcaaactaataattgtcaacaaaagccatcaaacaaacaataacttaactaggttttaaagtaaaatccaatctttattactgagaaatacataatcaaattaccactaatgttatagttttgaattgaaaacataaaaaaggaaactttttaaactcaaaaggtaaaaggttacacagcaatatgaaaagagtttttatctttcccatttgggtaaaaactgtatcaacgacataaatactcttcatcaagctgttatgaagtgatcgatgatttggatatgaaagaaattgaaaccacagaaatgattagagatattcaaagtggaccatgtaaattcaatcattccatttcactatcgacattaactaacacctttacatttttgttgtaattttacataagaaatcctgaattttcttttgttgttgtaacaaaaagacttcttctttgagtcattattacaaacaacttgagaactatatcattccattgctgaaaaaacaaatcacccatcactcattctaaattctaaactttttaccccaatcaaacagtgaaaatcaaagaagattcagtatattataacagagacaaatcaagcagctgggtcagtgtttaaacaatttgaaaatttatatagaagaagaaaaggataacaaaactgaagtacctctgtaagtaaagtgttgaattggtgaggaagaaaggcatagtttagtataaaaggtcatcatgacaactatgcaaatacaaaagcttctctctttcttgggatcttacttcaagaaccaatcaagctttttttttgtttcgaaatctgtaaagctgggaacttttttatgtaattgccagagtaccattcttttttttaataactagatgaacagagaagacggcaactagagttcgaattcctcccaccggtcgtggataatgggctactgatccggcccattaatagcccaatgaaattatcttcacttttccaatggcctttgctttctactactgttttgtttttgttgataacttgactcgtctgaaagtttctaactaccactctcaaaatgatcaggcgaggttaacggttaaccacaaaaaatatacgatcggattacacaaaagagcttttgatatgaatgccaatgtagataaaaaaagtcttcgtcaacttatgatttgaaaatgatcatgattagtactacactactacttaactagtcttagtagtgtagtttaggcccagtgagaaatgtacattatattgatgatataatacaagcaagagagcaagtcatcaatgatatgattactttcattatatatgatctctagacttgagatggtcgctgaactgttcaaagctttggctagcaaaaccgtctctccatgattggcaaacacacacacactctagtcttcttccattgcatctgagggggaaggaaaaaaaattaaactagttcatatataagaagaagaaaaaaacacagatttgctggttaattaatattacaagtacacacaaacaaaaattaaacaccccatgcacctttgagaaaattaaactagttctcttgatgggtcctgctcgtatatgaagcaaatattcagtaaacattattcgttaacttgaattaaatctcgtcatcaaaaataaggcaagcaatgcttaattagatttgtctattttgaataagatctaaactgaagaaacattgtacttctaaactacataaatgtaaacacagaaatatcataatctagtaccagaatttcaagttttacaaatcagaaattaccatcagtagaaaattgaatccaaggggtattagcaatg

SEQ ID NO: 1885 - DNA, 3000 bp, Unknown
  misc_feature (1)..( 3000): cDNA_ID_3065013_gDNA_ID_1620463_Annot_ID_157805 3000 nt of promoter + ATG
agatcaaaacaatcaacattgatttacttttcttaaattactgttactgtaaattacatgaaaagaaatgaaatccaaaagacgaaacaaacaaacaattattacaagagaaaagagagtagctagctacctttggagattgaagacaacacaagacaagactggtgttgggtttggtgatcatttaaaagttgagagacgaggaagtttgtccctcagatagtaaagtcttgctcttctcactttcctgtgacttaccacttttatctcctttatgttgggagagtatctgttaaattcaaaacacacatcacatcagatacatattctaaaccaagatcaaaacatattacttgattgtgtagattagtatctgttcaagatcaaaacatatcagttacatattacttcattgtagaatcagccaatagtactggaaagttcatagggactagtatgttatgataacggctagactctagagtgattaagattaaaggttggtgcgcgtttctgtagtaaataagcacaaagcttggtgacctataatgctaagacttccagcatttatgtactagttcctatagtatcatacttggagtagcaattatttccttttttcgtgaagaaagctaatacatatgatcagatatagaattgtaaatctcttaagttctcaagaagcgaagactatgactgttcacgataaaagaagctaattccggtttgttttagagttcctaaaatctctctcaaagccaaaagactccttaacaaggtcaaagacccttaactctgactatctaatactatttacatttatacttatcaatatacccgagtaagtgtgtgataataggatagttaaggaagaataaacttacatgggaaagacgatttcaacaccaatgcctgcaataatcctccggatacggatagtagtgtggatgcctgcattttgtctagacatcacaatacctttgtagatagatagcctacgtttgttctcaggaacttcctgtaaaatcaaacccaccatgtcgtatcaaaatcttgcagttaaatgcataaattgcataagattatacggggacaatgagttttaccagtttgatttctacaatatccccagtcctaagtccaggaaccggtcttacagtctctgcaacctcaatagctttcttgttcagtagctacagaaacaaaaagcaaatcaacatttcatttctccaatgcctaaaagataactgatgatttaagaacaggagccaaaacaactacagtatcagacatgtataatcagattcagagccaaaacaaaacactagacaatctcatagaatcacattggataatgaactaacccccatgatatctccgagcttgactctcgtcttccacggaggtttagcttcctccgccgcaacagtggcttctccttctccttccgcttcagtttcaacagcattctccacaacagcctcagtttcaccttcagtactctcttcagctttagcgataaactcttttctcttcttggaatcgatggcgaaaccaaaattggagctcgaatgattgagaaaaaccctagaaactgatagtcttgagttcactgatgatgctcgtggtagaattgaagaaacccctaaattcttcgacgagaaagaaggggttctcggtatcatatgcaatgcctggttccataaatggtagataaatacagaattcaaagaagcataagtatgaaaatgtgattgagcgtgagagagtgaagaagaagaacctgaggaagaagatgagagctcgtcgccatgtttgcacaacccaaactcgaaaccagagtaaagaagagccttatcgcttatccgctccgtgtatttcaatttatgggccatttactaattttatgggcctagacatttaggcccatattcaattgatataacaagaaacccattaccaaagctggttctaccagtctaccaccacgaaccaaggcttgtccaagtacactaatgtagaaccaaaaatggtttaaataaagagtttctgttacaaacaaatgtatgtttatgtgtccttaaattgatagctctaaataatctactttgggccttttaaaagttatgattgacgaataaatttctgctggagttgaaatattattctatgtgactatgttgtatattcaagtcgtctacatgttcacgttacattgacttacaccgcaagcgatgaaaagctattatatgttagtttaatcagaataccaaaaagataataatcaaaatattccatcttctttctttgtgaaacgaatatatattctcttacaggtggtttaattaaaagcttgacaacagtacgtaatattagcatacatataaaaagttacattaattggatacgaaattttaatctcctaaagatagttattctccgattgtatagaatcaaaaaagaaaagaacaaaaatcgacaaagaagaagaaaaaagattgattgattcttttgtcctccacgcatctctctgagttggctcggccacgtcagcattcaaacatcaaaaccaaaacgcatttaaatgtcgaaaagagtgggtccctttttttcttttttcttaaccgtgtcattgacaaaaagagcacttaataagccaaagccacatagaagaaaaaaaaaagaacattcacgtctctctcgtttttttggccgacgacgatcgctgaattgactgccggagattcctttaatcgtcagattctcgttgagggataatgaatcctgaatagtaagaaacttgtcttctcgttgtttcatgtatctattgtttcggatcgatccgcgttttttattttttgatgtgtttggtgatttggtttttgttcgattttgctttggatctttgttggttgttaggtttgtgaattgaatctacctaattttgctcgtttaaggtattttgtattagaattttgtatagatttggattttcgttcc

SEQ ID NO: 1886 - DNA, 3000 bp, Unknown
  misc_feature (1)..( 3000): cDNA_ID_3064989_gDNA_ID_1620463_Annot_ID_157821 3000 nt of promoter + ATG
tgtgtattcttgctatataagacgtgcaaagtgactacttatttttgttttatatagcatgaacaagatgatgtatttggtttgatctgattcttgttttttttttggtaatggaatccagagaaattggaaatggagtaataaattcaatgttcttgccacttacacaacaagcagaaatagcatgtgagaatgtgaaggaaatgaaagagttgagtcaaggatacaacattgttggaagatctcaggttcttgatacactttcttgaaaaccctaaaataggttttttgatcactataacacgtttcagtttcatggatgtttgatgaatgatggaacaggggaacctagtggctcgaggcttgatcgagttctgcgacggtggacctcctgttttcaactatatatccttagctggtcctcatgctggcatttcttctcttcctaggggtctttgtggtgtaagctttttttatttttcctcaaattatctaaaacttttatctgtaatttaattttaatcaatcaaggtaacaacaacgattgttttgttttgtttcttttcttttaagttaacgtccgatccagcatgtaagaaatttaatgagttgatcaagggagctctctatagcgagaccattcaagtatatatatctctttctctatatatatcatgattaaagactcaattagaaaataataaaaaatcttcaatgactctgcaggatcatcttgctcctagtggttactacaaaatccctaatgtaagtccattcaccatttgtttataagaaaacttgcaaaatcaacaaataagtgattgatgatcaaaacaacaacataaagttttaacaaaatctttgtttttcttttatttattctcaggatatgaaacagtacttggaaagatctaagtatctacctaagcttaacaacgagataccaaaccaaagaaaccaaacttacaaagaccgtttcaccagtttacacaacctggttcttgtcaaggtttggtctcatcaaaaccatctagacttttcaactatcttctcattcctttcttgatgactctgttttttttttttacagtttcaggacgatgaggttattactccaaatgattcaacttggtttgggttttatccggatggtgagttcgaaactcttctctctgctaaccagacaaagctctatacagaggattggatcggtctgaaaacattggatgatgctggaaaagtgaagtttgtgagtgtacccggtggacatgtcagaatggcagaagaagatgtcgtcaaatacgttgtaccttatctccagaaccaacagcctgccgcacaaagcttcaaccgcaagaccaaggagcccttgcatccttaaaacagagcaaaaacctcaattgttatacttatacttagcaaaaaaaaattgttatacttgttcatgcaatatcgaaaaagcctagtgatgactttgtagaacaagaatccttattattgatatattgatatatacatacctatatgaattgtcgaattaatccgttgagaaacgacgaatgaggtcttcatcaccagttttcttcaagacttcaatgattatctcaacatgagaaacttccaactaatctcattttcttatcaagcatcggtttcacaagcttatagctagcagcttcccaagaaagcccatttataaattaactttggccaatcttttgcaacatcttcaatatacataaactaaccaatataatgcatcttctcgatgcttgttgaagcagtattgatcagagtcatcaataacttatattgtctgcttacagaagtgagtcaatgtgtccattgtaagtattatttctatctaaaaaatatttagagattttattctttacagaaggagcaaatttatttgtatatttagttgtcaaattaaaatttagtctatacattatacaaggcgcaagtttgtggatttaagaattatataaaaacttgaaatatatagtttttatgcattctcctcttgtgtaatacataaaccaaatatgagataggttaatctgtatttcagataatattaaattccaaacaatatttttacttgttataagaaggcaattaatatctctctgttaatggcaagtggtaccaagtagtattaaactattaatgcaatggaagagtactgttggaaattataatcctctatcacacattcaaacagatctcctgaaatcttctcttccaaacttgtacttctctgatccaaatgtaggctccaaaatatagacatttaccatttactaagtccacaactcctttcttgtctccttcaaaaatgactcttgtgtaaccatcatatgactccgacagttcggcattgccatgatgagagcttaaaaattcaccttcctgagcatttcaagtcttcactcccttagcttgacctgaaccaagataaaatgcctttgtcgtcccgtaatatccatcctgctttggacggcatcatagttacattcgatccatcctatttacaatgttattttagtattaaaaacatgacaataaatttgttgttaaacatattcaaatacaatatgattggatttataagtaattgtaatatgaaatgtccttagtaatatgttaaaaaatacatagatacacacacgtactaaaagaggcaacgcgggagatgtcattagaggaagaactaggaagcagagcgttcatgcaaaatgctaccaaaaacgttaatgcaatatctcaactaatcagcacagtccatttcatactgagaatgtaaaaaccaatcagcatcgtccattttttcatctaattatttgttaactcttaattggccacaacttccaaccacatgacgctctttctattccctttatatattcccatctcaaatgttcttggagacacaaaatatcataaacatataaacataaacgccaatcgcagcttttgtacttttggcggtttaca

SEQ ID NO: 1887 - DNA, 3000 bp, Unknown
  misc_feature (1)..( 3000): cDNA_ID_3064981_gDNA_ID_1620463_Annot_ID_157826 3000 nt of promoter + ATG
ggctaataatattcatgccaattgttaatttctggtggagggttaacacttgtacataaatacttaatttttctttttgcagtttttgtatagatatccatccttatataaatagaaaaatataaggaaattgtaatgatttagcataagacaattggataatcacaaatgcattaaacctattaactagtctatatagaaagagttattagttacagctatactatttgtggtggcattaatatatagtaacttatttaagatatatgtcataatgttaaaaagaaatcacagagaaagctgttattttttttaatcctaaatttaaaactttggatattgagattagcctgtaatacatctttttccaaaaaatttatacaaaaatggccattaataattaatagtaatagctagttggacttcttagttcaaagtaattcaacattttttctaaaataaatcttctaataatagaacacgttggattgactaattaagtcaaatatgaaatatggaaaaggaaaaaaatccaccaacgatacaccaaataatttccgatttttatatatataaataaacatactaagagcaaaagaaaaacaaactgaaaataaaaaaaataaataaataaaaaaaaaaatccggccagataaatcgaatttatgtaataaatccgaccagataaactgatattattgtctttcttccgctcctttgtctctctatctctttctcacaattagattctgtgcttcttctgcgatcaactaagatccgatccgcgagcgtttcagacttcgatcagatccgattaagagaagcaaatcgggtcgggtatgactcgtcgatgttctcactgcaatcacaatggccacaactctcggacttgtcccaatcgcggcgtgaagctctttggtgttcggctcaccgaaggttcgatccggaaaagtgcaagtatgggtaatcttagccattacacgggttctggatcgggtgggcatggaaccgggtccaacactccgggttctccgggtgatgtccctgaccatgtcgctggtgatggttacgcttctgaggatttcgttgctggctcttcctctagccgcgagagaaagaaaggtatcttcgtttgatttctgagattaaattttttatcaaattccaaatttttgtaattgagtttattttgcatcaaagtcgttgattgcattatgtaacaagtggtgatctggtttatgtaacaagattttgatgtgtgtttgatattggttttgttgtaggaactccatggacagaggaagaacacaggatgttcttattaggtttacagaagctgggtaaaggtgattggagaggtatctcaagaaactatgtgaccactaggacacctacacaagttgctagccatgctcagaagtatttcatcagacaatccaatgtctctcgtcgcaaaagacgttctagtctctttgatatggttcctgatgaggtttgttccttcttcattcaaaaacaccatttttatttatattggagtggttacaaaatgtgttgagatactgatttaaaggattcagaagcttattaggtggattggtttgccttctacatttcaatatgaaaagttgaagtctgttggggttctaattgatatgcttgaggatatcattttgtagccaatcctgcttaagcattttggtcttctcatgggaatgtgatcttgaaatgtaattctctttctttattctgcttatgctgtgtgatttgtccttgtaggttggagatattcccatggatttgcaagaaccagaggaagataatattcctgtggaaactgaaatgcaaggtgctgactctattcatcagacacttgctcctagctcacttcacgcaccgtcaatcttggaaatcgaagaatgtgaatcaatggactccacaaactctaccaccggggaaccaaccgcaactgccgctgctgcttcttcttcttccagactagaagaaaccacacaactgcaatcacaactgcaaccgcagccgcaactacctggctcattccccatactatatccgacctacttttcaccatattacccgtttccattcccaatatggcctgctggttatgttcctgaaccacccaagaaagaggaaactcatgaaattctcagaccaactgctgtgcactcgaaagctcctatcaatgttgacgagcttcttggtatgtctaagctcagccttgcagagtccaacaaacatggagaatccgatcagtctctttcattgaagctaggtggcgggtcatcttcaagacaatcagcatttcacccgaatcctagctctgatagttcagacatcaaaagcgtgatacacgctttataaaagacctgaggaagtgatggtctaaaatgggatctggtttggggtttacaggttagttgttggtcacagtaacttaaataagtttttctttgttaggttgtttaacttgggtaggatgttttagttcagctttgatcattagggaaaagaaaaaagaaaaaaaaaagggagaaaaacaaattattattttttgcttacatttctttatatttgtatgcttttattttgactctaggatgcgttaattttcgtttaatctgtactaaaaattagaatttattagttttgaataaataaaatcacagtttgtttatcctctgaccaaaaactataactggattgaaaacggaaattaaaccaagacgaaccggatttaaccggactccagtgttgtaagagaaagtaaacaagttcccaagcgtttcgtaagtaaaaaaacgaatgggctaaacaattagtctaaatgggccttaaaagagtgaataacgtgtcataatcaggagcgttaaatttagggcgatgagtgtcgagagtgttcccgcgttcaccgattcactccactctttggttaaaaagtccactgtcatggaaaattaatcgcggtgatttacacag

SEQ ID NO: 1888 - DNA, 3000 bp, Unknown
  misc_feature (1)..( 3000): cDNA_ID_2146310_gDNA_ID_1620463_Annot_ID_157827 3000 nt of promoter + ATG
gacacttatcaaaggttttccagggagtaacaagcgtgattctgatcagaaattggagtgtaatctctacataaggcttctttactcttatttgaaagcatttgttcctgttttcgacttaaacgctcaccagccttatcgtagttctcttttgcattacggaaatgggtatgatgggtcagtgatgacaagagctgagttcttggtgaatgttttcgtgcattattggcttgttgagaatgacttctcaccatttcctgttgttacggctaaatcttttggtgtggctcctcctttccgttctgctgtggaggagattccacctacttgtgggttggaagaagtagtgaagttgcttgtcaagtatctgaatttgagttgggttacaagtggtgttgggagtgaaaactacattgagtatggcgagagtccacggtggaagacaccgacttcaggatcgtcatcccatgtcgcgaatttgagcctcaggccgctcacttcctggaacacccatttacagaggccgctttatcgttatatattgaggagtttcttgttctgtcccataggaagctcaattaagaatgcatctcaggtgttctccatctgggttacgtacctggaaccatggatgatcagtttggatgatttctcagtttttgaacctgctttaagtggatctgtaaaagatatgaaaaaggaagattcttatgaatcacgcgtttgtggatacacgcctttgtggcagagctatgtgatatccaattatctctactatagttctctggtcatgcattttattggctttgcacacaagttccttcacacagatccagaaataataactcagatggctcttaaggtttgatccctggcttaagctattttctcaaattcatgagtttatctgtagaatatggattgcaagacttctgtttgaaatcttaatgtgactgaatggttctactgtgtctccctaaataggtgatgagtacgttgacatcgtcaaaagagcttttggttctgatgaagaatattgataaagcctttcactctaaacaaactggaccaggaaactcaaaagtgaacgaattgtctagattttctccatctatccgtgagcagttgaaggtatgcctatatttttcctcaacaccagttgttatctgttctccggtcatagaacgcttttccagtgattttactcttatgtatccgccatcctttgtcttcatacttatttagctttttcatcataacacccttggaagtttaacaaaagactgtaaaatcaatctttttttcacataagtcacataagtactcaaactctatactgaaaaatcatgtttaactgcttgtggaacttcaggattgggaagatgggttgtgtgagagcaacgctgatggctcatacttgcatgaaaactggaacaaagacttgaaactctttagtgatggtgaagatggcggacaacaactgcttcaggttaatgtcttccttttataacctactgtagtgataagttaggaataaaaaaatggaagataatctttgtaggatgatatcttcaaatgtacttaaaatagctctattatggaatgatctagttgacaaatatatagataaaccttcagatttacttgtttgttgtttgtagccttctatctatattaacaggagaatttgttacttgacaattagatgagtacgcagtcatcggcaatgttgtgagctattaacttgggaatttgttttttgagaaattgttcacggaaatatactttgagaactagttctcctacatttgtttttcagtaacctagttgtatcgcatgttttcttgtttccgatactctactttagtttatacgactcttgaatcctttagctcatagggggggagtggagcttaaaacctgttttactttgctgaaggcgtttgttctttgcatttgcagctattcatactgcgggcagaagccgaactgcaaactgtatccgataaaaacctcacagaggcccttaagtgtgtagattcactaaaatcagcggtttccaacttctttggcgggcatgtcgtaaaaccaatcgcttttttcctagagccggaccatcctcagaaaaaccgtgacgagctcttcaagccacgtggtgctggtaaccaaacagcaggcggtgtgaagtacaaaggggactggatgacccgtccggtgtcagaagacgaggttgcattgatggctaaactgctaatcaacatgtctatttggctcaatgaacgcctcgggctgaacaaatctgagacgagcaacgacaagaaagagaattcagagtcagtatcatatgtagatgtatcaggggaagatgtgggaaacgttgcaggacctggagatgctgcgaagatgctgttgcgagggatggtgatggtatgtggcacagtgttgcagctgatgagaagattcgggattcgagtcaatcttcgggttatggcttcaaaaaagtttctgatgcttttatttctctatgtcctgtttcttgtagtcaaaagggtagtcacaaggatgatttggtagatgggtgtccaaaatgtgttaaaagttgaagaagtaaaaggaaatagacactctaactcgcgtagagcgtttgataggaattggaaagcttatttacgaaacagggactgagttttttggtaatttacatgttcgcattacaaattgaagcgtgtctttacttgttacaaccaatgagaatggtccacgtaatcagtctccacgtgtcatctgccaataagatccacccatcagcaaaattcatcggtcgttcgtcgctgactatcacaattccgaacaccaaatttcgaatttctgccacttgctttgtgatctgatcgttcgaaattgaccggagaattcttctgtgttcttagatctgtcgcgaatttgttaaagctcctcagaaggttttggttacagatcttctctgtggtcttcaccact

SEQ ID NO: 1889 - DNA, 3000 bp, Unknown
  misc_feature (1)..( 3000): cDNA_ID_2105036_gDNA_ID_1620463_Annot_ID_157825 3000 nt of promoter + ATG
acctcaaaagaaaaaaacaatcatatgaaatacagctttaaagtgtcttacttgcattctagtgaagttgtttgcagattgtgaagctccattaccagaagtgtgaagatcccgctctgacgacgcactgggaagatcataaacaagaattcgttctagcctctaggaagaaacattctaaacagaaaaagctctaaaacagacttctttgcataacagtctctatctacgtcgttttcatcatagagacgtttaagcaaacattggtgtgcaagaaacatcgagagataatctcaaaaacccattaatggatttaagataaagattcaatattagtgaaaagattgagcttaaactattgaagcgagagtaccttttagagcggccatgtttatgagaatccaggcaatgccaagaatctccgtttcttctctgcttgttaccgtctttattcaaatcaaaaccacccatatatctcagccaaaaccttaaactcagatgatgaaagtaatcaaagtctccaaaagaatctcagtaaaagaagaaattgataaaggagtgaattcaaatgcagcaaaggagaagaaagaatgaagaagtaaatgcagagacgaaaactgaaactgtagcttagcccataagaaaggggaccaggttagtagtatcagagtgcctgccaaaattcaattacatttcactttatggttgttgtattgcatttaattcgattttttttttgtctcattttaaattcatagttccatttccctccttttttcgagaaatacaacacttctaggttaggaaaattcgcataaatagttatactcttaattttctctggtcaaataatattaagaacacgctacagtaggacagtgcagtagttaatgttgtcatgtcggtccgagtacattgagaatttaatgttccgatataaatttccttgttttttcccaattttgaaaagtccgttaaattttcatatttattcaacgagacactgtactttcagtttccaccgaaaaataattcattactcatcatttattcaatgttcgataatttcttggaagcagacagcatttgggcctcgagatttaaattggcccaaggtccacgtttacttgggtcaatcacagtcaaaacgttttcccggggtttctctcaatttttttgtcaaagtctctcaacttttaaaaatacaaacactgggatcctccacggcatgcaaaaggatattataatgaagatgaaatcaaattggtataaaaagttggagaaaggtataaacactatgtatgtggctaaaaatagctagaaacttataatttaggtgaaagaagatttgagtaacgttgttgttgttatataataagatgaaataatgacaagaaatctgaaataatatgcgaatatgccaccgacgggagaaatacacgtggacggctgataaagctttgtgaaggaatcccacaataatataagaagatctgaccaaaggttcctttctggataagccgctctcctcgtgtccacgtggcattttcaaacgtgggacctcctaatctatatcactaaacccatccactcatattatctctctttctatcatctaaaatccaaaatgttcgtccatttttttttttctgttcataaacaaaaactgcattgccttttaatttattcttcttctaatccatacaaatgattatggaactataaatctataataataatacaattaaccacaaaataaaatatatcttagtattataagatatgacttttggagttagggggtgtctaatacaaatattatggtatttgtaatcttagcaagaaatgaaatcacaatcatgtttatctttcttaagataacatattttactcagtcatgggtctacttttattttcagtttagattattaaataaataacaatagttttgtcgccttactatatgaccaaaaattagattttctctatgtgtaggatgttggcatttgtttaccatttttcttatgataacttattaaacagatgtcatattttacttatttgtgtttataactgttaaaatctagtcaagctttctgtatggaacgcgtgaagggctattaagatattttaaaatgttgaatagtgtaattaatcttgtggctaataatattcatgccaattgttaatttctggtggagggttaacacttgtacataaatacttaatttttctttttgcagtttttgtatagatatccatccttatataaatagaaaaatataaggaaattgtaatgatttagcataagacaattggataatcacaaatgcattaaacctattaactagtctatatagaaagagttattagttacagctatactatttgtggtggcattaatatatagtaacttatttaagatatatgtcataatgttaaaaagaaatcacagagaaagctgttattttttttaatcctaaatttaaaactttggatattgagattagcctgtaatacatctttttccaaaaaatttatacaaaaatggccattaataattaatagtaatagctagttggacttcttagttcaaagtaattcaacattttttctaaaataaatcttctaataatagaacacgttggattgactaattaagtcaaatatgaaatatggaaaaggaaaaaaatccaccaacgatacaccaaataatttccgatttttatatatataaataaacatactaagagcaaaagaaaaacaaactgaaaataaaaaaaataaataaataaaaaaaaaaatccggccagataaatcgaatttatgtaataaatccgaccagataaactgatattattgtctttcttccgctcctttgtctctctatctctttctcacaattagattctgtgcttcttctgcgatcaactaagatccgatccgcgagcgtttcagacttcgatcagatccgattaagagaagcaaatcgggtcgggt

SEQ ID NO: 1890 - DNA, 3000 bp, Unknown
  misc_feature (1)..( 3000): cDNA_ID_2146287_gDNA_ID_1620463_Annot_ID_157819 3000 nt of promoter + ATG
tataaaccattcaaggatgtgtggttggattgaagccgtcctattcatcattataccatgaatgattgatggtgatgaccatttttagtatggtatttgtgttttgctttggtttgcctcgggacttaactctcttgttgagtacagttaatatattcagtcatttcattacttgcgtatttaaccagaaccttgccgtatcttttttctgtgcagcaagagtcatgacaaacaaagtgaccgggaggtctagaggttatggatttgttaacttcataagcgaggattctgccaactctgctatttcagcaatgaatggacaggttagaaatctaaagaatcattgatctatctatttacctatcatgtcaattgctgtgttgtatggttaatcttccccttttgttggttttgggatggtgaaataggagctgaatgggtttaacataagtgtgaacgttgcaaaagattggccaagtttgccattgtctttggatgagagtatagaagaagctgagaagaaagaaaataagatgatgagccgatctgtatggaaagatccattcgttgatgcgttcctgatgaagaagaagaatgcagctctgaacaggaaaatatggtcaaggagatcgacgattcttcccgagtatgttgattcggcggtgagaatctacaacggcaaaactcatgtgcgttgtaagatcacagaggggaaagttgggcataaattcggagagtttgcgtttacaagaaaagtgaagaagcatgctaaagcaaagtagcatctttgagaatgaattggtcagctgcttgaaaggattgtgttgaaaagccaaaaacgaatcaaatcaataaattctcaataggtaaaactcattagctcacatgatcatgtagacgaatattgagctttagaaagtctttagttttcttgtcgatttcgtatttttggaccacaaaagtgccaatgttattttggaattcgattaacaaatatcaattgtggagcttcaataaccaaacgaacgatgcacctccatagtgcttgttcaagaacttgtattgtttatatacagaagcaagccaatggggccatgttgagtattctattcgatctaaagatgtaaaagaagattgaaaatgaaatgagaatccagtttaaggtgttgttggatggtactagtgatattagaggcaaatggtgtgaacttgttgacaaaattgtgtcttcttctctctttgagttcacatttcagtgtcataattcgtaagatttgcgagactaataattagtacaagaatttattaatcaatattcgtcgttactggttatggatttgatatgtttactcagaaactgtcgtctaggcttgaagggatttattattcagttcacattttcatgcaatggagccctcacaagacctgtaataagacgagttctatttgtaagttttttatgatttataaaaagctcagaaattcatttatagtctatagcttttatggtttacatcttgagctgaaaaattaaaacttttgcttgtagatattataacttacataagctatgaattatatatataaatttgtatttcggagctaaaaatgttataattttattcatagatttcatacttctatgttgcttacctaaaatgttaattcaaccatatattttgagtgttaagggggtgtaaaagcatatggaattatttgtgttaaaatgacaaatcctctgttattcaatcatcaatattaaaaagttttataaaaatccattgttattgaaataatgattccaaaaaagtaccatcaaatccagtattatggaaatattataaccactggatttttgaatgactttaaggtggtttataagattttaacatgttttgttttttggaatttggaagaactttagaacaaatcataacatttaatctaaaatcacccaaaaattcatctaaaaactcattaaaattcgaatcattcaaactatatggttggataacatagaatttgtcatttcaacaccaatcatttcaatgtgatttattgattatattttttatcatagagagagcaaaaatctctgtcaatggcaagtaggtaccaagtagtggcatgagagagtgatgtctggatttattgatttctttggtagcttatacttccatatgtttccttatttaatttttcattccaaatatgggacaaagttataacaaatagtattcgatatcaaacgtcaaaacatgtactcccaaatatattttattggaatatagttttggagatatttttacctggggggagatggaaccaaaataagatctagaaatgtgattggctaacgaaagaagcacaataagttaacaagtgacagtgacaatttatccctcgacaacaacacacattcacatatatctttttattttattatttttctgtgtgtctttaaagtttacagcacaagtagtttctaaatcttataatcaattttcattgataaacagaaatttaaaatatttaaatagacaaataaatgatcaaatctatatttctatacaagagttaattcacaaaaatttgttgtgaaacaaactctttctatatttctatacaagagttaacatatttctatataagttattgtaaagatcaaaatatgaaaattatggtataaatgcatagacacatatatacgtgccctattaaaagaggcagcgagaagataatataggaggaagaggaagaagaagaagatggtgaagaagagagttaatgcaactgcaagaagatagtaactaatcagcaccgtccatttttgtcatctaattctttcttacttggccgcaacttccaaccacatcacacactctttctattcccttatatattcccatctcaaaagttcttggagacacataaacattaaaaaaagaaaaagaaaaaaactataaacataaacgccaatcgcaactttcttgtctttca

SEQ ID NO: 1891 - DNA, 3000 bp, Unknown
  misc_feature (1)..( 3000): cDNA_ID_3065005_gDNA_ID_1620463_Annot_ID_157811 3000 nt of promoter + ATG
gaagacggaacagagcgttgacgttaacggtggagagacgtttccgtttgtaacgtcgaatttaacggaattatgtgactgggatttaacggggtttcttaactttccgcttctgtcgccgttatctcctcatccaccgtttggttattcccagttgaccgttgtttgattagttttttttgagtttttgaacgatgtgtatgctgacgtggacgtacacgtaggtgcatgcgatgaaaaaaacatctatttgttcatatttttgcgtttttctatttgttcattctttttcacaattcacaatacattatttcagttaatgattacggataatttagctttacgttaatttattatgagtactagaagaaatcggagtaattcaacatatagattatactagtataaatgtcaattgcattgacattaattgaggaattatagtagaacctagtataaaaagaatgattcaaacatgagatattgaccggcgttatgtgaagttgttcagacaataaatgcataaccgtgattctgtctgaacaagtcgattcttaggataaaaaatggataaacttagtcaaaatatttcccacgtggttagacttttgcttagttacatgacgaatgtgaaagccatccatgcatgtatccagaagaatatatcttgcacggcgaattctctacgtattttagtattttagatttgacgacatctaattttcttttggtatttcgggtttgacatctaatctgctaagaaccttttcttataatcgaagaattttgttgggtcgtcttgtaagatattattttcagtacacactatctaatcattcatcaaggtcactaatgggccttgtggtctaaactttgaatatatactttcacctatgaaatccagaagttctggctgggtaagttctaaaccaacctatcttatacatcgaaacacaaaagataattggaactacaaacaaactttacccaaaaattattagtttgtttttatctccgtagatgaaattgggttttctaaatcgttttcgaagatgaacgctaatcaaacaaaagtggtataacacagtttgttacgaaattttgttaggaaaataaatgaagtatgtgttttgcgtcgacctcaaaataaaatacatattaaatcttgcatgctaatattattgtatagaataccaatcaggtaagaatcgctcgtcatcatacgactattcaatatccaaacatatttatttggaaaacccgaccacgaataatggttagctttacatcattatccacacatactcaaatggttaaattttctagaattgtaatggaagacacaatgttatcacgaatgaggatcatcatgcacttcaggttacctaattatcctacgtggacaatacctaatccttccatgattttcaattattgcagataatttttctgaacgtcatcatttcccataacgaataatcatttcctcaatcaacgcaaacctaactatctatgtcatttacatgtttatgtggtaaaaatctgcttagaataagtaaaccttcacatatatattgtaacaaaataattgaggttaatgttattcaatgcgaaaaaatgtaaacacttgctaatgagtcgtaataaccctatattatttttccaaaacatgtttctattgaagttacaaattaagtttccactctatttggatggagcgtactagtcgtagacacggagagcttccaagtccatcggatcaacttatcaaacttatcgaccttttggtccacaacaagatatcttttgtccatcttcatcatggctctcgcaagaggatgggttacatatatggtttgctttattgcttaatagggattaatttctctaatacttttgattagcttttcgcaaacatttttcagcataaggacgcatctgacgtacaaattaaaaatccaaatgaactaaaatacttttaaacagaaaggacaaggaatctaagccatcaaggcccatctccacgtagctccagcaacgacaagatgctttattatcccattctcgtggatacttgtgtgagatacacgcttcagataaatcaacggacgaaattgtaaaaagcgtgaggaagagagagcctctttccaaaggagagggattggatcattgagatatatccgtttatccatccttgaactcctgaagattccttcgcacagacaactctctcgaacatgttaaagattctctgatacctaactattgattcctttttccctgcatttttcgttcactatttttgcttataactttttgtactaaaattaaaaatcatgccaccatcctgtatttcatatccaaaagctttggattattttataatatatcattggcttgatgtgattgatatttaccaaaaatctattctagtttctttttgtaacaccaaatgttatttaaaatttgtattggaaaaatgattcatttatataagttattatatccctcttaaaaattgtataaaatctctaagacattattaattgtaaaagatagacacaacacgtagctatatgtctatatccaaaaataaaacacgtagctatatgtaatattataaaaatgtacatatattattagggttgtaatatttggtcggttgaaaattgaaatcgcagctcaattggaaattcacgtgtattttgtctttgattgtaagatattaaaactgttcttcgctttccttttctcatttctcacttaaccactcgatccactttaaaccacacattataagtgtgcctcaaaaaaatctaacattactctctcaacacatctctctttcttctccatttccttcttctctttcattctcttatttaagatttaaatctgctcaaatgcttgtaaacaaatttcaagttctttaaacgatttccttttcaagaaaaatccttctccttcttctttttaccacatagatcttcttgatctaca

SEQ ID NO: 1892 - DNA, 3000 bp, Unknown
  misc_feature (1)..( 3000): cDNA_ID_3065001_gDNA_ID_1620463_Annot_ID_157813 3000 nt of promoter + ATG
accttcccattctgttcccgactctgtgatatcgcagtttaccatttcaagtttgtggagactactcaacgtaccaatggctgcaaatgatactttaagtccttctagatatataccctgcgtcatccctgccaatcttgtgcttcctagaaactcttccaaaacagaatcgttattcacagtaacggtcaaaagttgtaaacccttcaactgctccaagatcttgagcaagcagcaatctaatgcagcagcagaaccataaaatctgagaacctgcaacttttgtaattctgaaatcagaccgacgcttcgaagattggaagtggactccaaattcaagtgaatcaatttactcaagactcctaaaccttccggcagatgctttatactcgtccctgataagttgagaagccgcaaagaaaccaacgccgagattccttttggcaactcggtgatttggaagttccaagatagatccaaaaccaccagagtcgacatgaccagaaagaatttaccaacaatatctaccaacctgttattttgaaggaacaaggttacaagatttgtctggtcaggaaattcaggatcgtctggtatgttcttaatctcattgttgaacagagacatctttgtcacagttgtccaatcggtgacatcaggcagttggcttaaaccagcatctgttttcacaacatatctttctccatccctaaattcagatactatccacaatgccatatcacggatcatatcatgcatatacactttcttattagactctaataacaaacctgccccaacaagattatcgatgatctcatagcctcgatcttttgctctctctcttccgtctttttcatctatgaaaccctcacctatccaatactctaccagctcatcttgtttgatataatatgccttgggaaataaagcacaatacagaaaacacttggcattttttgttttcaaataatcatagctcaacttcaaaacttgaaatattcccttctctgtacctttcatctcactccgataagactccaaagtatcgagtgcacgacgccattgaatcacagtagatttagatgccatagtctttcttataacttcaagtgcaaggggtaagccacaacacttagccacaatcttttttgcaatatcagaaatttcatttaacccgtcgcaatggaccttcatatcgaacaaatcccatgcgtcattctccgacaaacattgaacttctatgtcctcatttgccctcataactgaacagacatccttagaacgagtagtaaacacgactttgtattttttaccgagcactgggatgcctattgctgttaaactcacatcctcccataagtcatctaataacagcacgaaccggggcttcatatctcttagtaccctgcttatttcactagctttcttccctcttgagtatgtagaccaattattgtcacagatgtgtaatctttccccgatggcatcttgaatcttcccgacatctgcatctttagacgattcaacccaaataacaacatcataatcatcactgacttcaacgaacttgttgttaattagagtgaggagggtagttttgcctacgcctcccataccgaagattcccaacattctgttttcatcttttctaagactttcccaagtcttttcaagcgtcgtatcaagaccgactgtttgttggcaaagtctcacttctaccacaggaggaggaggttgctcagtcacttcttgaaaatctttaccggagagacttttaacttcagtcaacttcttgaataccttctcgcctaggttgcaggttgagaaccagcacccagatgttgacagacgtcgacgtacagctgaagcattctgagaagaagcatcccgagcggacgcaacatccattaactgtttggtgttttcctcaatgatttcgacttgtgaaagccacgtagccactatagctagccgttgaccacccttaagctcaccagcattgactctgtttacaacatcttctttttctgctttaagctcatcaaaagcactcttcaacaagacaagattttccttcaacatgcaaatgttacccacctttacacacaagtaagacaaagcagacttataacatggctcaactacctgccaacagcaattcattgtgctcaagattgagaaagagaactaagatgagagtagcaaatttaaaacagatctttgtacagaacaggatgtctgaatcgggggagtagaaatagggaaacagaactttgtgcaggacgaactagagagaccagagaaaaggaagagaccagagaaatggagagatgatgaaagaagaaaaataatggagagaggaaaagaactagagaaaaaagttatgtggaatgcctttaatatccctaccccacccgcatgttgtagaattttttgtaacaacaatgatgactaaaaggtgtactgtgtctgtgtggtaggtaacgttattggttcattgatttacaaatccatatataattacgcaacatgtgctaagatattgacgtggtttggtgtcagctaagagacaaatattggttcactgattaataaattcatatgggtttgaactcatacatagaataatatggttgttcttaaatttaaaaacatccacaaaaccaggttagacaaacaaaaatgactaacaaagcataaacgaatactatatgtccaccaaccatatgcaaaacgaaagaaaaaaacaatgaaatccatgaataaagatttataaaatgaaagatccacaaaagtatcaccacaagccacgtaactcccatatgcattaaaacatatcaaatttaatttcaaatagtaaccaaaaaatttcattttgtaaccaaaaaatcaaattaaaattttaaaagggaagggcaatattgtcaacccacaaagccaaaggggaaagtggctgaaaaattcagtctcaattcagttgactcctaaacacacaaa

SEQ ID NO: 1893 - DNA, 3000 bp, Unknown
  misc_feature (1)..( 3000): cDNA_ID_2146279_gDNA_ID_1620463_Annot_ID_157817 3000 nt of promoter + ATG
aggacagagatatgggtgacaagtaggattggtgagaccaaagtggtgtcgtggagcatggtcttagcagtggatttcccgtccgaactattcattttgtctggcataagtttcttggtcgatgcggagaaaaaattcgtcgtatgttgtgataattacttcggagaggatgaatacgataccaaaaacttggttcacattgttggagagaacaacaaagtgagagaagttaatttcggagtatccgaatcatcttggccatttttgtttaattatgttccaagtttgattcaaatctgggaaggtgtaggaggcaaaagaaagagagtcgaataagtaagcttcacgcaaacctgttttttttttttccttctcaccgttatctttggtcatatctagttatgttttgactaacaaatgtttcatacatacttgttgcattactttaagacagtttttttttttttaatagtttcgtgatcaaaaaagatctgcattaatgccgcctccagcaacatgggggtttcattcttcttttcttaacacatacaaagacagaaaaagcaattaacctaatgaagagaccaaacaaacataatgaagagctacgtgtacgttccaagtctagttccccttccaggataagatggttgtttcgtgtttctaagcttaattggtatgtgattgttcatcttctgccatcatatatgatagtgcatatgtattgaaattgactttggtttttgtgatacaacctggacacgttttaggtctttgtccacagttgtatcagtttcggtcatgtttgtggtatcaacaaaactaagatacacacattccaagtatacatgacaaatttcactctatgctacaaataaccaaggtttgtactaaaatccaaatacaaagaatttggatgaaccttacagaagctatatggaacattctaacttgatatacttaatttgaataaacaaaaaaagaagtcattatttagttattgaatactttttttcccttgaccttacagattactgattaccatatacatacatatatgtgaatttttgaagaagacaacattgcatttgtaacatacattgcaaatgagtaacaatgaccaacaacattaacagattgtttaccaagacttacagtaaatgtacaatgttcagtttgtatagatagggtccttatatatgctgagtcaaagatgtcaatcctaaaggaaaggaagacgagtaacggcattcccccacaaacgctatcatctgcttatttcttttcggatgaaggtggcaacattttcttggtggatcgacgagaaagtatctgaagccgcactttaaggtgagtgccgagattctaccgcgagttgataactctatactagctctaactctacacataaacataacacacaaacttatacaaagataaacgtaacacacaaatatctgaacagagattcaattgtcatacacataagcaaaaacagcaagaattgtgaaccagagtgatccacatgtgtatttcacatatctgagtcgatctctaataccctctcgtggtgtaccatatatttggattaaactaaatgatagcatatttttgtaaattatcttaaaaataaaaatttaattacttttttttagtaaaaatataagtctatgtaccgtgattaatatatctagttaattaacaaagttgataactattccgttattattacactttgcaatgtcgatcacatcaataaacgcattgtccctttcccttttcgtatccgccggaaaaaaataacgtctttttttttttcttccaatctctctgtctctctccccaattcccagattctcatgtaagctctctccaaggatttgatttctgtataatgtttgcgaattgagactaagagccctctcgatttcgatttttgttcgtctggatcctttgcgttaggttttttcttctcgtataattagggcttccgatttgtttacccttagttcattttctctaaattttggtttttgattgatgggttttcttgatttagcaatttttaagatttacttgaaagattccgtaattttgttctgattcggattctttgatctgtgctcactagctctctaccaaagcagcttccttttctgatccctagtgttcaattatgtgaacagattgtttactttagcttctcttccttttcattctagttttgcagagattttaggaggaacatgattgtttgaattgggagagacattggttcgtgtaaaatgcgggtgcttggtttgagctcaagcttatgctctggtgaggataaggaagaagaagagattaatggagaaggctctctcacgcctgtttatctcaacgtctatgatctaactcctgtcaacaattatctctattggttcggccttggcatatttcactctggcattgagggtaattgtggcttcttctctattacttacttgacctaactaaatttttctttgtcattgctttctatttgctttcatccatatctggtttatcatgttatcaaagtacttctagccttgaataggaacaatgatattcctcaattgttctccacaagttgtgatttattattcattaggtgaaaatggtgtttattatattagctatggaatacattattagaaggaaaaagtggaacaagttttgaggaatctagaatggaatgctttttcaaatcctgccttattgtctgaagcattctctttcaataattagaacttgcctgatgagttatataactgtacttctgctgaaactgttattgttgctaaatgttcatctaatgtggagttttttttcactttgccatgtgtactactagctcatggtttcgaatatggatatggagctcatgagtattcgagcagtggggtatttgaggttgaacctaggagctgtccaggtttcatctttaggcgctcagttttgttgggaaccaccagc

SEQ ID NO: 1894 - DNA, 3000 bp, Unknown
  misc_feature (1)..( 3000): cDNA_ID_1663168_gDNA_ID_1620463_Annot_ID_157806 3000 nt of promoter + ATG
tgaaataaccatctgaccagaatgatgtgtttgaaccaaaactactcttggaatcgaatatagattaaaaatatatagtaaactaatttttagagagtttgagtgactattgactaaactatgcttccgtgaaggaggtcccttttgcaagtggacatacgtgagagacccaccattaatttgtctttgagccttattgttgttattgacttttagccaatagaaagagatggaaattcaataattatccacaaaattccaaatcattggtgtacaaaaagatctaaggctgttatattttcaaaaaagaaagaaaagaaatgcaacaaatatggattaaactgtggtttgtaaattgagctttgcatgaaaactttatcactatgatttcactactccatatttattgactaaagtggcactaatgaatttcttaatcatgaaatcttgtatcaaaaagtactaaaataaacatgacattggcaattaggaaaattctaaattagaaattagtaaaaatgaaaggtgaaagggaaagatgatgatatgaattggttggtgaccaggagaaatgtatcccgatttttgcagacactttcagtgtccccattcatataattatggcccacctcgttaagatttttcattcaccaccataacaagatctaagcttagatttcatgtaattaaacatataatatacttgccaatactatctaataaagtatacttaagcaaaaattattactctagtgtaaggcgatgaaatataagtttagttgaaaatttatgtcgatataacaaagtataatgaattaagaccttggttttcgattaacaaactaattaaacactagttttgcctaataaaaccgggaatcgtattcaaaaccgaacgacaaaacaagggacaagttgagagacaaaaccaaatcagcatctttcttccagaaatgtcatgaccacatgacgtcatcttgacccttcttcattgtgatatctgtggataaagcgcacgtgtttaattcacgaaccttcgtagtaacgaaaaatccacaactttcatattttttaattacccactaaactaaaacaaatttggaaaaacatgaaaaactttttctttttttccaggttcgtgaacctcgtaccctctatataaacctcttaaccaccttccacatagaaaaaagttcagatatttgataaatcaatcaacaaaacaaaaaaaactctatagttagtttctctgaaaatgtacggacagtgcaatatagaatccgactacgctttgttggagtcgataacacgtcacttgctaggaggaggaggagagaacgagctgcgactcaatgagtcaacaccgagttcgtgtttcacagagagttggggaggtttgccattgaaagagaatgattcagaggacatgttggtgtacggactcctcaaagatgccttccattttgacacgtcatcatcggacttgagctgtctttttgattttccggcggttaaagtcgagccaactgagaactttacggcgatggaggagaaaccaaagaaagcgataccggttacggagacggcagtgaaggcgaagcattacagaggagtgaggcagagaccgtgggggaaattcgcggcggagatacgtgatccggcgaagaatggagctagggtttggttagggacgtttgagacggcggaagatgcggctttagcttacgatatagctgcttttaggatgcgtggttcccgcgctttattgaattttccgttgagggttaattccggtgaacctgacccggttcggatcacgtctaagagatcttcttcgtcgtcgtcgtcgtcgtcctcttctacgtcgtcgtctgaaaacgggaagttgaaacgaaggagaaaagcagagaatctgacgtcggaggtggtgcaggtgaagtgtgaggttggtgatgagacacgtgttgatgagttattggtttcataagtttgatcttgtgtgttttgtagttgaatagttttgctataaatgttgaggcaccaagtaaaagtgttcccgtgatgtaaattagttactaaacagagccatatatcttcaatccataaacaaaatagacactttaataaagccgtgagtgttaatttttcaatctagtttcatttcttacatgacattcacggctttattaaagtattacaccatatcccctaatacaatctcttaactcaatttgagttctatattgctaagtagccaaaacttgatcgaagaggtaacaattactaaaaccaaaatccatcaacagtagcgcgacaataaataataacctatctattttagatttttttttgttgtaaatgttgtgagcttaagtgtgtaatcacttgtaaatgtttctgtttgatactcttgagaagatgaagctgtctaaggtcgacaagcaaaggctctgctagagaaaattcatttaagcaatcaatttatatctttgatttttgaagcacataaaactttgaacccaataaaggtttagaatgagaaaaaccgtgtctcgcctagaggattcagtattgaaacccagttattctcttaatggactaagaacgaatattcttttcattaatgggctttaaccaacgagagctgatatttattattgttaatgggcttaaccagtttgtagcccacggatagataaagagaggaccagaacacagttaaatagcacccgccgcagagaataataactcaggaagggtttatagattaggtttttaagtcgcacctctctctctcactgccgcatcttttcttagggttcttgtttcgctatctcttaaacacaaacagctctgtccgaataatctctcttcaagtacctcttttttctgattctgtatatcgccatgaattactgatttccctctctataaacccatcaaagtaaaccaatttctcctgtgacttgtacctaactcgatcttaccagactggtgatg

SEQ ID NO: 1895 - DNA, 3000 bp, Unknown
  misc_feature (1)..( 3000): cDNA_ID_3065059_gDNA_ID_1620464_Annot_ID_157845 3000 nt of promoter + ATG
gcatgctcatcatattatttatcaacgatacattctttctttatattaatattggctagcttaaaacttataatacttgttgagagttacatattagttatcctagagaaacaactcaccaaatgtgcctttggattatacattctctttatctattttatacatttttcgaaattggaattattatggagacattagacatatatgaatattttgagttatacttattttatattttttataagtagagttacacttatttaacaggttagcattacgagttcaaaaagaagaatttagttttgctgaaataaaagcttgtgtttatgtctttaatagctcgcacaccacctaaatgggatttaaacttagccatacaacgatgataacacttacaaaagatcatttatatatacgagacggatcccgccagtagtatcgggaggaacgcgagaactgtttatgacattgcgacctacacttgtttaaacatcagataacatatgattaatagtctaaactcaacggtttattgaaacagttagtgaaataggccgaatttaacgtgaaaaatacgtaacagaacgttgattaatagttatatatatgtggccgacgcaaagcatgacgttttctgcacgagctgtcacgcaaggtgacgacgtttttaatcaaagtgtttagggactataaacgtataaattaatctgttcgatgttaatagttctgatgccaagatgcggttcggttttctaaaccggatcgaaagtgataatttttaaaaacttaaaccctaactggctaactctttcactgacgacatacataacacatttcactgactaaacttattttgattagtgtaataaaagagtaaagaactccagtattggcgtattgcttacactgattctgtcatctccacattatttatgtcaagcggatatgttgggttcctattatttcccttttatctagtttataaaactgttatgttattattgttatgatgtactatataacatcctcgtttgcggtctcaaaaaaaaaaaagacaacatcctcgattgtggtggaatctgttccgatatattattggttaatttttgattgaggcgaactaattatgtaataagtactcttcttttctaaactttgaatcatatatagtcaaatattgaaaataataaaaaagaagatacagaaaatttattcgcacatgattttaaaattgacgataaaatcttgagatggggtcaaaatacagtgcattttagtgcccaaaacagcaaaacaattttgcgtggatctcatgtcggaagataacaataaagataaatatcattggctatgtaatatatatagatagaactgtgatataaaaatctatcgcaatatttctattgtacaaatatgtttcctctaactctttcgtatacgtggatagataaggattttgatagtgttgccttatatcttttcttttcactctctttttaagtaccaaccgttgcgtttactttgttcttccttttggaactagaccctaggtcaaacgggcctgtgtaaatttttggattatacagtttttagccggtaaacgaaaaagaatgtattttactacctaagaagaacatatcagaaagcaaacattataaaagaaaatatcgtataagtatacttcatcatttaagattattgattagtaaaatatatatcagaaagcaaacattatatcagaaagcaaacattagaaagatttaatattttgagagaaaagataaattataaggtatgatcttatgagaattgaatctcgaacacgttgctttataacacactacaaaatgtatatttttattgataatatattaccgaatcttcattactaaaaccgcaaaaagaaatcttaagtaaagctataccttatgatttctcgaagtcaaagtttctgtaattagaaagaaaaatcaaatttgctttcatgccgaactgtagataaagatttctaaatcatgccgaccatactgtccattttttcaatattatttaaaattccatgaatatccatcctcaaagggccctgtctagaatacgatacaactagtatataataagtctacaactacgtaacggagttatcattctaaaagataatacatatttgacaaaataaatagaaaattaaagtttttaaaaaaatatttgtaaaatttatgaacatagtggtcatttggtcgagaaagaagattttttttttcttttaagatgaaaaaattgtatgggtcattaatatcatcttattatttaaagatgtacaagctttagcttatctcatttaaggatgtacaagttatatgcatacacacgcaaaaataaaaataaatcaaagtttaatatttagtttggtgagaagaatttgagtcattgacataataaattttgaaatcatgtttgaaaaggagactataagctagtatcggtccctagacgaaatgatgcctcaagaacatacgaagtttattaattaaactttatttctattcattaacaaataaaacagccaaaacaaaactaattcaataccgacatgatagataaaatccattcaaaacctcaaacaaatttgttttggagttaacagaaataaaatattttgaatttgtagatactcctacatgaaagaaaaatgaattacgatatcaaggaccagcctaattattttattttgttagcctaattttcatttctacaaaacatatctccatcacgattttattaaaacaaatcccataattcgattttattatgtggatgtcatgtttacacgtgtcatattacaattcgttaaaatacagtgtctcttctctgtccgactgggcatgacagatcatccaagcaaatcaaatacccaactctcacacgttctcaaacaaaaacttcaaagagagagagagagagagttttgtgaactcaagaaaataaaaaaagttatagtta

SEQ ID NO: 1896 - DNA, 3000 bp, Unknown
  misc_feature (1)..( 3000): cDNA_ID_3065047_gDNA_ID_1620464_Annot_ID_157851 3000 nt of promoter + ATG
tttatgtagtgtaattgtaaatgttagatatgtaaatggggtttggagaagttcactaaactaaaatacttgttaattattgatgatataatactagtttggtagatcgaccctattttgtcaaaaaaaaaaacggtttggtttgtttgaattgaagtacctgtgcaatgtgtttggcagatataagctcaaccataacaaaggaagcatgccatccttgctttaacccaaagatctcaagtagtccatcatcggcttgtgcctccacaaaacctctctgttacgtacaacacaagcaaccgttaataagaaggagaattgataagtagatttgtgaagtgacgaaaaaatgagctttgttttactttttcaagataatcttgtttgagatttccccaagggtttcttccacttccatagctatgtagattcaatgcaacaactgctcttacactgtcccaaaaacaagcaaacacacatctttcattagaaacccaattatgagatttaaaagtgttctgtctcatttgtgttcttgtttctattctgtagataccttttgggaactggtactttctcccactcggatgagtccaacttttttatatgcaatgtcataatgttcttgagacccctaaaaccagataattacaaacgtgttaagaccacaatttgaggttgtaagttgtaacatttgttgtcttggtgttagtatataccttaaacctgggtcatttatgcagtgagtgaggaaccaaccctgagagcaaccatatcccgagtatataatctgcaacaacaaaatgttagctttctttcttgatataaaaaaaaaagtcttagagaaaattatcattctcaagagaatttggtaaaaccttattggcgatagggccatttgcaaggtaaggcttttcgttgcgcaaatggtgaaaaccgtaagccacttgagcatccatacctatactaaagtaattgtagaagactccttcatagccattcgtcgatggagggatctctccctctatctccaaattctgcaacacaaaaattaactcattaaaaccaaagactaataatcacaaaagaatttcaattttgtgtactaatgaaattataaacctggtcaatgtaacattcttgtgtagcctttaaagaataaggaggatccacaatttcaccagaaggcattgtaatcagaatattccaactacatcaagatttcaacatcaaaagattaagcagagagctcaagaaacaaagtgttcatatcacgctttttcgcggtactaattttacctatctaaacggcttataggagcaacacttgctctatgaagtgttcgttttatcgcagatttccacgcaaatgggaatgaacctccctaagaaaaccaacataaaccctaattagaacagagtattttataagattaaagatacaaaaaaagacaataagatctctttttcacccatccgaaacttcttgaaagatcgtttcccgttccgagtggcattatcgaaaccggaggaacgggtaaccggttttgtaaattaagttcaccgagacatcctagaacccaaccaacggttccatctccacctgcaacctgtaatgagtgatcaaaccagtggcaataacaaaaaaaaaaacacattttcaaatctttgattgtagatcaagcaatggaaaaaagtaccacaattctcatcttttcacgaatctctttagcacattcgtctcctcgagacgcaaatgcctctaagcatcccaatccatatcgaataaactcattaggcttcacttccgttaaatcatacacctgttcttcgctaataagattctggagacgttctttaatgagtggaccttgacgaccaccgcttttgggattaacgaagaccatcaaaggaacttcaggcgtcaacgcgttgttttctaacggtggtgctacagaggaggaagcgtcgaaggaatcgtctttacgaagaatgcaatcgcgtattgcaatgcggagatattgaggaagcataactctttgacgaagctctgctttagagactcttatgctcgcgagattgaccaataaagagactttcattgctccgaatgagtcgagagatgaatgtcgtggaatcatcctcgccgtcaatgaatcaccaatcgacggtgattccatctctttctctctctctctcgctctgccaaaaaagatcgaaactttttatcttcctgaagaatcagtatatgaaaaacagaacaaattgggaattctgggttctttgtgaaaagataagaatctttgttgttgttttttgatgaaagaaagaataaaatctgaaaacgaaaaattcgttagaggagaaaaaggaaaccaaaaattgaaaccgatccgagaggaagagatttgttctgatttttctgtttgttttgtttttttcgaccgttgagcttattttcaggacaaataaaaaccgttcccttctcattaactaccaactttttgttatttatataagcccattgggcttttataggcctgttgtctgtttataaaagcctgtagagttaaatctgcaaatcacaaaggaaaacgttaatggtggatctgagcactgtcaatgtcatcaccaccgaagtagagttgactccactcaacagaaactgaaactggaaagtttgagacttttaaggtaagctcatcttgtattcattgtctatgttttgcattttttcaaaggttaagtttttagggttttgcaaacttgaattctcggaaagacgaaaacttgtaactccgattactatagacttttttctgggaatccgatttggggaaacttgaatgtttacccaatttgacttctttgtaagctaatatggtattgtcttagatcagagcaatgcacatgtgatgttatatctgagatcatggaatttaaagaagaaactttgtatcatgagtaatgttgatatgtttagtgatgaaaagttctcag

SEQ ID NO: 1897 - DNA, 3000 bp, Unknown
  misc_feature (1)..( 3000): cDNA_ID_2046935_gDNA_ID_1620464_Annot_ID_157856 3000 nt of promoter + ATG
aaaagtagatttattttgtattataatcaacgcttaccaaaaagtaactagtcttccctacttaaaaataaaattaaaaactatacctaagtactactaattaacttaataacgtaagaaaaaaaaactataccttaccaaaaagttagcttagctcagtttgaaattttgaatacgattgtttgattttagtgaatctgaatagtgaatacttatacgattattcctgtttatttttgtcaactatgtatacgactttaggcgttgcacaattaaaaaaaacgtataccactttagggctaataatatagaagctcacatctaaaaactaaaacccgcttattatgatcttatgatcacatatctgataaaatctttaggccacgtttcgaaagtacacacgatttactcctaattagagagattataatatcaaactatagatttcgtggaaaaccaaagaagtaaaatcattggtccgcttgattatgtatatctattttcgaagttttaagaaaaagatgaatagaaaagttaataacaaagcaaataataaaacatggaaatagagtatatgtaatagactaatagtagttttaacctttaagccttttctcgtgctaaaatcatgtaagaattcttttgacattttaacaaaaaaaatgtaagaacataaataatgagagtcacgacagcttttgctttagttaagcacacgagaaatcatcgattgcaagttcatagttactatctcgcatcctaactaaaatgatacaaatgcattgagcctatatctctttttttctttgccataaagttattttttatatacatattgcaagagtaaattctaaggttgaaagtgctgtgcctgttatacgtaattaattcagtttttttttttttttttcttccgtaattaattcagtttcagttttcctttttttacatactttcaaacaaagtaaaggtagtcaacgtttagttgaaaattttaaagtgtgattgatagccagtataaagcaagatttttatcttttaatagtactaagttaaaattttaaatgactcaaagtaaacgcagatattatcacgtttactttaaaacgcgtattgactttgaatgacttgagtttttctattttagcaactagcaagcataactttgtatattagtttagtttagttttgttttgttttatctccttacaaaatcgtattacttttttttttgtcggacaaaatatagtattacgtactagttcctgctggagatccaaaacttctattatctacgcttttagtttatagtccaagttttgaattgtttttgtcctattaattaaatctttaatgttttcatataatcgaaagattttcaaaacatatatagaccatcataatttttctaaccctattaaatcatatcagcttccatttaaaacgttgatataatattcatctacttccacctactacttgttcttaaagtgtgtaactatatatcacgtgaactgaattttgccatgaacatctcatgaacgaggtacctaaaaatacatgttcctgttattcacttttgaattttgtttctaatatatatcacggagaaaatgttgaattctgaaaagttgacatttaacaagaaatgttggttaaagacttaaagccatgcttcgagatgcgacttcaaatttttttcgtatcacatatttgtgttaatgacattttttgttatcactcgtttacaagttatctatatcaacaaaggcaacaaaaaaaacaaaatagaaaaaaaaaaaaatcaccttatatacatgaatggtggatttagatgaaaaaatggttgtgaaaggaagtcgagaatctaaactaatctaatggaaaatttaaataaaatgttaagtttgtcttataaatgcatctcatagtatatgttgcataccactctcaattagaataatggttcgaataaagaaaaaaaccaaattatttgctttaaaatttatgtaaaagaatattaattattttctaaacaacaatatataagcaaaaagtataatttttggtgcctttaaagatgtgattgtcatattaaaaagaaaatttccctaaagaattaatggtctaattatttagctagcttgtactccagaccaaacctgttcttctgatggctcaaacttaaaaaaacttaggtgataaatgcaacgaaccaacagaaaaaaatcaatttaactcacatccacaattttttttggttcataattaccacatccacaattattattattacttttattatactcccacaatatttttttgccgtatgtatgaaacataccaatttttatagagaggcagagatacgcgtacagcttttataattgaaaagggcaaaagtaaagtagtacttattattcacttcttcttcaccttttctctttgaattttcttcttcactctgcaacttctcttccccacctttctatatttactattttctatcttcaatttgttggatccgaaagttccttccttttttgtttttattattctttattcaaaagccagtttttgtgatccatttgaaatcccaatttgtctacttctcccaataataactctttttatatctctttttttcttcctttacttcagaaaacaagtctaccttcttctcttcttctaccttcttctcttataaaacctatctaaagccttttcatttttttggccggtgggatattgtttgaatgagttcaaccaaaaatcttatatattcttatccttttttttcccgatcagaactcagttcataaaacttgtctgaataatttaagaacccaactcaaaagattcaatttttcgtttttccattttccttcaaagtcttagcctaataaaagattcgatttttatacaattatttaatacccacatataattgaagaaagagagacagagagataacacaaaagtggaagtaaacgaagaacg

SEQ ID NO: 1898 - DNA, 3000 bp, Unknown
  misc_feature (1)..( 3000): cDNA_ID_2025098_gDNA_ID_1620464_Annot_ID_157862 3000 nt of promoter + ATG
acctcccaatgaccatgttgacaagcttgcatcaaagccgtctgtttccaaaaatttcttgtattcagactacttcaaaaccaatcaataatgcaaagaacaaaaagacactaatcacaacacctgtccacggtagttccggagattaatatcaactcctgattccaccaacagagaaactatctgaagataaacaaaacccaaatcaccaatcaccataaaagtcagaactttagaatctctaatcttacaaagtattgatctttcaagtaattacagttacctcgtggtggccttgagcggcggagtaatgaagaggagagttacgaacgccaaaagtagagtaacgagcgagtcttggattgtaatctaagagagctttagcttcctgtaaatcaccgtctctggccgctgatactaagcgttcgccggacgcagaacaaccgaatgagtttccgacgaggcttagaaacctcatcgttttacgatacaaaattgaaattttgatcggatcaaccctaacaaatcaccatcaacacaacaacacgaacaaattttattggattcacaatttgcagcaaacccaattcgagaaccagctcggaagaatcgaagaattgaatttaatttcaaatgattgcaacaagaaaaatttggtttttattttcttcctctgtttttgttgttgttggtgttctttaattctcttatgtacagatcagatcatcatcatcatcatcataatgatccctctttaagaaagaaagaaactttaaagaattaaccaaaaaaaaatcaaaactttaaaagaattgaccaaaaaaagctttaaactttagaggaaagatcatccagaaaacttctctgacaattgtaatacagagaacatcaaaaagaatggtgaaattaagttgtgggattttttttttggtcaattgattaaggaaaataacaaacaataataacaaattggtgattactttatttttaaaccaaaaatggaaaagaattgttctaaattttttattgtgtgtggaggatctcttaatattttgtgatggtgacactaattaattgacttttaattatttgaacaaaaaaaaaatatgacaaagccaacgttgtagccagaggtttcgataaaccaatagccggaattcgcgcgtttttttgttttaaccaaaatcttaatgattataaagattctctaacaatgaaaaaaaaaagacattcttcatcacaccataagaaagctttctcctttattacatataattaaataaataatcttactatactgcgtaattgaataaatataggttctttttgtgccaacaaataatgattcaattagcaagtctccaaaagtaacatgacattagtggaaaaacaagtgtataataatgaaatgtggaggagcatgtgggtcgtgtcacgtcatgcttataattgcatttgcattagcaaacctataacattaatgacttcaaattttaacattagcaaatcagaatgatcatgccaactctcagcaaatatatttatcaaaaaaactctcaacaaatattacttgattttaaagatgacccaagctatcttcaatctcactttctgtagaatcactaatttgtgtctcacaattgtgcaaaactgtggccagttgctgtaaattgacagaaaattctttagttgacaatttgtcttgtactttggaacttgtagcagagtttctttgtccagagttaacactatccaaactaaactccaactcccaaactggatgtacaagcttaaatctccacttgtgctttatgtggaacttctccacaccaaaaatgagttgtgtaattcagtctgaaacatgtccactattccacatctatgttctctcgagtccacatcacacaatcaagtaggtgcatgtgcacatgttggaaccacaaacacaacaccctcactgtcctagtgttttgtaagagagagatgtgaagtagtctagaatgtctcatcaagtcgtcctccaaatgtaaccatatatcctcaccttctgtacacattttcaaaatagctgcaatggaaagtgaagttcctgaaaagtctagagtataaccagctcaattttgactttctgatatcctttgttgaatggccaactccatagacattaacacacactcatagtttggcttcatagtctgctttgacaagccagatccagacttttgaacattaattctcattccttcccatgcactgcttcaatttcgcgagaaacatcttgcataagcctatgtcccaaaagtttcttcaagttctcaaacaacatgcactgcagctttctcgaattccacctcacaacagaacttgttttttgtcattttgatctcctctaagctaaatttaaacttgaatttccaagctttagggaacttcatatggttcatgtctctgacatactgcatcatcctcattttgcacctactgttccagcttcccttgagtctttttatgttgttcttggtatagccctctgcaaatacgcatgcttgtaattttgtcaggctactttttttcttcatctcgttgacaaatctataacagattctgttaaagtgtctgtctttcgttcgtaagatcattacgttcatataacaatatctttgatgcttgttttgttattcccaattgtcttgattaacgaagaaaaaaacgaatccttttaattttttctcctctgtttgttaatccgttactgctctgttagtctaatgtcaaagaaaccacgttgcttttgaacaacaatacatctgtattgggaaatctatgaatacttgacttctatatttaggaaaaccacaactcactttgcactgaaacgtcaacgttttgtttctttactttttttggttacaataacagagtcttcctattattcactttttttatcttctttcacttatttccccatctccttcctcttgaatctttctcaagaaaacc

SEQ ID NO: 1899 - DNA, 3000 bp, Unknown
  misc_feature (1)..( 3000): cDNA_ID_3065045_gDNA_ID_1620464_Annot_ID_157855 3000 nt of promoter + ATG
atctccctttgataaaacaccgcgtcgtttcccattcccgagcttgcactgactaacagttgcagccaccgcagcggctgcatcattctgccaccaaactttctcggtcattcccttcaacagcttcttaaacaaatcaatgtctaacgaattcccaagattctccttttgcaaaacactgatgttattattgttctgcactgattcagacgatatgcagccgagaaagtctcttacttgcacatctcctgctttctccgaatcctgaaatacgcaaacgcaagtatttagcgtcaggtttgtgatttcgattagataaacattttcatcacagtatacaaacattcaaatcaacaaacctctgctcgtccaagaacaagatcggtctgaaccgggctcccgggaggactcttcttcttggcctgctcagccaccaaaggactcataggcttcaagtgtaccctctcacgcaactctctattaggctgtaacttaggctgcaacggctgacgaagaagcatgttaggactgtaagggctcgttgtcaacgttataggaaccgggatcggaacaatcctctcgttcttgttatgaaagctaggatgaagacgcacgcatgcatcattccatttcttctgcacttcttcaatctttgcttgctgtaataaaaacattacaaaactgataaatttatgatctgcaatcatatcataaagccattgcaattgttgaagagaagattcaataaccggaacttaccggtaaacgatcaaccggtttagctttcaacagccactgtggcaactgtttaggctgagctacttcagatttaacctctggagaagacactgaatcaatctcagcaagttctcgctcgtaactctgtaaacactgtggacaacatttcaatgtcctattcgcaggcacaaagctcttcaatggcgtgaatgattccaaattgttcgcaagcctgaatcaaaacatgaatctaggctaagaaaaaaaatcataaaagctgagatttttctttagcaaaaagaagaaactttaacacaacccacctcgggaaaacgccagacgctggagctttagctgccaccgacacagcttgaagatcccaatcagtctccactgatggatgataaacttgacatcttaaataagtctcacacgtcgccgtccctataaaccagagtcttccttcaaacttctccaaaagcctccgtaactccaccaccgccgtcctcccaatctccaccgcaaccgtagccggcggttgcgttgaactcggttgctccactagccatttcaagtcaccaagatcaagtatcactccgccgccaccaataggatccgaattctttaatcgggtctgaagcaacccatctaattccttaattcttaaagccttatcggaactaatctcctctaaagaaaccacctttgagttcttcaccgctaaattcccaacttcaccgacttcaattttcttaaggatctcacgaataacccgacccggctccgaatcaccaaccaaaaccgggtttttcttcttcgcccgacccaatatatccataacccgctccacatcatcgttcttactcacccctgattgtaccgacgaagcgttctgttgtaaccgtggattaagatacgaattccgggtcatcggacctccaccaccgggtctaaaattcaacccgactgaagaaacactaggaatcggcgtcggagtaaccgaattattcaacgactgttcaattgtagctttaacggcgggacttgaaaagctagcttctctcataacccgactaacactcggatcatccaaaatcgagataatgagctgttcaagctcaactttaacggccaacaacggttgctgttgttgctccggacaaccacggcgttgatgagcttgagctcgtttaagcgccgccataagcgcgtttgagatcggtggatcattccccggagtggttgtagctgttgggagacgctctaaggcgacgctgaagcagagctcgagggctcgacactgtaaaggatgagaagaattggggtgagatcggatacaagctcgtcggagaaacccagcaggagaagctagaagagtggctgcaacgtggagaggagtggtttggccgtgattacgacgcgcggcttcggcgattgattggtttaaaacggtggcagcctccggcgtcagagtctgttgaatcgtacttaaaccagctctcatcgttcttcgtttacttccacttttgtgttatctctctgtctctctttcttcaattatatgtgggtattaaataattgtataaaaatcgaatcttttattaggctaagactttgaaggaaaatggaaaaacgaaaaattgaatcttttgagttgggttcttaaattattcagacaagttttatgaactgagttctgatcgggaaaaaaaaggataagaatatataagatttttggttgaactcattcaaacaatatcccaccggccaaaaaaatgaaaaggctttagataggttttataagagaagaaggtagaagaagagaagaaggtagacttgttttctgaagtaaaggaagaaaaaaagagatataaaaagagttattattgggagaagtagacaaattgggatttcaaatggatcacaaaaactggcttttgaataaagaataataaaaacaaaaaaggaaggaactttcggatccaacaaattgaagatagaaaatagtaaatatagaaaggtggggaagagaagttgcagagtgaagaagaaaattcaaagagaaaaggtgaagaagaagtgaataataagtactactttacttttgcccttttcaattataaaagctgtacgcgtatctctgcctctctataaaaattggtatgtttcatacatacggcaaaaaaatattgtgggagtataataaaagtaataataataattgtggatgtggtaattatgaaccaaaaaaaattgtggatg

SEQ ID NO: 1900 - DNA, 3000 bp, Unknown
  misc_feature (1)..( 3000): cDNA_ID_2046950_gDNA_ID_1620464_Annot_ID_157850 3000 nt of promoter + ATG
atgcgaacggtacaaatgacacataaatgatagtaatgataatttcgaatatggaaataagtaatcgacatggtctgttacttattttctatttttaaaataaatggtatccatcaatgatcaatcacacccaattctcctttagttttttgttaagtcgcaaccaaaatttaatacaactcaactataccgacaatgaagtatttcctttcattattgtttttggaccatagcctacaattatttaaatacaagtcttacataaatccattaatgatagaatctttttccgccaacaaatccacgatatatacgtatgataaataaagtaaatctctaacttatatgattacaataaatatattataaacaatctcaataatattcatcaactagtggcaacttttacaaactcaagaatcgatcaatcaataacttacaagacaagaaagagaacattctttgttcttccgtaagaaggaagtcacactccacatcgatggttcaagagacaaatagctaattaattaatgtttggttcgtacaaatccaagttcacgtgtcctcctcctgcttcaccatgtcggtatggcttcgaatcgatatctgtcgcagtcttgagcaccacatgctgcgtatagagaccactcaaaacgtgattgaataataacatcaaaagaaacaaaactctttgttaattaatcacatttaactgtcttaatttataccttaatttgtgtcctgttatatgtataggtgacgtggacattgccgtctccggcttgtataacagccgggtacgaatactccattcccggagattcctccaacgttaaaatatcggtccatgaatcaccgtcgtctaaagaaactcctaatttgagcacacctcttgagtctgtgttgtaagcaagcactagcctaccatccttaagcttgactccatcaatacctgtcaacattttcttcaataaaatcgcgctaaaacgaagactagttatacaatgtgtttagtttcgatttcaagaaacctgaatttgggtttgggagaaccgttggtactgcaaaactccagttctcaccgccatccaaagactctgagatacagattctgtcaatgccagtaaaggatctgagtaaaatccgtaagttcccagctgcggtttggtatggaactggttggatcacgctaagactcttgccttgaatgtatattggccctttctttctccatgttctacccgcatctgaagtgacctgaatcaaccaacacatttcagtgtaaaatcattgtagcatactctaaatatagaaatcaaactaaatagttttaagaaacctccatccatgctccccaagaattccaactctcaacagatgatccgcaaaggagagtaccgtcttcaagcaaaatgggctgcagaagaaagaagagatgaagaaggaagcttaagctaagtctctaaccagtacaaaaggtttagtcttaatcgagtaatcgagtctgcgcaacgcaacaagtaccttgtttttgataggaccgagaatcccaggaggaagctgttctctttcagtccaagttatacctttatcatatgatcgtttcatgcaaccactccatctgagctttcaccaaaacacttaacatatcaaagaaatgtaacaaaacaaaaaagagttactcggttgattgaaagacatacttttgaacctcctggccgattttgtagaacaataagagctcatgagatggaagtttgaacaagacagggttatacattggaactcctggctcttcatcaacaataaccggtgaatcccattgaccatcctgagaaaaccaatcaattattacacacaattataacctcagagagtctctaaatgattgaaaagtctatataataccttgaaatgctgcaaccagattttgacatcaggtgctccttccctggtgcctccgaaatacgcagccaagaaatgatctttaacaaccttttcacaaaatgtagaaattcagaacccaatccatcactgatactactaaagatccagtcaaagagacttgtggtgatcttaacctcaactatggtagaggcatgacaactcttgaagggagcagaatcagcaggaaatgtgaatgtctcaagcaacactttaaattctgtttctgacatctgagaacttttcatcactaaacatatcaacattactcatgatacaaagtttcttctttaaattccatgatctcagatataacatcacatgtgcattgctctgatctaagacaataccatattagcttacaaagaagtcaaattgggtaaacattcaagtttccccaaatcggattcccagaaaaaagtctatagtaatcggagttacaagttttcgtctttccgagaattcaagtttgcaaaaccctaaaaacttaacctttgaaaaaatgcaaaacatagacaatgaatacaagatgagcttaccttaaaagtctcaaactttccagtttcagtttctgttgagtggagtcaactctacttcggtggtgatgacattgacagtgctcagatccaccattaacgttttcctttgtgatttgcagatttaactctacaggcttttataaacagacaacaggcctataaaagcccaatgggcttatataaataacaaaaagttggtagttaatgagaagggaacggtttttatttgtcctgaaaataagctcaacggtcgaaaaaaacaaaacaaacagaaaaatcagaacaaatctcttcctctcggatcggtttcaatttttggtttcctttttctcctctaacgaatttttcgttttcagattttattctttctttcatcaaaaaacaacaacaaagattcttatcttttcacaaagaacccagaattcccaatttgttctgtttttcatatactgattcttcaggaagataaaaagtttcgatcttttttggcagagcgagagagagagagaaagagatg

SEQ ID NO: 1901 - DNA, 3 bp, Unknown
  misc_feature (1)..( 3): cDNA_ID_2146320_gDNA_ID_1620465_Annot_ID_157875 3000 nt of promoter + ATG
agt

SEQ ID NO: 1902 - DNA, 3000 bp, Unknown
  misc_feature (1)..( 3000): cDNA_ID_3065076_gDNA_ID_1620465_Annot_ID_157892 3000 nt of promoter + ATG
catattgtatgaatgtaattactatgatttaagggcactgcttttctgttttcacgttgttttcgaaattgctattgcgtgtgatatctgtgttggaccaattattgaaaaggacaaggctgactctggtttttaatgagtagtccccatgggagttatgttcatttaccacacatttttttgtatagtatagtatgagtttttatttgatatcttttatcttcggaaaataaatggttcaaattgtttgtctaaaaatgcacacatgaatatcttgtggtctcacacaattgtaggaaacaaattaatatttgttgcgaaaataatgttattattttatcatacgaaatcctagagaaaatggtggcaaaagaggcaaagactaaactaatgaatttaaaatatgaaaatgatggaatgactggtttaccaatattacagtatattgtaattttataaaaacgaatcctgaagaagagggcaaaccccaagaccacgcaaatcagtctacaaatatgaaaatttccaataactagaaaaacatgtgcatttatctttttccatcattcggatttttacaatggaaattttgaccactgagcgcaagtgttatagtattttattattatccaatattaatatcattattcggatccatgcattctatataactatgtccaccatcttacttgtgtctatgttgcaacttcaacgtcgtatatatatagggattgttgtcacgaatacaatgctaattaaggaagattgtgacttctcggaaaatttagaactaattaagagtggaactaaaatgccaatgaaaatagcctaaatcaaaggagaaccacaaatataaattggaagaccttaaaaaacaattaaacgaggacgaaacaaattttggaatcatcaattatacgaaaaaaagaagaaagaaaaaagaggtttcatgaatcacagtagtgctgacaatcttcgaaccatttgtgggtttcatacaatcgatcaccaatagaacaaaagagaaacagaggaacagaaagaatagaaggagtgggaagtgtatgaggaagctgtgtccgaacatagacaaagacgatggtctggagacggtgttggaagttccgataccggaggagatgttttccggtatgggcaacaacgttgcacttaggtggcaaaatatgatgacgtggatgaaagctcaaacgtctgataaatggtcgcaaccgcttatcgccgctcgtatcaacgagctccggttccttctctacctcgttggctcgcctcttatacctctccaggttcaagtcggtcactctgttcataagcccgtcaaagattgctccattgtaagtcattcaaaatcaatccttatgaaaacataacaaagatgttgaaaatatgattcctcttttttttttctttttttcttttatgatcaaaacccaaaaaagtcattaccctgcttcgtaagtattcaacataaagttgttaatccatgtgttgtactctgcaagtctgcattacattattcatcgtacacagagtcatcaacttcagtttcattgtttttttgcttatgaattacgattgcagcaagcttcaacggcgaaatacattgtacagcagtacatagcagcgacgggaggaccacaggcgttaaacgccgtgaacagcatgtgcgtcacgggacaagtgaagatgacggcgtcggagtttcatcaaggagatgattcgggcgttaatctaaagagcaacgacgaaatgggtggtttcgttttatggcaaaaggatccagatctttggtgtttggagctcgtcgtctccggttgcaaagtgatatgtggaagcaacggtcggctttcatggcgacattcctctaaccagcaaactccggcgtctaccggaacgccaagacctctccgccggtttttacaggtccaatccggttattgattttttttttgatgtaatgtccggttctcaaaatgttgaaccggtggtttatttattgtttgagcaggggttagatcctcgttcgacggcgaatctgtttcttgacgcaacgtgtatcggagagaagataatcaacggtgaggattgctttatcttgaaactggagacgagtccggcggttcgagaagctcaaagcggtccgaattttgagataattcatcacacgatatggggttattttagtcaaagatcgggacttttgattcagttcgaagattcgcggcttttgagaatgaggaccaaggaagacgaagatgtcttctgggagactagtgctgagtcggtgatggatgattaccgatacgttgacaatgtgaacatcgctcacggcgggaaaacatcggtcacggttttccggtacggtgaagcgtcggcgaatcatcggagacagatgacggagaagtggaggatagaagaagttgattttaatgtttggggtctctccgttgatcattttcttcctccggccaatttgcagatcgaaaaatgatttagctttttattaaaaatattgttattcgtttttagccgatatcataactttttgagatacattatcaacacactcgtgcaactgagatattcttgacacaatttttgcatttgaaattggcaattttgtactactcatatagtttgaagcttcaattcactacaaaggttattactaattgtgtcgacaaatccagcagatttaataatgcccattccattaaatgttttttagtttaataataggatgatcatatgaccaaaatcgtaaataagggttaggggtaaacctgtcatttcaagcttcccgcccatgggcgctactcccaatttaataaaaaataagaaaataggcgtaaatatgagagtgtgttttttcaatataccctcggttttgaatttgctctcaaaagcgacggagacgactgtttggctcggtgatttctcccgccgtttgggtttttcttaccggaatttccttctccttcg

SEQ ID NO: 1903 - DNA, 3000 bp, Unknown
  misc_feature (1)..( 3000): cDNA_ID_2991503_gDNA_ID_1620465_Annot_ID_157893 3000 nt of promoter + ATG
tgaaaaaccacaagtgtaaattgttgagggaactaaaacacttgaagatggataacaaacttctgctgacaggaacacctctgcaaaataatctttctgagctttggtctttgttaaattttattctgcctgacatctttacatcacatgatgaatttgaatcatggtacaaacatggtccttttctactattatccctaactagtcttctttttttttttttttttgttaacactggtggcagctttttgacatttattcctttcttagtatctaactgatagatgagtctctacaggtttgatttttctgaaaagaacaaaaacgaagcaaccaaggaagaagaagagaaaagaagagctcaagtatgtacaattatatcaattttcctttatttctttgattgtatttatgtcttatgctaagggtacatcttgtctaggttgtttccaaacttcatggtatactacgaccattcatccttcgaagaatgaaatgtgatgttgagctctcacttccacggaaaaaggagattataatgtatgctacaatgactgatcatcagaaaaagttccaggaacatctggtgaataacacgttggaagcacatcttggagagaatgccatccgaggtacatgatctattttttttttttaatactttgtttaattatgtcattttctgcattgatttgttcatcccctatacttcaggtcaaggctggaagggaaagcttaacaacctggtcattcaacttcgaaagaactgcaaccatcctgaccttctccaggggcaaatagatggttcatgtatgtcagtttcttttaagaaacgtaagaaaaacttctgtcatactgttctgtctaattgtttcatttcgtgacagatctctaccctcctgttgaagagattgttggacagtgtggtaaattccgcttattggagagattacttgttcggttatttgccaataatcacaaagtatgtttcacaaacccatggctcgtagctcatttccctttgagaacttctctgatccatttgctgatgaccaggtccttatcttctcccaatggacgaaacttttggacattatggattactacttcagtgagaaggggtttgaggtttgcagaatcgatggcagtgtgaagctggatgaaaggagaagacaggtttcacctgtgcttatgctgcttttgcgttgcttttaagcaatattctgaccaaatattataaccataaggtctctctctctctctctttgccttgaaacagattaaagatttcagtgatgagaagagcagctgtagtatatttctcctgagtaccagagctggaggactcggaatcaatcttactgctgctgatacatgcatcctctatgacagcgactgggtaatcaaatcaattaatttattttctttgaaggaaaatctttctctttcgtgttgtctccaactgtgttttgtctgatctccagaaccctcaaatggacttgcaagccatggacagatgccacagaatcgggcagacgaaacctgttcatgtttataggctttccacggctcagtcgatagaggtaaaactctttgttgttcatatcaatcaatcttaacttcaaaccattgagattgttgcctcatgagattggtttatgacatttgctcagacccgggttctgaaacgagcgtacagtaagctcaagctggaacatgtggttattggccaagggcagtttcatcaagaacgtgccaagtcttcaacacctttagaggttttaacttctcttaaagctcaatcctttttagatacacttattatcaacaaaatctcctattgacagcttgaaccaaactaacacacaggaagaggacatactggcgttgcttaaggaagatgaaactgctgaagataagttgatacaaaccgatataagcgatgcggatcttgacaggttacttgaccggagtgacctgacaattactgcaccgggagagacacaagctgctgaagcttttccagtgaagggtccaggttgggaagtggtcctgcctagttcgggaggaatgctgtcttccctgaacagttaggacacattaataagccaggccttgaaaccacttctgtgttttttttttttttttccggaacatgatcggttacttttggctgggaggatttaattattagagggctcggaagtttttgtaagttaaagaactcacttaaaaccctgaaaacatgacagttaatggtgattagctctcaatgtgatgaaaacaattggccctctgattttgctgttgcggtaatattatgacttgtgtacgtttatagtctttgtagtctgcaattttggcattgagctatttctcacgaacttatgggatcttatgttttggatttgggatttgttaacttatatgattaggctcaatagtttcacagaatattaaaaacttgagtagggtttaaaaaagaagcaaaaagctccgatgccgggaatcgaacccgggtctcctgggtgaaagccagatatcctaaccgctggacgacatcggatttgttgatgtctattcttgtaaatagtaaatatttagttttatcggttttgcatctaatggactaaaacatgaacacgagacgccgacaagaatgaatggggcaggcaccaaacatttgggtaaaagtatgcagtggggtattattgacaatttgaccattacaagagctaatcttagggggttttagttagtaaagcaaacccggtttaggagtaaatatggagtgagaataggggtaattaagggaatttaagagaagtcatcatcgttttccatttttcttattttaagcgcctcggtggctatctctcactccgttcgcgtcttcctcttaaaggaaacctcctctacgcgaaattcgtattctctcatttcttctacggagatttgcatcgaagaaactgactcgcttgtggaatcaacaacaagacg

SEQ ID NO: 1904 - DNA, 3000 bp, Unknown
  misc_feature (1)..( 3000): cDNA_ID_2146370_gDNA_ID_1620465_Annot_ID_157891 3000 nt of promoter + ATG
aaacccccaaaagaaaaagaaaaaaaatcaaaacttcattacccaagaaatctcttaatcatttaacccagactctctcttctccacacgcatcttttatccaccgtccaccgatctgatccaacggctgagatttcaccggagacgagttatccttactacttccggcttgtttctctctgaagaatcaccggaaaaaaaaataaggcggcttgtgtgtgagactttgtgtgaaagcttcaaccttttttttctttttctttggcttgtccaagaaaaaggagccttcttcttcttttctctctctggagacaattatactaatttttttctctcaacttttcacccttttttttttgttaacaaacattttttatacataattgtgtcgactttcaagttccaagtatctaaatctgtattttggactcccatgcaaataattaaaatagaataatctttttgtagattttaaattgaaaacggtgtagaaaggttaaaagcaccaaacaaaacgagtaaatagatattgtaataattttttcacctttatggaaaagattatatcatagacgatgtacacagatgaaaattagaaaatggcatgtgaatatatgcagtacccaatgaatgcaatatcaggtttgtattatttttctattgtatctctacatgttacgtaatcaaacgatcaagtaatttattaatattgtcgatggcgtagaaattataaatttattttatgtcattgtttactatatagattttgagctaaacgacttattttgtcaaaagatatatccgtgtttggtttaagattgggttttagtatttccaatattaatctaaattcttagcttatgaacatgtcaataaacaaaaaaattattttactgtcactgtccttagacggggacaaaggagggtattaccgtcgcgttgtcggaccgtaaaataattaaccaaattttgttgttgaacgaataacattttttactgtgggaatttgtcgtgtagcattacgttcgaaatcgcaatttgttttcttctttgtgggtgtatatttctggttaacgaaactataacccaatttaatgcaatgttcgtctgtttttgttgactttgacccttttttggtaatattcgttcagcttttgttttaacgttttcattgccttgtaggcatctgagaagctcagattctgacacgtgtcttttgttatctgaatttgcatccgttggataaacatgacgctgacaggtggattgaaaagtaaccagcttggatttctgtgtatatgttacaccgccacttcccttaatttcttcgttcttagttaaaataaaaaaggtttaatttatgagtaaaagtatgtaaaacgacaacgattactataagaattaaaatttatctttgcttagtaatttgcacttaagattggattcaaattttgtaaaaagcgaatgttacatatatgtccattgaaaaaattgcatttgactttacaagcattgaaattaattaatttgggacccctttttttgttagtttcaaaggaagaattattttaggctgagatgggtccctccataaactcactattctgccagcatacaaattccttaacatatggtccaaatagcagttccaaccactagtatccaataataatctgaacaaattatctttctttttttttcctgataatcttgtatttgtttgttcaatgagcttaatacgtatattagttatgacttataactaaatactttgactcacttgatccgtacacattgatttcgtttattcaaatccgaacaacgtaatgatctttttgggccgagttatttgtattctcaacctgagtccaaccatgctttatgggcttttctgtttatttatgcatgtaaagtttataatgcttgcaaataaccacatattgtatgaatgtaattactatgatttaagggcactgcttttctgttttcacgttgttttcgaaattgctattgcgtgtgatatctgtgttggaccaattattgaaaaggacaaggctgactctggtttttaatgagtagtccccatgggagttatgttcatttaccacacatttttttgtatagtatagtatgagtttttatttgatatcttttatcttcggaaaataaatggttcaaattgtttgtctaaaaatgcacacatgaatatcttgtggtctcacacaattgtaggaaacaaattaatatttgttgcgaaaataatgttattattttatcatacgaaatcctagagaaaatggtggcaaaagaggcaaagactaaactaatgaatttaaaatatgaaaatgatggaatgactggtttaccaatattacagtatattgtaattttataaaaacgaatcctgaagaagagggcaaaccccaagaccacgcaaatcagtctacaaatatgaaaatttccaataactagaaaaacatgtgcatttatctttttccatcattcggatttttacaatggaaattttgaccactgagcgcaagtgttatagtattttattattatccaatattaatatcattattcggatccatgcattctatataactatgtccaccatcttacttgtgtctatgttgcaacttcaacgtcgtatatatatagggattgttgtcacgaatacaatgctaattaaggaagattgtgacttctcggaaaatttagaactaattaagagtggaactaaaatgccaatgaaaatagcctaaatcaaaggagaaccacaaatataaattggaagaccttaaaaaacaattaaacgaggacgaaacaaattttggaatcatcaattatacgaaaaaaagaagaaagaaaaaagaggtttcatgaatcacagtagtgctgacaatcttcgaaccatttgtgggtttcatacaatcgatcaccaatagaacaaaagagaaacagaggaacagaaagaatagaaggagtgggaagtgt

SEQ ID NO: 1905 - DNA, 3000 bp, Unknown
  misc_feature (1)..( 3000): cDNA_ID_2146350_gDNA_ID_1620465_Annot_ID_157883 3000 nt of promoter + ATG
aattaaaaattcaaagttaaaccaatcaaatatatatctaatatttttttcgcgttccctatatatatggttttgtttgttagtatttagtaatcgtaattaattggtttactttaattatatatatagttttcttagagatgattggtccatcgtaagagctagctaccccctcaattgtcgtatacaactcaatattatgatcatgtatttcataaaatatcttctgaggaatctatagaaaaatgaccaattaatcaccacatgatcgggctcacgttggagatggtggatcacatgcccgatattatattttatgtaaatcagtaattaatattgaccagcacatattccaatggtgaaaagaattgtatacacattcagacattctatcgaaaaaggaagaagaaaaacaaaaagtgaggagaaaagaaagatagtaactgttttgattctatgatgaaagtaccttaataagcaggaatgcaattataaacttatagcccatgtattattagatcaccacacaaccatttcttttttttacaaacctaaccctactttcttcatcaaccatggattatcgtttgtttgattgctggtaaccaattggtcacattttctaatcccatatatcacgactcacgttggtaactattccatcacatggctttacgaccaccaatgaaaatattgagattcacgaaaattattgtttttttttacttatcatttttgtcaggtgaacatacagagctttaaacgttaaacttataatagcggttataagaaaatacaaatcaaaattataaaatgcaagatcactataaaatgccaaacggatgccgtggcttctgtcttttgggtgccataaaatttgattcattcaaagaacattattctaaataatggcggtcactccggtcagagaaaataatcagttaatagtaaatcaaaattggatgtttgttgttgaaaattccgcttattatgatatggtcttatgactaaattttcttgatattacgtaatatattcttcctgctctctaataaaacaaaatatataattaaatttcataatagaggaaatgattgaattttatttatggttctatggaaggaaatcatcaaattaatcaaaaaataaaattagatttgaaacttaactagctctatttagtttttttatatacaatgttttgtaaccaaatttcttatcacgctatctccgtagttacgtaacattaatcccgtgattctaatgagacaaatatatttaacttgttatatggtaagtcaaggctggaacgaagaaagtcgatctccgtcttacgtgatacgatcttaatcttgttctgacttcgtatttgataatgtattatatgaactgttttttatcttcttcttttttaccaattaaagtgaataattgatattactattagaatatttaattggcgcgacaagttaaataaactcatcacatgtcacaatgttacgtggtccaatcattctctcacctgccacaatgataatttcatattatatatgtaatgcataagattgaataattgatgttacttgccatctagataggtaaatattgggtccgagtttaggtttggaggaaaaacgaagaattgaaaaccaaatgatagtggtttagtggtcactatttcaagaagaattgtcatgtataagtaggaggtcgatttactctaacagcgaaatttactaaattatttcatatgtatagtcgaaatggtgtattgttttaggctcattagaaaattcgatgaatgaactattcgacaattatactgattttaaaaagattagtcggatgaacttttatgaagtggaattgtgaatagaaaaataaaaagtaaaaaaatatatatagtaaaagagtggaaatattgttgtactttcctccaccactaaaggaactgaataaataactatttttattcgtttttcattttgattggtgattttttagtaagttataagaataattttgtttttctttgtttagttctaggcttctagctaacaaaagcttccagtgaaatccattatttgcggtcccaagtatctctcaaaagtcatggccatctacaccaacggctcatacagagcaaactcctcatataataaacactgatgatgcaactcctcatgttcgctcacgctccactataaatgttgtttattgcaagaaataaaattatgattctgccactgatgttttttagtggttaagcatcaatattggtgatcaccgcttgatcaacaattgccaaaacatattcagcgaccacaatgacgttcaaagaatttggttgaatattagcggtaaaattaattctcttatttcattggtcaaatacttaaccaccaaaataataacggttatttttggcgaccatcactaattatcgtagtggttatgtggtaattgaattaacatttgatatccaataaatttggctaccgatttagtcatcaaaactgtcatatttgtctaactattgttaaaatatacaatatatttttttatttttttactaattttaaaacaaaagttatactccaactaaataaaatataaccgttttttaaataattttaataaatggaaaaaagaaatacaacaaaaataaaatttgttcaacgattgatgaaaactgggcaaatcaaagcatctgccatctggtctggtggttggtgaaacccaacccacttcaatgccaaaataaaaagtcttatgtaagcccattaatttaaagcctactaaaggatttgattatatatttcggcccattttcaatatttcgagcagtacgaaaacgccgtcgtttgagagtacgtgatcgtcaacgcctgggtccgttctacgatcgaccatcgccgagtctgcttcttcttctctctctctctctctagtggtcacactcacttcacacccgtgaaaaaaccctaggaaccaaatatg

SEQ ID NO: 1906 - DNA, 3000 bp, Unknown
  misc_feature (1)..( 3000): cDNA_ID_2146358_gDNA_ID_1620465_Annot_ID_157887 3000 nt of promoter + ATG
tcaccactttcccttccttcgtcattattctttttacttctcctttgccattttaaataggccaatattcgtatttgtgcaacaaaataaatcaaatatccaaaataattattatcctctatttacacattcgtattcgtataaatgaaattacattagtcaaaatttcggttataaattataattgtgatcttctgtatcattcttaacatattgttatgtacaatcagaaatagcaagtaccggttttattttggaaatacgttcgatttgagataaatataaaactgcaatagctaggtccattaaatttgaagatgtgacgttagaagagacaaaatgatggccggggacaccggacacaccatttctaattttacatagtatacatgcccaatggaaatagcttttagtatgtgtgagttgtatgatgcgtcttcctccaatagtgagaaaagctaatgggggacatatatacaactaaaaaaagcttttctcgttttcatcttctgattgggtgacgaataatcacgtttgaaatacccgagaatttaccataaatccgtacctcaaaagattcatttgttgtaaagatatatatacagaaagagcttctttatttgttatttttagcttctttcatatgttatcaaaacattggttttcaaacatctaatccatttgatctataactaactaacatcgacatataatctcttaattaccttcaagtcgttttctgtttttttttaataaaaaaatagagttacgtcaaagaatttgacactttgattccaacttattatcttttcttctttttgtttttcaacctgcaaggaacgtcccagtagataagttgaattttatcctcgtccctctttgaagtccacgtgaacttcacgtgcatagccgtcactcaatgtcggaatacattgtttttatttttcttcttctgtgaattatttagttcttcctaattatataccttcccatgattcgtgttcgttgcccacacattactatctctcttttactcacctaaaaaggcacactataaccttatgtatcaagtgaccgttttttaagatgaaaagtgttgactgctatattttatcatatactattttaaaccaatcagtcgtgtcaattctgtatatatgtttttttctcctttagaagctagggttgaacaccttacaaatcgaaagcaaggcattgtaaaaaaccacgtacccttctactaattaagccttccacaaatttaatataattttagtgttcgaatggtgataaaggatagtgcagaacatgatgctaaaaacgaaagcaatatatggttatgatagaagagattgaccaaaacatgttgaacaaacataatagaattattaacataacatgtgttcaactcattttattggttattttgtgcaagtgtggtgttttaaatttttctttaaacatgcattccaaattcatgtgagcgaaggtgtgaaagctttaatgtatttgctgcttgtggccaatctttaattattccaccacattattcattcccttaaatgtactaaacaaattgtaaggaatataatttaaggtttttggtacgaagtaatgaaggcatgaaagcgtttatgtctttgctccttatggccaatctttatcctcccgttgttgtgtctcaaactcggaaccttaacttcctccttgatcaagaaatactagttcaactataacagacgtatatataattctcatacaccaaaataggaccttaatctcaaagacctgcaacgtcgatgatacgtaagttgtcttgtgtcaacacattacatgataatctatggctgaagaaatttcgttaaaatggtacaaagagaagggtttaaaaatatgtttcgtatacgtacaaagtaaattaaagcaggctatgttcaattaatcgcatggtgtggaatattataacactgttgaagacgacaaaatagagtacaatgtttaaatataaagaaagaaaactcgggaagattcgtggttatagactcctagtcactggtgtaaaataataatctataggaaagatgggaaaaagaggagcacactgcttttcaaaggaaaatgagtggtctcgagctccgaaaacaaagaaaaaataacctacaaaattgactaattaacagtaaaaactaaaataaccaaagacaaagacagtttatgttatattatacatatatacccaatagttatccacaaatgatcggatcgcttgtttactacttcctccaaaatttggtcatcttcgggatccacaccacgtctcttgtccagaattgtcgtcagccaccttatttttatgtttacttattctgatgggatgcgacaatgttttcgttacatgaagttcttaaaaatatctgatcaaaaagaatgaagctcttaaatattttgaaacataaccaacaaacatttcttttatataaagttaaaatgaaaattttaaacatccaaaaatttccatcaaatatatcttgccttaacaaaacagatacatgttttcttgttggataaattatttcataatttggatcaagtgaaacaaaatgtttctccacttttaactacgtttgtacattgtgcaaaaatctagagaacaagtatatctggaagaaatgtaaccatgcaagtgtattctctcatttagggtaagtacatcccattaaacataaaaatagaaaagtatatgtatatccaattcgtctcatacatgcataccacacaattaatgattctttattcaattacatctttttacataaaaacagatggcataagtgtaaataaagggaaagacgacccaagaataaggggtcacagtcgttgaggttataaaaagcatctcataggactcaacctcaccaaagtcatatcctattgcatcactctcctttaaacacagtcagagaaaacagcaactcttgtctgaaaaactagagagagaaa

SEQ ID NO: 1907 - DNA, 3000 bp, Unknown
  misc_feature (1)..( 3000): cDNA_ID_3065081_gDNA_ID_1620465_Annot_ID_157889 3000 nt of promoter + ATG
taggctattttcattggcattttagttccactcttaattagttctaaattttccgagaagtcacaatcttccttaattagcattgtattcgtgacaacaatccctatatatatacgacgttgaagttgcaacatagacacaagtaagatggtggacatagttatatagaatgcatggatccgaataatgatattaatattggataataataaaatactataacacttgcgctcagtggtcaaaatttccattgtaaaaatccgaatgatggaaaaagataaatgcacatgtttttctagttattggaaattttcatatttgtagactgatttgcgtggtcttggggtttgccctcttcttcaggattcgtttttataaaattacaatatactgtaatattggtaaaccagtcattccatcattttcatattttaaattcattagtttagtctttgcctcttttgccaccattttctctaggatttcgtatgataaaataataacattattttcgcaacaaatattaatttgtttcctacaattgtgtgagaccacaagatattcatgtgtgcatttttagacaaacaatttgaaccatttattttccgaagataaaagatatcaaataaaaactcatactatactatacaaaaaaatgtgtggtaaatgaacataactcccatggggactactcattaaaaaccagagtcagccttgtccttttcaataattggtccaacacagatatcacacgcaatagcaatttcgaaaacaacgtgaaaacagaaaagcagtgcccttaaatcatagtaattacattcatacaatatgtggttatttgcaagcattataaactttacatgcataaataaacagaaaagcccataaagcatggttggactcaggttgagaatacaaataactcggcccaaaaagatcattacgttgttcggatttgaataaacgaaatcaatgtgtacggatcaagtgagtcaaagtatttagttataagtcataactaatatacgtattaagctcattgaacaaacaaatacaagattatcaggaaaaaaaaagaaagataatttgttcagattattattggatactagtggttggaactgctatttggaccatatgttaaggaatttgtatgctggcagaatagtgagtttatggagggacccatctcagcctaaaataattcttcctttgaaactaacaaaaaaaggggtcccaaattaattaatttcaatgcttgtaaagtcaaatgcaattttttcaatggacatatatgtaacattcgctttttacaaaatttgaatccaatcttaagtgcaaattactaagcaaagataaattttaattcttatagtaatcgttgtcgttttacatacttttactcataaattaaaccttttttattttaactaagaacgaagaaattaagggaagtggcggtgtaacatatacacagaaatccaagctggttacttttcaatccacctgtcagcgtcatgtttatccaacggatgcaaattcagataacaaaagacacgtgtcagaatctgagcttctcagatgcctacaaggcaatgaaaacgttaaaacaaaagctgaacgaatattaccaaaaaagggtcaaagtcaacaaaaacagacgaacattgcattaaattgggttatagtttcgttaaccagaaatatacacccacaaagaagaaaacaaattgcgatttcgaacgtaatgctacacgacaaattcccacagtaaaaaatgttattcgttcaacaacaaaatttggttaattattttacggtccgacaacgcgacggtaataccctcctttgtccccgtctaaggacagtgacagtaaaataatttttttgtttattgacatgttcataagctaagaatttagattaatattggaaatactaaaacccaatcttaaaccaaacacggatatatcttttgacaaaataagtcgtttagctcaaaatctatatagtaaacaatgacataaaataaatttataatttctacgccatcgacaatattaataaattacttgatcgtttgattacgtaacatgtagagatacaatagaaaaataatacaaacctgatattgcattcattgggtactgcatatattcacatgccattttctaattttcatctgtgtacatcgtctatgatataatcttttccataaaggtgaaaaaattattacaatatctatttactcgttttgtttggtgcttttaacctttctacaccgttttcaatttaaaatctacaaaaagattattctattttaattatttgcatgggagtccaaaatacagatttagatacttggaacttgaaagtcgacacaattatgtataaaaaatgtttgttaacaaaaaaaaaagggtgaaaagttgagagaaaaaaattagtataattgtctccagagagagaaaagaagaagaaggctcctttttcttggacaagccaaagaaaaagaaaaaaaaggttgaagctttcacacaaagtctcacacacaagccgccttatttttttttccggtgattcttcagagagaaacaagccggaagtagtaaggataactcgtctccggtgaaatctcagccgttggatcagatcggtggacggtggataaaagatgcgtgtggagaagagagagtctgggttaaatgattaagagatttcttgggtaatgaagttttgattttttttctttttcttttgggggttttaaatctttttgaagaagagaggtcagagagtgagttatcagaaaagtttggtggcggaaaggggaaaaggagatttttacgaaaagcagattgactggtagctgaagaagagagagagaaagagagactaaacagagtaggaggaggatgataaaccctagattgagctgagctgagatttgcttcttcctttttgtgttcaaagattggaatttagtatctttgaaacatg

SEQ ID NO: 1908 - DNA, 3000 bp, Unknown
  misc_feature (1)..( 3000): cDNA_ID_2146324_gDNA_ID_1620465_Annot_ID_157876 3000 nt of promoter + ATG
caacgaaggagggattcctaattcaagaacattcactattatgattgagcatcttgtgaaattggggaatcttgatgcagccatgaagatttttgagaccttgcctttgatgaggattacgcggactctgaagcattattcggttttggttgaagcctttgttgatgcacaacggtttgatgaagtcaagactctgattgctgagatgaaatctgatgggaagttccctagtagacgcatgcttgagcccctgaaacgcatgagggaggctggttttgaacatgaaacagaggagtttttgagagaaatgttgccggatgagaggatcaaggacatttctatgtattctatggataatcccagcgatagcgaagacgaaggagacgagtacaaagatgatgttaatgaagctcaagttaagttgaagccatggctggatccaaaagctttagcaacttcgttaaagaagtggagctctgatgcagtcactgctttggaagaagctaacttcgtttggacaaatctattggtctgcaagatgctaagaaacttcagagcacctgaaacagcatggagtttcttctgctgggtggcgattcaaccaggattcacccacgacgcctatacgattgagagaatgatggctatgttagcacgcaatggccaagttgaactggtcgataagctcatctcgaaagtgagaatcgaagggatcaaattaccattcagcaccatcaggctgatcattgatctctacggaatttcaaagaaaccggaagcagccatcaaggttttcaacgaagacagaacactctgcggttcgatatctgatttcaacctcatgctgttgtactcatccctcttgagaacattaacaaaatgcaagagaaacgcagaggctttagaaacgctagaagatatgatgttgacaggagtttctcctgatatccagacgttctcgggtttaatgtaccactttgcattgcagggagagattcaaacagttgagagacttttctcaatggtgagacagattggtcttgaacctgatccgtacatgttaaagcttctagttcaagcgtattgcagatgcgaaagatcagtgcttgcttacagagtgttccaagacatgaaagattcgaatctgatgcctgacagagagacgaaagagctgcttgttaagagtttgtggagagaagagaagcgaaaagaagcggctgcggttgaagagagctacgaggaagagaatgataacaagaatagtagtaacgttttgcgtttggcgttgaagggtcatgtgtggaccattagttctacagacatttctcgagtctacaatctctaccgcgattgtgttctgaaaacttcgacttgacaacatttattctaagtttcgtttttattgggcccaatgatcgttaaaggcccatagagtctgttgctgatatattatcttaaagctggttggtaaattaatgggtcaacgccattcaaactaggcaaacaagaatatacaaccgtgcctcacacgctctcatatcttttctttgatcgttgatagttactttttggtcagtattcggactttgactatgagaaccacgtgaatggcccattcaaataggtgtaagtgtaacatctttttatcctttttttaattaggatcatactaaattaataacaagaatcataaattccattggcaatatttgcgaaaacatataaattggcaatcaaatcatttgtttttgaaaatcagatagtcaaaatattctatactgtatattgaattttgcaaccgaaatcatttacactataaatcgatttttctttggtttcaaccatagaagattatctaaaaccgatccagggattatgttcgaaataaaataaaatataaaccatcatcatctcaaaagaaaaatactatagtaagcctaaaagtgaaaaaatcacacctagccactagcatataaagaaacaaaaacattttcatatattaccaaatgttgagagcacatgggagctgttatattatattattattatttgacgttgaccacttgaccatctaaatgaaatgggatgaatctctctacgcggtacctaaaaaaaatccaaaaaagtaactttaacccaactttacaaaatttatattttctccaactttacaaattaattatttttacaaaaaaatatgttaattatattatttctctataattgtgtacggtcgcctccgtagaatttattcattagagtagccaaaagtaaatatttttaactttttagaaagaaaaaaaattaagccttaaactgtgtaaatttcgcaaatctacttttacataagaaaccttagtattttagtgttctactgatatggtactttaggaatatactgatatgactgacattctatttgattttatcctacggcctgacaaatctgaaactctatacattctctgcaaatgttgtgcctttatttaacatttttataatatagtttttcttttctctttcccttgtatataaaaccttataagaaaagctaggccactagtgcgctattctccctcctctctgctcccctagtatctctctctgtctctccctctcgagattaattcaaacatgaaaagcaaattggctctaatatttcaggaaatttcttaaacatttcattgaaactttggcgaagtttccatttagagtaaagcaaagaattagatttaatttggtgtttctttggccttttttccccctttgaacggtggagaagtgaatttaagagtatgtcgtgttgcttctcctgcttcaaacatgatccatctaaggtttttagattcgttttctttgcttatattacaagtcttttaatttgaaaagtcctggtccatattttgatttctaggcttacctatgtataacttttaattggcaagccaggatcctttaaataccgccttggtaatttcacggtatgaagaagaagatcgc

SEQ ID NO: 1909 - DNA, 3000 bp, Unknown
  misc_feature (1)..( 3000): cDNA_ID_2146397_gDNA_ID_1620466_Annot_ID_157906 3000 nt of promoter + ATG
ggtctttttggttttaagaattattagtgactaaaaattgaaataaagtcggcaataattaaataggtgatgcaaacaaaaagttattaaaataaaaccataaagatatttataaatttaataaagatgaaaaattaagaatttgatagtgaatcatactccctctgttccacaaaaagagtcattccatatttttcacacatgttaaaagttctatactccttattaatacactaaataaaattatactatctcctattaatacattaaagcaatagagttaaaaaaaggatttttattcaaattttaaattggaaatatcaaaagacactctttaatgaaacaaaaattaaatcttaaacgacactctttgcaaacggaatgaatatttcattacgattagaggtgtgttacacaaaacacaagcatgactcactgaagttggaaatcttgatgggcttttactaggaacataccggattatagctaaacccccttaatcgcttctttcgatcaaagtgagaaaaatcagaaaggtcaatgaaagtttgtgatgatcaaaattcccacaggaggaaaataaatgggaactgaaaacgaaaaggtttaacatttaatcgtatgattcaaaattcatctccaacattaatgtcgtttatcgatatttaatgatatgattcatctgtatactatatatatatatatatatatatatatatatatatcatgtaactaatcagtttataagaacaatccaaccgtcataatagaaagcgaagcgatgtcgtcgtctgacaagaaaccgttgattccgtcgtcacatatcaccgtcaaagttaaaaatcaggtacttgaataaatttcgccattacttatgctaaaaacaagataatggtgtagttttgtaactcaattttgaaaagaatcacttttttgttatgctattgtgaaaacaagaaaaatttcaaacataattatattttggagatttttgcaggacagcaaaacaatcattgatttgtaatgttcattagtgttaggattttagtttttttttgttttaattttatatattttgcaatagatttcccaacaaaagtgtatatcttttatagcaaaaattataatattcaaccgtcctaaaactaagatacgtataacatgttaaaagttttgtaacaattactatttaacaggacgacatatgtgtgtacttccggattaagagggacgtcgagcttcgtaagatgatgcatgcatactctgacaaagttggagtagaaatgtctactctaaggtttctcttcgatggaaataggatcaaactcaatcaaactcccaacgaggtattttttaaaaagttactccaataatgtatatatgaatcaagttgataaattaacgaaaacgattgcagcttgggcttgaagacgaagacgaaatagaagcatttggtgaacaactaggagggttcagcttctttcatcgccattaagagaatattaaagtcgttagaacgactcaccaaaaaatcaataatttatagtcttgtttaattcttttcacctactttttcgtactacaagagttggttattcatcgatgttaacgagtaacaacgataaggtgtttatgtatgaacgagttatctataagttatttgaatgaagtgtaagagatatgagaatagatgggcattgatatatatagatgggcattgtccttgatcgttatatttgtttaagtcacgaaagatataagaatcaaagaggtaatgtttcactcgcatggaaattgcaacaaagaaaagagttagatatatattctatttccgtattaaatgtgatatatacacaagtacaattacaaatcattgtcaaatatgatcatcattagaagccgtggcccattttgactagtcaagctatacagataacaaaatgaatataatcagaactatctttttagcattacatgtcgtctagttcacgtgcgaaatagttttttcatttgcccatcaatcaccacaaaaaatttccgaatttgcagaaaatttctcgtaattaccttgactgggccatatcatatgaattacgctagatagaaatatatattacgttaacaattactcaatcgaaatatatgttgtacaaatttttaattagcgacgaattatgcgctaacacaaaaaggttaaaaggaaaattaaaaagtcaccgtcctaataaaaaataaatcaaacaattaggtttgtcgatgaccaataagaaactgccatttgtcaaccaaatacacttccctttcttgtccctctctcctctctgtctctcttctttctctctcctcgccactgactttgctctctctgatttacagaagaaatttcaaaactttcaaaagctcaaatcttttttccctttttcgattatattcatcgtcgtcgagaccggagatatctttatctgatcaaaagtttcttttttccgatcgtcttttctctcccagagaaaaattaaaaatcgctcctttagattatttcctttattttcttggcgcggtttcgatttcacgtttctgggttttcttcatcgacccagaaaaacaaaaaaaattcaaaccgcaacgatcaggtacgaatcgaattttttttgtcaccatcgcttgttttgaagatttcttcgtcggtggaagagacgcttcttttattctaagattagcctctttggtttgtagaatctgtaacaaattttggtgattatgtttaattaaaagttaccatctttgatcttcgtttaattaatctttcccttaataacatgttcttagggttttgattttttccttatgtgtgtactgtttgatatttacttaatttgcttaatcttctattaatggaacagaaataaactgattttgagctctctgtgtttgtgttgtctctctctgtatcaggtagtgaatccttgattttatagtctatataaagaaagaaaatgcaaa

SEQ ID NO: 1910 - DNA, 3000 bp, Unknown
  misc_feature (1)..( 3000): cDNA_ID_2146413_gDNA_ID_1620466_Annot_ID_157912 3000 nt of promoter + ATG
aaaaattttttatgacattctatgtaattctttaccctttatagggttatttatgttagagtgattcccaattaatagtatagattaggattttttttttttttgataaactatagattaggatttagttaaatatatctttataacgatatacaaattagtgttcagtttcttagattttttttaaaaatcaatccattaaaacaacattaagatatgtgtatgtttgacaaatgattttggtttacaaaggaaaatgttagcttaatgtttgaaagttaaagaataatactactttcaagagtgaggtcataaatgtaagtgtaaattatcagcaaaagtgcgtatttggaaatagcacgaaaatcaggcgttaatcaattatcaaaacgtacacagtcgtcgagtcgtgaccacttatttacaggtgttttctaatataggaaatatccacgtgtattttagttttcaatttttggctgtaaacataatacaaagcccaaaaagaaaccctaaagtgtacggaatttaaaaggggaaaatatttgaatggtttcattgtgattgttgacggttttgcagagctggcaaagtcgagtgactatagattcctctcctatatttacttttagcagttttatcatttatcggttttatttatttatttaaaagctagagagctcagaaaataattgaatacgttgctaaaacaaattaaagggagagagacaaaatatagataatcatttttccttttgataaacgaagagaaaaatttacttaccggtctaaatgaatcccaaagaaaattttaaaggtaaacatatcatcagaccataatatcctgtcacatagtcacataattgattcactacaaaatgagagatcatacaaatataaccagataattacatcttgatattgattatttcatcgaaacatcgccaaattcatttgataagaaattaaatatttggattgattaataaaaagtgtgttttaaaagtttaacaaagaagaaactgtgtttatagtttagactattagttatagaataaataaaataaatatttatctatcgttttttataagtaatttttgttaagagcgaactttaacacccaattcttcccctaacagtttcccgctcgcgtgaattaggattttgcttgaagttcgacggttacgtggtgcgtggagactgacaaggaccaaacctcttaggcgtgcgcgtctggagtccacgcgtgtggaagacgcgacaacagatttgtcatgcgtttctctaaaggtacgaccccgagacaagtggatgagggtaagagcaaaacctacgattgatttggcggttatttctttgttagggtttcagaggagtgttgagaatccctagatcccaatctgttcagagttgacactttcacccgttagcttgagctcgttacttttgccttattgttgagatgcttctgtttttttttttgttttaactagtgtgtttttttgtttaaaattgctatccaaagtttctggtaccatttcccgaccagctcaaggatgatctcgagaagattcgtgatcaaagcacatatatttggtagagattcgtgaaagctattagacgtttctttagaaaatttacgcaaaatctcccaaagaaaggtacgttgtcgattaggttaatgtttctttcatatctccctttttatggtgtagcgtcataatatgcgtccttgtaccagatcgcacagtgatgggaaaatacaattggagttcgatccggattattccaatctgagactctggcccgaagccgacatgatctgaggagtggatgatgaaggaggtgctgaggaatagtcttctggacaagggaggtcggcattttcatatgggtgggagttcgaggcctctgagtccaacttctcagaaggagaagaagaggcagccgaccgcggttcaattagctgaggccgctccggagagatgttcgatgaatatttggcattgccctgctttgaagttttcgatgttaagttcgactcgatttatgtcgacattgaacgacgtcagaaattctttcgggtctcctttatcgttgtagctttccaatttgatcttttgataccctcgaaccgatacgtatgttatccttcgggtaaaggagtttgtagcgtctctttgaggacgtggtcgagtttgggaaccgtgcttgtagcacggtggatcttcgagcacatctccaagactgcacacctcaactcggctatctctgcgtcccttgtatcgcctaagacgttagcgaggttggtttgttgaatgttcgttgtgcggttggtctggagaaaaagcgtgcgcgactgtcagggatgcgaacttatcgtcgctcattgcatcttgcctgcttaaaatggtcgtggatgctctaaaatgcgttggcgaacggtacacggccgggttaccttgcacgctgctgtgtggttcaaggttggtcggacgacgtctgctcggcgatgtttgttcgttgttctcctgcattggcggggaagtcttgatgattatcccaaacgcggtacctttgggagttggaggtagcaaaggcggcgcaactacgatactaattagtgtatccttcttgtgaggaggattatgtcggtctgtggcgtatcggttccttctcttgagctagagtcattgtctcctcaagcactggttcccttcgtagttattttgatctgtaagcgggctcgtctggctagttggaagaaatcctcaagctatctctctacctggcacgccaactgttgagggcgaacttcaactagtatgagaaagaaattctcaaaaaagtgagaagatttttcttttagaaacgaagtcgaattacatggaaaataaaagaataacagatgatgtactcttcgaggcggatttggtctcgttgtacaagaccgcccagatcatcaacggtgttgcgaaaatgaaaatataagctaaatg

SEQ ID NO: 1911 - DNA, 3000 bp, Unknown
  misc_feature (1)..( 3000): cDNA_ID_3065102_gDNA_ID_1620466_Annot_ID_157908 3000 nt of promoter + ATG
aataaatacatcattaatctataaattagaagttgaagagcttacattaattatttagtggacacatggcaaatgctaaaatgatgatgtgtgaatcatatggaaagagttggccaactttcatatatatgattccatgaatatgcttttctgagctaatgactacatgcaatcaaaaaatcattcaaatatcagattaatatgttttttagcaaatcagttttttggcaattaatcagaaaagtcaacaaagtcgagagtttgtcctgcgctaaacatcagctaaaggacacacatgtatcaaacagcttgagaatacaaagaaacctataatttcacaaatccatagtcaggctcgtctagttataacaaacaaattcatgagattgttttcaatctaatatctaatgagatttactcaataaccaaaatactttttaagcaaatcaaacattatcaccatagaaaatagttcgtatttaaattggcgcatactattttatcaaacagtgagagaaaaaaatgtgaatcaccaatttgaaaaaccaaatttcatatactaagatttatgtgttgttttaaaaattaaatatgtattattagtggagggtttgaccgtgattaaaacgaaatcgaattaagattatatcggatctttgtgagcaaatcctttcctctatattaatgtatttaggtatttactgtgaacatcaatctcaccaattaggttttttttctttcttactctcttgcagcctcgctttctctgaaaaagcattttagtcacatgtctctgcttctcaaccagccctcgaagctactatgcttccggaggaaatctgttctggtaagatcctctcctcttctctctaatggtttatcatcttcattgcggcaaactccgccttgtaccatcatcgacgctgttccatgtggagaggatctcggaaaactcgtcatttacaatgctaacgcagttcacttcacttacttggaaaagaaggtgcctctggagttggtggataatccaatggtaacgatcgggtcgtcccatggttgggtagctactttgagtcaggacgacggaatacttcgtctccaagatgatctaaacccggctgcatcggatacaaaccctaaacgcattcccttgcctcctcttgtaactctgcctcattgccaaactcaaatcgtcaccaatgtgtcaatgtcctcatcttctcccgaggatgaaaactgtgttgtggctgtcaagttcttgggacctcaaatcagcttttgcagaccggctcaacgtaactctgagtggatcaatgtcagaatcgcaaacccttgtttctactcctctcgtgtcatgttttcggagaaacatgacttgtttcgcattcccggatcaggaggccatatcattgcttcatgggatctccacaaagacaagcacaaaaatcccaagtttcagaggttgcggttccaaaaccttccaaagctgacaaagaccaaacgagaggttatggattcgtgctacaaaagcgaacacttggtggagtcaagaaccaccggtgaaactttcttggttaagtggtacaggaaggccgtctggagaggtatgtcgaaattgagcacaaaagctttaatggtgtttaggctagacgacgaaggaaatgctgtttacactaaagacattggagatctatgcattttcctctcaaaatctgaacctttttgtgtctctcttagctccttaccacgcatgtttttccctaacaatgttgaatacatggatgctgacgaagacggatatttcaatctagccagatcctccatcgttggtgatcttactagaatggggaccggtgtctatattccacctcaaaatatagacaactagtttggaactgagtttgagtctagagtctgtcttttctttttaaatcttgaaacatcaaaatctattttatcttctttatagtctatgtgagattaataagcatatcctccatccctttgagttgatattcaatatatatttatgtcattgctcactatttaatgtctgtctatgtgcctctagacgtgttcaatgatcatactgggaaacaatgtgcttattgctgctgttgatgttatacgcaaagagccgacataatatttctagagaaacagagtttaataatgcatttcataggaatggcagagatgttgttctggatgatcattagtatagtgataaagatttttgggtgaataaagtgggtactggaggagttgtgggcctagttcccgatcatctcacttctctacatactcttatcgaagctatcaagtttgtttttaaactggacgaagctttgggaatatccaatcttctcaacttattatagaaaaatatcaagtatataataaacaaattcataagaagatataagctttggactgattctagaatcttaagtatacatgcatgatgaatggtgatgacaacatttttttggaaatgaaatcatgggggaaaaagaacaattactgaagggtttgattgtaattaaaatgaaatccaattaagattgcgttggatctttatttatagagatagtgttgaatcaaatcacaactttgaacagaacgaaccaaagcaaatcgagaaaatttcggttctactgaccgcataaacttatttattcatcaactagggtttgtttaatactttcttaatcaaatctaaatctattggggatagagtagaatctcttgtgatatattttgtgacagagttatgtcctataatttagggattcgagtttattttatacgatgactctcttgtataaatatcacactttgtgaatcaataaactcaagttagtgcaatacctaattctacatggtatcagagctctaaagatctaaacctataaaaattttcgtttcttattcgatagtttcgaattcgtttccgcttttctctttaaaaccttggttcttgcgtgtcaagaaatcatg

SEQ ID NO: 1912 - DNA, 3000 bp, Unknown
  misc_feature (1)..( 3000): cDNA_ID_3065116_gDNA_ID_1620467_Annot_ID_157919 3000 nt of promoter + ATG
aaggcaaggttcaagaagtggttcgagaagcaggttgctgcatgagtttgcctttccttggtttccagtttcagtgttgttgagtttttgagcttttgagttgttgttgttatttctctttcatttgtatattcgtttggagttgtaacgatcatgacagttgatgattaataagatgagtattttttttcttggatttgacttgagttgtcttatttaagaatgtgttgtgcggtttccaaaaatggaaagtttcctagaaaggacttgtctatttttggaaagtttgagtaaacaacctaagagaaaggtgtgtttacgagatggctgggagttggtcataaggatgttctcgaggggatatgatggatggtgaggcatagaggtgtcttacgcgatattgttgctcggaagcgtctagagatatgctcggaagcgtttagtattgttgctcgagggacatgagggtcccaacgactcgtgaggagcggggtatgctcctgaggtaccggtaactcgagggacatggtgtctttagagtacgaggggtaccgtggcttcgggtgacgatccgagagcacgctttagggtgacgacccgagagcgagttttgtggtattattttctccaagtgtcgtaactcgatgactttgtggctgagagtgagccgacacaactcagggtttgactttgagtggggaagataatatgtgtgatacccgagataccgtaggccgaggcctgagagtgacggtttatgctcaaagattgcagtctgagagtggagagtgagttgtgagcaacaatgactagtaaatcgtgagtatatcgactggatagagagacctagagggggtctggttggaaggagtgcggaaatactattttatgaataaataaataattcgatcaacaaaaccaagaataactgacaatcctaaccgggttccaataaccaaaaacaccaaacataaaacaaacgagttcctagatcatcctctcttccttgccatgattccacaatcacactttatctttacctgcatcaacaacacaatgagatgcgtaagtattatcataaatacttagtgaggcgatcctcccatctacgagctatacacacaagcaaataaaaaggtataatcacgaatacaatacaaacaaaccagtcattgaacaattcacccaaaacacattcaccacacctacatatcatcacacaaaacaaatcacacaacccaatcgctcagataagctcatggtcacgcactcaccttaacaaattgattctaatagcaattaaacccaggagagactctccttacgtctgaaacagtccagaaacgtccgttaactattcaatcgctctggtgaaatcctagctgcagacatcacaaagctgcccacaaaatctcgtgccgatcggaaaacagacgagaccacgatctcagtttcaatctccgctggtcctaattcgcgtatgagaaaacgtgtctcacgaaactgcgaataactcaaccaattttaatccaaatccaattctgtaaactggagaataacgataaaggacttgggaataactctaccaaatttcgttaccttttaccacgatttgatatgacgaaactgatttctcccaaaccctaacgattctgctccttctccttttctctctttttctcctttataaaacgaaaagtggctaaccaaagccctaatttcgagtttccttcttttataggcacactttagggtttccaattaacccaaccaattaaaccggatgatttaaaaaacaaaccctaaccgattttccggttcacgggcgttacactcttttatgttgtccatttttaaaaatacccattctcttgaacagaatgaccaaattaccctcatctaataggaacatgtaattggaaactgaaatattcccgcccattttttggcgccgaaatttatttttcccgccaaaaaaaaaattccgccaaaaaaaaaaattcccaaccaaattttttttcgtaacaaattttttctcaacaaaaaaaaaccttttaaaaatccttgtaaattctttttggtgggaaatagatttacaagggattttaaaaggattttaaaatatttacaagggattttaaaagggtttaaaaagatttacaagagtttttaaagggtcttcttgtaaactctttaaaaatcttttaaaaacccttgtacgtcttttaaaatacttttaaaccttttttttttgtcaaacaaactttcattagattaaaagttatgggaatacaaagctaaagcttccttagctaaagaatcagctagaacatttgctgatctcgggatatggatacacttaaaggaaatacaacgcttagtcgcctcaaaaatatctagaagaggaccatggatttccactagaggggtcttcaagttaatcgcctttaaaatccttaaaaaatatttaaaaaaacgtttataaatcttttaaaaccctttaaaatcccttgcaagtattttaaaacccttttaaaatcccttgtaaatcttttaaaacactttaataaaccctttaaaaatctttaaaaaaccattgtaaatcttttaaaaccctttaaaatctcttgtaaatattttaacgataaccggataagcttgatagatgaacataatgcatgaatctctttctctaacatctgtctgcttcttttttaagcaacgatggatttcaggaggtacgattttcatggaaagaaagacaatgatcaaggtaaatcagagaggataggaggaacagatcgtcgaatgtcgttctaattgatcaagagatccacttttttctcatcagatatgataacataaaaataataattccatttatttatttattcttaacgatagattttaatatttattttttccatccaatggtttatattaaaaactacataactaaactagtttgtttttctattgtttggtagaaaaaagttgatg

SEQ ID NO: 1913 - DNA, 1666 bp, Unknown
  misc_feature (1)..( 1666): cDNA_ID_3239137_gDNA_ID_1620467_Annot_ID_157950 3000 nt of promoter + ATG
ctgaaaatgaaaaccaaacccaacaaggaaaacccttaagtaaaggaacaacaaataaaagcccaatgcctaaatgtaaatccttagcgtgaaggaaaggtagtgtagacacacgtgacaagtgaaaaacagaatggatgacacgtgcgaagttgaagatgagggagtctccgatcaccggaaagttgcagtgacgttggaagcttcctttcaagccgaaattgttgggaaggtcattcatcttcttcgcccaaagaaacaaggcgaaatttcaattgagttttgatggattatgactccacttgatgtagacctgtaaatcttcttcatcttcttcttcttcttcttcagttaaaagcttttcaatcgataaggaaaattagatatttgggatttgctttcatcaaacctgagaataaaaattcaatcatccaaagcatcagtccagaaattaagcctaattacttccaaaaaaaccaaagatactaaacgtgactttgctctgcaacttcaatttgttcttaattgattaaaaccaagaagtttgaagaacaaaataaaccctttaagcaaaggaggagcaaagaactacacacccatatgtaaggatctaattaaagtaatgaaacttaagaaaactgaagttaaagagagacaaaggaaagaaaaacaaaaaacaaattcagaaaatagccgacgttgctaagaaagccaacgacgctagagtaaagctgaccaacaccactaaaaaagctggccgttgccggagccaaagtggaacatcggagaagacttcctctctctcaaagattaaaatagaaaagagaaaggcattgttagccggaattaggattgtattttctgccctagttgcagtatcaatcatgaacaacagaccactacatgtgctctctgttcccaacagatcactatatgtgctctctgttccccaaggcgtcgtttcatctcatatgctctatggttgtcaaggttcatggactccaagatatcgtttattgcttgagttgtatgttcgcctgtatctatcttgtaattttctgttgttatggttttcgcttggcttttgtagcagcgaattgcttagccttcatggcttggttttcttcccttgtaatcaagacctcctttattggagtgtagcagtttctatataaattatgcatgacaaaaaaaaaaaaaaaaaggcattggtccttccagttttctctactctaagaaaacttttttttcttttttgaaagaatggggttttaaaattcataaattaatacagggctcaaatataaatttagtaaacgtataggatttaatcagtaaattatcaaacccaaaacgcgtcgttacggatgaagaagaagtgaagaaccattttcgtcaaagtagatccgaatcctagttcgatcttgatcttcccggcggagtaaccaaaattccggtgagttcctccgcaagccctctctctcttattactcatagttgtatcagattattagtcgtcgttctgattagtaattaatttggaatcggtttggttttgcgtgggaattttcgttcctgattgattctagttttagatacagattcgaacttatggtgtttatgatccatctatgtgttgtgttgtggttttgctgattagtaaatg

SEQ ID NO: 1914 - DNA, 3000 bp, Unknown
  misc_feature (1)..( 3000): cDNA_ID_2047023_gDNA_ID_1620467_Annot_ID_157936 3000 nt of promoter + ATG
tcatggcgcttttatagaaataacccaaatatttgaaaataaacattttttatttaggtttatgtagatgggcatttttatttgatgatttgactattttactattgaatcatcatctcatcatcttctttctcttagctgctttctcaatccaatgtttttgcaaaaaaatcaaatcttttatcccaaaatctctttctaatcacaaaactcgattgatttaagataactaaaccctaatgatgataccatataaggaacccaagcgataatataaacgatcatttaatcaaattttttggatgtgtaattgactaattaggttgtttcttatctggatttcgaaagagaaatagtctggcaaaaatatcttagctccattgtagcaaacgtcggcatcggtggcttctgcgtttccaaattaatttttatttcacttataagatcttgctaaaacctcttttgtacaaaaatcagtttcaaagaagaaaaaaaaaacaaaggtcaaattagtcttttagagaaagtaaaagagaaatttgcaaaactaacgcaaaaaaaaaaacttaaattaagaaactatcacttgacaaaaaggaagataatattttatgtattttatgtatatatgacaattttgccctcacacatttcttccatttcttttgtttttctcttctttttttatattattttttgtctacgttggcttccgctccgccatgtccagaaacggaagccttgcagcaacccaactcgaaccctcgatctcctcatcactcttaccatcaccactcttttttcaactccttcctccacagaaacttcaaatcctaccgccggagctcgccgtaatccattttggagatgtcgatggggttgtagatcactagatccatcttgggtatgtcgttgctcttcttcaattccagattctgatcatcctcaacatcaaaatccataagagagagctgcatgagaagcacggcggcttgctcttcctctccaaacattagtaatttattcgctactatgtccattcataacttcgtaatccccacattcgtcagcccatgtttcaataattcactcaatttaggatcaactttgagaacttgatttttttggtttcttattattgtctgtttcaaatctccactcatggcagcaatactatactatttcaatattttttagtcctttgtttttattgaatttgatattttcttataaatgttaccttcttattcttggttcaataattcagcttgagttattgaaactgccgaactctctaatttcatgtttattatatagaacacaaaatcattagtagtttgaggataaaagaattagagtttaattgattggatcatgtctaaaattagtttctttggattttctaaattctcttagggtttagatttcttccatcaaaactctagtttaattcaatcaaaacatactataatgtatgtttttggttatattttttatcgtccaatttattttttacaatacttcatgaatttgttatgaacaattaaagtgtataatatgatatacttttatgtataatagtccatttatattttttatacagctaaacactaaaattgtcttttccattgtctctcatgctagtttattaattgttacaattatgctgctatattcttaattcatttattaaatatggctattcttgcaaatcaccaaaagtaaaaatactcatctacataaacactaaaaaaatgggatcaattacgaataaagcacttaaaattctatgtcgttgtcgatacaggcacaaaatgcatgtgcttatagaattaagtacttctatctcttgatattgacgattttacccttcgtcacccagacaaacctaataatttcctcttctctcttttttaattttttttagttggattatctctcacccacacaaccataaggaatccaaaacccaggttcgaaacacacacaaaccatacagaagaatactcgtaattgctattgttcaatgactaccataattattcatctctttgtctctttaaatctatcattttttttctttttgccccaaaatacgaccataaaagttatatttatctgatttccaatctccaatttgagatttgaaaattgcagtttgaaggcctaatcgaccagcctttgactgcctgctttcaagatctcatgttacaaaccgtgatgggaagcttcgtcgacactagcaactaaatttggtttagaatgaattgatttaatttgtgtctaaaattagaatccgtggattccctagacattatccccatagagtttagattctttgcatcaacactcttttaagtagatctatcggattttaacggaggaggttggtgaagaaaatgttgtatgagttgtcagaggtgaaggaacgattttgttggacctgaaaattatgattttgatagagtgttgagtcggcggtgagaagcagaagattgttggtcggaaaaatcaggcgcacgacagagagacaagggaattgagggcaatattgtcatttcacagatcaaaaagttcttaaacttataagctcaagtcaaatgtgtctcttttctaatttttgggccaaaatatgcctatatctataaaagccccaaaaaagttcctaacttcacaataccccatacattattatggttttttcatatggtcctaaaattcatacttggactggtcttcaaatgtcatgttttttttttttttttttttttctggtattggcttcccaacttctgtaactttttatttgaaatcagtacgttgctataaagtattcagtgcgtctactttcatagtggctatacatgttgctttataccccaaaagcaggcccatcaaccatttaattcttcatagatctcggccttttaagaaaattaacactctctttgtctctttacgtacaaaactgtaaattaaagcttttataatcgaaaaatg

SEQ ID NO: 1915 - DNA, 3000 bp, Unknown
  misc_feature (1)..( 3000): cDNA_ID_3065136_gDNA_ID_1620467_Annot_ID_157939 3000 nt of promoter + ATG
caatacaaaataagacattcccaaatgtcataaagatatagataagattcaacgattttaaaacaaagagagttgtgaggcaatagcaagggagcgtattgagacatgtgaggtcatggttaatcgagagatcattttcgaaagattcgaaagacgacagataagtcatggccacaggaatttgtgacgttgatgaaagaatcaatgcgttgattctcaccggagcaagatgaactacccaaagtagcacgaggacaaagattcgggagactatggtgatgtaatcgattgaggattgctttagaaccaaagcataaggtttagatctcttcgagaattttcagaatatactttgaagcataagatccatatgatgggagcaggtgaagcagaagccaaaattcggatatggatagatgtaaaactggaacgaaataagtggatcctctctcacatgaatacctcgtacatggagattaagcatcccacacaaagcttgttttaggtttgacatatgaagaattaaaacataccagaataggatccaggccttcgaggtcattcaaaaaagggtattgatgacagtttacatagaatgcatatatagtaattatttttaagtaacctcttttacttccaactagatattgacccgcggtacaccgcggataaatatgtttatttaaaagttatataaatcttttttataaaaattattgtttgtatatgaatgatatattcttgacacctagtttttatttatgttaaacttgggtaattcatgttttatgttctgatatttgttgtatattaatttaatattaaaattcattatttttctttgtggttagagttttgtagaggtaataataatttaaaacttgtattatctagatattgacccgcggtataccgcatgttaatatttttgttagaaaattagagatttttattttatttaatattttatatatatatatatatatatatatatataaataacatattcaagaggtacatcataagcttatatttttattaaataaaaaattaaatttttgtttttaagatgaactatagatacattctattgtttttttaatgtatgatattatgatacacctcaagacgattttattaactaattttttttgttgaaattttaagttatatatttgtttcgttaatattttttttagtgtttaaaattgtataattgtattttgattgttaattctaggatttcatctatagtgtaccatcccgtattaatttcaatccaaacccgtcccaccatataacctcgtcccatgaaattattcatcattttgtcattttcttataaagttcgaatatttataatattagaaacttcaaaaaagtttaaatatcgatccaaacttcataatttcattttgattattacatataggatttcacccgtagtatatcgcccgtattaatatctttttaatatttatatgtttaaacttcttataaaattcaaatatttacaaaatttaaaacttcaaaaaattaaaaattgttaatatttaaaactttttatggtcttaaaaattgtactacttgaattttaataaagttttaatatatttaatattttaaaacttttaagtttttaataatttaaaataaagaaccggagtaaaccgaataacacttttaattttggatgtttgatatattaaggttcccgctcattcatatccaaaattattttggtcttttttatagtatgactctaaacgatttattaattttaagcaatgtgggatcttgtacacttattgttttcattgattgagtattatattatatgtctgtttttaaattttgaattacagtagatgtagaaaacttaaatattttattaactatatgtattatatatataaagtcaaaataaattatatataagacaaatatagtgacagaaaattatatattgatctttaatgtcgatatagagattttaggaaattagccttattcgaatatagttcaataaagaaaaattaaagtataggataaaaatttaattgaaatatttaatgaaagttgacaatttgtaagtttttagacatagaatatttggttatgattaaatttttaaggactaatattgacaatagtaaaaaagtgaggcatttttggtcaaaaaccttaccaaaaatgtatatgtatattttcccttattacaatttctattagaattagcttgatattaagtgattaaaaaggaaaggaactcaagattatgtacatatgttcaatcttttgttgattctcgatataaacttcaattccacattcagagggcattaagttttgatttaatactatgacaggaaaaaaatgaagccttgtgtggataaggagagacgcaactcgctcccatagttcctgggatcactcgcgacatactatagagacttattgttcagaggttcggctatccctttgctctgatcttccctcccatctccttcctctgtttcttgtttcttaattcttatttccatcttcagttgcccttttcaattagttgacatttaagttaagttatgatggaaatagcaataaatttgcatgtttgttctgtctttttccgggttaagtagctctactattttcagtagttgaactattctctcttagttttatgtttcagcaatgcagagtagacattatccaattcttattgctacaattgaacttttttgcagatgtgcaaaagagtttcagagagtggaagtagatagtgatgcgcaaatatattgtagctctagagtccaaagttttgtttgtttgttttagatacatgcacttatgcacagaccattgaatgagaaaattgatgaaagagtgatatggtaatgatttcttctctcttgttcacatgttatatgaggattgtcactccatcttagtgacattgttatcttccttttgaaattttgtgaggttttaacagagatg

SEQ ID NO: 1916 - DNA, 3000 bp, Unknown
  misc_feature (1)..( 3000): cDNA_ID_3065127_gDNA_ID_1620467_Annot_ID_157942 3000 nt of promoter + ATG
aatcacaagttgtctcttgcgcaagatggttctttttcagaccctacaaggtatagacgtcttgttggtcggcttatttacttgggcaacacacgacccgagctgtcctatgtcattcatattttgtctcagtttatgaatgatccacaaaacgctcattggaacgctgctctccgtgttgttcgctatgacaaaaacagtcctggtcagggcattctacttcgtgctaacacgcccttaacattgactgcttggtgtgactcggatcatggtgcttgtccgatcactagtcgttctcttaccggttggtttatacagtttggcgactcaccgttatcttggaaaactaaaaagcatgatgttgtctctcgttcttcggctgaagctgaatatcgcgccatggcagataccgtgagtgaaattctttggctttgtgagttattaccaactcttggcattaaggttaacacaccaatcactcttcactccgatagcttatccgccattatgcttgctgctatccggtgtttcatgctcgcaccaaacatgtcagacgtgatgttcatttcgttcgtgatgagattattcgtgtggtcatagcaaccaaacacgtttcgactacgactcaattggcagacattatgacgaaggctttgggacgtcaacaatttgaagattttcttgtcaagctgggtatttgtaacctccatactccagcttgaggggggatattgggcctatgggcttagtcggttttgatatttagaataggttaactttatgctcaagttgtaacctatatataaaccaaacaatgtaacctaaaaccctaagagattcagtttatacaaacaagagtttcttgacagaatattttacgaacgagtgttaccagcttcgtcttgggctcgagattcattgtttctgcaacaagaaacatgagctccatctccggctggagactccctgcttcaacaacgaggtccatgaacatgtattgatccggctccaagtgtgtatatagcgttggtatgagagagatattttcgagaaatgagtgatatatataagcttccttagcggtctaggctgagaattcaaatctaaagagttgaagacacatgttgtttgagtaatgagtgacatcagctcagattgtggcttcggctccgaatccaaatccattgaggtggccaagtagattatttgaataatacatgatgataactttgaaaccgaatccgggttcgaatttgaatcttgacaccaatcttcactgagagtatagacttggcaagtgagtgatatgagtttcgactccggctccaaccccgagtccatagagttgtgggcgagattatttgatgagaggttttaagaatcactaagtataatgcaagcaaaatagtcgtgaaaacatctcagaacatatagagcatatatgttcacacatttttctttgtttgagttctatagtatcccgtattagtaactcagctcaaaacgacaacacttcgcagttgggcctaaagctacagaagcccaacacgatccagaacacaacaaagccttgtcgtcctcaacggttatctgcagaacaagacaaaagtagaggattagcagaacagtcctgcagtacggaggtagcgacaatgaacatatttgaaatgcttggagcgtgcgatgattaagacaaactgataagtttggaggaaaccttagtagtataatagtttctctcaattatattcattagccaaaaggcttatttatacaagaatattacttgcataacaagttctttagatttatgataatagtaaatctacctatttaataacaagaatatattttacaatattaactttcctttcaagtcgatctcgtaattcccgagatctcctaataccctcccgcaagctcatatgtggtaacacatatgagattggacaatcatcaaatcatcttcatggtcttcatacccactatagggtcatcaatgacatttatatcatcaattcgatagaaaatactttagtagttgtatctccatcgattttagatcacaagtcttggttgctcttcgaactttcgtgttcatgaagaaacttgtgtagtagtcatggttgaattcaaattaattaccgccggatcagcatcatatccgtcagtcatcttcgtggcttttatcttttcgtagtgtaaacaaaaaccacataaagaccggttaaaaaataccaaacataaccatatggttttgttggtcatcatccttatccaagtaaatcgttggttcaggtcacttttgtagtgcgtgacaataaacaacgtcttcttcgtcagtatatcttcttcttcaaataactagcaagttttgctagcaaataaaaaatctaccgtggccaaaaaaaaaaaaaaaaattgaccgaatcaagaagatgatcacgtctctcctcttctctttttttttttttgttttttttttttttctataatctaaagaatttgctatgcaagtaatattcttgtataaataagccttttggctaatgaatataattgagagaaactattatactactaaggttactctcatcaaatttatcatgctatcagagccttcgatcctaattcctatggattaaaggctttttttgcttccgcaactatgaaaaaaaataaaaatgttgatttgagattcgtctctttgatttactacttttcatctttggaatatcaaacatgctcttttgatttccttttccatttatttttattgttaaaaaaaaaaaaaaaaaaaaaaagagaaaagaaagcggagacgacgtgatatggttacgtagcatttaaagacagctaagcaagacaaggagacactaggttaaagaatagaaactctataaaaccaatgtatctttgtcattgaaacttaagctaaataaaatcaaaacatcaaagtttacagttttggcttctttcctttatggtatcagagccatg

SEQ ID NO: 1917 - DNA, 3000 bp, Unknown
  misc_feature (1)..( 3000): cDNA_ID_2024884_gDNA_ID_1620467_Annot_ID_157947 3000 nt of promoter + ATG
ctaaataaaaatataaaatcagaatacttcaaagatgtaaggcacaattagaaaactagatttaggtttttcaattcaaatttttttgtaaaacaattttcatattaacaaaaatatttaacaaaacaaatatcaaaatatttatgtaggactttttgtccgatccgatcctagccggactaagctccaaaaacatttagtctaaaagagcaaatttttcaagacatatatatatttaacccgaattcgctgtttttagagtaaggccaggccagcatacgagcattatctctagttgacatgcctaactattaggctcaactttccacatacatttataaaacactagtgttctaaaatacggcttatacggtgtatctatactgtacagttggaagcagtactgtattatggttatacagttgttaaatacaatgaaagctatatacgagtatatacaatgaattctgtgtaaaaggtgtattaaaaaaaatgctcaaaaacaaaaactatggtattttattggcaggaaatttatttggaatattttaggcaaaaaacaatttccaaataagggtaaaatagtcattaaaaatttactgaaagtagaaatgaaaatgtcaaatatgaaagggtataactgaaaaaggtagtgtgaaaagggcattctcagcaattattctacatttgaactatctattttatcttaataaactgttttaattctatagactacatccatcttattgatgatatttaaattttaaataataattcatatacttttcagtatttaatttagtatttccttaaaccaaatttcaatcttacatattcaattttgcaatacaatttaaatatctattttattatataaaaatacaatttaattcgattccatacaattcatatacaatttgattttgcaatacaaatacaattttattctatacactccatcttattgtgttagttttccttcttagttaagaaaattttaagttaaatttttcgatatagaaatataaattggtatatgtatttgtttttgttaaatttcctatttcttttagaaaaaatatttaaaaaatctcgattttgcaatacaatttaaatatctattttattatataaaaatacaatttaattcgattccatacaattcatatacaatttgattttgcaatacaaatataattttattctatacactccatcttattgtgttagttttccttcttagttaagaaaattttaagttaaattttttagatatagaaatataaattggtgtatgtatttttattggttaaatttcctatttcttttagaaaaaatatttaaaaaatctcgattatgcaatacaatttaaatatctattttattataatacaaatacaattaaatttgattgtatacatttcaaatacaattcgattttgcaatacaaatacaatttaattctatacactccatcttattgttagtttcccttcttagttaagtaaactataacttattttttttagatatagacatataaattagtatatgtaaatatttgtttttgttaaattgcctatttcttttaggaaaaaagtaaaaaaaaatccgacacaatatcaacatatgaacgattgacttgttacgtgtcacgatcagttgagttattaactttaaaaactctactttatataataaaatgcgtctgaaacttcttaatttatccgctttatcattagcacgcttttatatatagaaaactagattttaacccgcggtataccgcggagacaatttattttttaaagttactatatataaaaatttgcaaattatatttatctataaaatatttttattttatagtttacgattgttattaagtaacgtcctgtcaaacccgtcccgccaatccgtcccgtaaaaaaaattcactgattttatttatgatatgtttatgaatcattgtctaaatattttttaattttgtagtaattaaatgctatctaatatctctgcggtttgatgattataatcgaattattatagtcatgtagaaaaacaatatcaaaaatgataattttgtagtaattaaatgatattaaatatttcggaagttttattttagtaactaatcgtgtagttaatgtggaaagattttgggaagattgtcaaatatttaatttaaagattttctttctaattatcaaaaacaattattaaatgcgagtggcagccactgtaaataaactccaactctaggatttatttcacaaagtggctgcaaaaatgtatatatagatcataaaaacagtaatataaaaattttaaaccttaaaaaactagtttttcaaacaaaaacagaaaatgggcaaaaaggccctaatttaagggcttgcaaatggcaataaatgtttatctgggttttgtggtttcttgattcgtcattaccaattttcaccatgaagacttaaaaaaacctgactcagctctgcgtcacctacgagttggaaatctgacttccccaagaatttcttcagattacatcgtaatttacaattctgccctatttatacccatcaatctgattctccttgtttctgtatatttcttcgctctttgtttgaacaatttatctgggtttttgattctcggatctactccaagacggttttcgaaattaacaagcttttcaggtaaattgacttttttttctttgtaaaggtttatcaattttgtcttctaaactcaaacttgtgagtctcttgtttggtttcagaccaaaaccaccattacaaagtagttatgtcggtggttcttgtcagttttcttacaagcttatggttggtttagattagatttgatgaaatgaaaattgagttgaagaatgtttttttttatttgagcaagttaatatgtttactgatgtttttctatagagaagttgctaagagagcttacttatgagtttgatgttgaattgggacacaggaaatg

SEQ ID NO: 1918 - DNA, 3000 bp, Unknown
  misc_feature (1)..( 3000): cDNA_ID_3065122_gDNA_ID_1620467_Annot_ID_157945 3000 nt of promoter + ATG
ctctttagggtgggatttacactcttccaagtcatttatcatctgaggctagagacctgatcccaaggatgcttatagttgacccggtgaaacgaatcaccattcctgagatccgtcaacaccgttggttccagactcatctccctcgttatcttgctgtctctccaccggatacagtagagcaggctaaaaaggttggtttcagtgccatttggagattaatagagttcacttgctgtgatagtaacaatatctcttatgttttgcagatcaatgaggagatagttcaagaagtggttaacatgggatttgatagaaaccaggttttggaatctctacgcaacagaacacaaaacgatgtatgtagtttcctgtctctaatgcttttaatccccgaaactagtttccaatagtcactgaaatgccatttgctccttgtaccaggctactgttacatactacctgttattggataaccggttccgtgttccaagtggctatctagaatccgagtttcaggagacaacagtatgtgtttttctttcctctcagtagatagctttccaacatttttgactaacatgttcaccttttcaacgttactcatctaggacagtggttccaatcctatgcgcacacctgaagcgggcgcttcacctgtaggccactggattcctgcacatgtggatcactacgggttgggagcaagatcacaagtccctgttgatcgaaaatgggctcttggacttcaggtttgttcctgattactgattctttttgttcctcaccataaagtcttctgaatgcaacacacaatcagatatctgtactctttgcctctacatagccaaatcgataatcattctgttaccttgttgttttgaacagtctcatgcgcatcctcgtgaaatcatgaatgaagttttgaaagctcttcaagaactcaatgtgtgttggaagaagattggtcactacaacatgaaatgtcgatgggttcctggtttagctgatggtcagaatactatggtcaacaatcagctgcacttcagagatgaatccagcatcattgaggatgactgtgccatgacttcacccactgtcatcaaatttgaacttcaggtaactataaactcacacatacatttgtatcaacaacattccttggagaaaataaacaactgcctagttcggtttgttagggatatgaatcgatcaacggggtttacattcgtagaattgtgctggagcaaagactaagatcctgatgttgttttatcccactagtagtagttcaacaaaactaaaccagctaggacatagactaaaaccttctttagaacttgaaccaactgttttcgaagaacaattatacactttctgagttcacttttgattttgaaacagctatacaaagcccgggaagagaagtacttgctggatatacagagagttaacggtccgcagtttctcttcttggatctatgcgccgcctttcttacagagcttcgtgtgatctgaatgttttaaccatttgttgagacattttttttctttcatgttcaatggtttgtaatagtagagaacataatataatatgtgggtgcagtgtttactttgccgggttacttttatatacctggattctaagttaaactctactgtaatagtaactatcctttcttctttttgatggtttttaaggtttgatcatgtgtacataacttagctgtttcattctaactattgtatttctcctctgatgccaattttatacaacgtttatatcagacacattatacatgtcatacctaaaaacattgcacgcagagtccatcaaaattccatttcacaaaattcggctacccaacttaagtccttagcatcaatacaagatgtggaacacgatattaatacagaacattggagagctactttgtgtggacaatgcttcttgcaaaaggagtaaataggtcgccgtcggacaataatatatcgggcttcaaggataagtccaccccaaacatacattgaatgtgtagggtaacactacagtactcatcacacataaaaccgctccttcggatttattttgctgatttttcatcatcagtcggttcggaccgcaaacttcacaccaatacatcgttgtacttatctcatccccataagaaagagtgaacatatgtttatcatgcttatacattaccttatgaggtaatgtagcacatttgaaacacaaagaaaagtagtcacactcaatgcaattgaatgtttcctttctggaataatgtcctagctctttgcaaactgaaaaatgtcttcgcttctctcccggtttggttgttaggaataaaggatgcaaatgacttggatggactagtggctcagaaatcttggcgcattgcatgtgtagcagaaaacaacatcattctttactacattcatagaagaaaccagctttacacaaccaaggacaagcaaaacatgtatccttatgatagtccataacaccgtcataaatttctgccaccttcgcagaaaaagtgtgtatagccttcttctcctggttgcctaaatttctgccaatttaaggaaaaacacttccacttgttattcgtgggccgcaagacttctccaatcacatggattattccttctttaaaagttacttgtgcttgagggcaaactgaaataagtttcttcaactttgaatttttgagatgacgagggagaatatattgggcctatgggcttagtcggttttgatatttagaataggttaactttatgctcaagttgtaacctatatataaaccaagcaatgtaacctaaaaccctaagagattcagtttatacaaacaagagtttcttgacatggtatcagagcaaaacctaaactactcaagggtttgttcgattctatgatctaaacttccgctaaaacaactctgtttcttattttctgttttttaaaactatctcacaaaggagaaaatcatg

SEQ ID NO: 1919 - DNA, 3000 bp, Unknown
  misc_feature (1)..( 3000): cDNA_ID_2047053_gDNA_ID_1620467_Annot_ID_157926 3000 nt of promoter + ATG
tgaagaagaagagatcaataataggacacaaatcgactagggcacaaatcgtttgtttataatttatttttgggtgtttttttttgtattctaaaaaaattagaatttgttttctaaatccagtaaaaaatcgtaatcttaacagaaaatatactattaaaacataatatttaataaatatttactttactttttcaaagattcactttctatatctaggaattctaaatagtttagtaaaaaaattctaaatttgattagaatataaattgtaaaagtgaaaatttcttagaaaacgttttctactgttttcagaaactataaaaaaatttagaatacaatttaacacatagtttagaacatgaaagaaattttagaatacatattctacgatatttagactatttttatttctaacaatcttagaaaataggatattcaatatctaaaaattgtagaatatgtattctaaaaattgtagaatatgtacaaaatattagaacagaaattctaaacaaagtagatcactagaaatcgttttctaagaaatttagacaaaactttatctataaaaaaatcaactttttcaactaaataacaatttttttttttacaaatcaactatatttatgtagatctacatgttatcaatgttaaactttttcaaaaatgcttaaaatatagagtatgggtattttggtccaagttggcattctccaaaaaaaggtgtatatggacaaaaaaaattgtagaactcctttaaatttaattttcccatattaattagataaagctcaaaacaattatatctaacgaatgttgtttacatacatgatatgatgtttttcggtatagacttttcatgccaaattgtccacttttacatttgaattacgagagattaaagataaagaaaagctagtgaactctcccttgtcgttctgtaattcctccaaatatgctgaaaatgccggtcattcggttgaacagtttgttaagaaaactacatcttggttgtcgacgtcaatcatgcactttatagctcaaaaaggacttccacatctacgtgtattggagacaaactccttagattcacagctcccatggttggtggctctccatttgatgatctacaataccatcatgttctagaaaacttgtcactttctttccataaaccatccacatagcagcggtatcctgattaagtgatatcataagtgatatcatgtgagatatttcttactcgagttctagtgtaaatttaagtaaccataaattttagtatgaaactgaaaaacactttttgttcattgctttctaaacatccaaattattcgtgacagaacatatatttacaaagactcataaaagtagcgatagttaagtaaattatctaaactattatttaataatttaaaaaatttataacgttaagagtttaaaacaaaataatttcgaaatgatcaataaacgtaaaatatatttagttgaaattctaagatacccttaattttaatttgtcgttgatgttaaaaagtttggtaaacctatcccagaagacaaaaaaaccgttgttatggtaagaagaaatttggcttcagacattttttttttccgattaaaaggcaagaccataattatgtttacaaaaagagtttactctagtacaaaaacccataaaccccaaagaagaatctagatgaacctaatggaaatgtagtaaattccaactggtagtagccaactcatttgagaattataaagcgatgcagtcttcaacgaatttctgattcagtagagggacatccagtgttgcatgatttcacttgtcacaccatatggttattggaaattcctacaattatgagtattgttagagtttggatgaccgtggatgttactaggagtacatttatttgtgaattataatttcttttatggttgcatgattatacacttatatagtagaaattacataaattaatacttgataaattaataaatacgataaaattaataaaattttgctggtcccaagtcgggctaatgtaaaaattaactaaaatcgataagataacaagataataatttttttgaaatctttgtgtaaaaatatggtcccaataatattataaattaataatcataaagcatatatttgaaaactaattttatgtgaaacttttctgcaagccataattgcaactcttttagagtacagttgatatgatattttttgtactcacataatgttttgctttgatctgtcatatttgattttgtaacattttttatatgagaaaccattgttaagatttatgtaaggaaaaattagattaagcatcacgttaacgtcgtagatatacggacacaatatcttacaaaaaaaaaattacaaaaagaaaaaaaataaattctaatataattgaatatacgaacaacaaaacataagaaaaactaaaataaaaaaaaaatttaaaaagaatttaatattaaattttatgtaaatactaaatatctataaattaatatttataaaaattattaatttatagaatttctattcctcaactttcttttgaataagttgcaagttttttattttttgtcaaacctaaattttatatattttcttttagtgcaacaattaaaataactaaaataaaaatctctaattttcactgctccgtaattacattcgccggatctccccgtcatccacattccgttatcgccggcgttcatcttctctacagatcgattcggatcttgtaagattcttttcccttcgtctatcctaatctttctttcttccactttgtctttaacatgtttaatctcccctaatttcgccgatgttaattttctcttcccctttaaatttatacgtgtttatgcgttctaggttgttttagagatcaaattatttactgattttttgttgtaattgattctgcaggattattttttagcaagtagtggtttctgggaacgatg

SEQ ID NO: 1920 - DNA, 3000 bp, Unknown
  misc_feature (1)..( 3000): cDNA_ID_1377348_gDNA_ID_1620467_Annot_ID_157925 3000 nt of promoter + ATG
gtcagaatcttcaggggagggattagaggggataggggcagagggtaatataggattggaggttttgatttggtaagagaaatagaagccttgtttgtgagcaagagagaggttgattttggtttaagtatagtgaaagtttcagctaccttatcttgtattgtagcagtaattccagatctagaagaatttgaaaccgcatctggacaaacagaaataggagtctcaacaagatgcatctctacatcagtagtagttggatcagaagcaacgaccaacacagagcctaccactacaggctcaagaacacgagcagtttgcaatgaaagctttggggtcttggaggaactggaggacagggaagggaactgggacagggataaaataggggaagagggatcagggggtcaggagggagaggcggaggagggatctggttaccaccagcggtgggaagcattggattcaaggcggaagcacgaccattcgagaaccagcggttctgcattgggaactgggacagagagaaaaaagaaaaaagaacacacaataccagacaaaaaaactatttagcaagttatatattcatatcacctcaataccatacatcacaatgcttaaaataaatagagaatatagtataactattcgattccataatttaaggtaaattgacctcgaaaaaaatatctacaacctccaccaaataaatttgtttcgaaaacgtttgatatattccttaaacaacgtaatttataaattcaaatcaaaaaacagatcttcaaattcgactaaatctatatattcgattcaattgattgtcattgaacaattaataaaattaaatacccgaatatatcaagtatatatcttaactaacattatacacaaatattattctaggttgtactttcctaaaccctatatcaaacaattcacgaactagattactataaatatatggtgaagaatgcaattgaaagtcaactaaagaaaagtgaacaagctacacaggttcatcagatatggagagtggtgaagaatttgatagtagttattattttacaaatataagaaatagaatttatttactaataaaacttttttattctaactattacaataggaatatattctgtaagaacattgttttttgttaactaaatcaactttcagttatccaaaaaacacaaccaaacttttcaattaaatcataatgaattgtataaattaacattattctctacatttgtaatagatcagacattaaataaaattcagtttaccaacattaaaaataccaaacaattaaatgtataatatttacgtaaaatatatatactaatataaaatttaatatcacaaaataagtacacgttttattttaacaaaaaagttttaacaaaattaattaaacaaaaatacctacatgtatgtgcgggtcatgatctagtattcaataaaagaacatgaacaaactctatatttacataaggaatttgaatacaacaagtttctctcatatgtggctttagaaattataaatgagagaaatttaaaatattcattttggcctaatacaaataacaataaaaattgtctacaatgagagactaattttctgatacttatgttactgcgagataaatatcttttaaatttgacgactctttactaggaattatacaatcaaacttatgtaatggagctatatattttaatagtactccaaacttttaagtaatattacatgattctacaatatttaataaatgtttaaaaaatatacacctgattgaaataagtttcaacaagaaaaacatggctattttgttggtgtatcaaatttattttaagcaatctacatctctttttaatctgtttattcctagatgataaaggacaaacaacaatatcagttgtacatggtaaaatagtctaccctctacgtatacacataaacggttaaaatgaacacaaattacaatttagaccaatggaaaatcgattttactcaaacaccaacaaactttgaacaaagaactgttacacgtagaaccaaacaatatgatgaaaagtattattaaaatttagatcctttagaaattcaccctcttttggaataaattcattttatgcacatttttttttctccgattataggtctagccaaactattactaactcggaaaaaaatacagaaaaaatattcacaaaaaaaagagaataaacctatcaaatttcacctaggtgatttgatagaagtcgtatcacctagttttcctacttctccaaaagtttcagatttgaaatagacaaagaatatcaaatttaaattagagaaaaaaatatcttaaaggagaatttttatccaataaagttaaaaataaagaaaaatggtactttgacaccttcaaagaattttttttttaaagagaattatggtataaagatatgaagtacatattctattttttgcatggtttgaaatatgtgctgtagaaaataaaatagattatccttacaaaaatgaatcaataacattagttcaatagtatataatacatgggaaatgactattgagaaatacaaaagaattcatccaccattaaaagatatatgttgtgactagtgcatggatagaaaaacaagaatttaaagaaatcagaagaatttatacttcttctctttcagggaatacagttttcgtctcaacaaaaaattctttaacaattcctgcggctggacttggactggttagaattgctccttcacgaaatttggggtgaatttacaaataaacataaataaagggaggtttcacgaatttttaaaaataagtatcctgatcactaaatattacaaaactaaagaacgtcacacagatggtgatcgaacaataccgacacctaaacctctgtaccacaattcgacgcaattcatcgttacccaaaaacctctgtttcgattcctagacactctcactagggttttacaact

SEQ ID NO: 1921 - DNA, 3000 bp, Unknown
  misc_feature (1)..( 3000): cDNA_ID_3065174_gDNA_ID_1620468_Annot_ID_157955 3000 nt of promoter + ATG
ttcttgtctggtgttcatggccttcaaggcgagatttgcataaaaccaaacactgattttcctgatttacgtttctctaaggtattcaaaggatagaaatttgaagaaagtttgtgttttttttcttctcttttcttgaaaaacaaatatgtataatttgacatttttttttaccattggcttgattgtttcattagcctggtagaagatggttaaaacaacaattgttgggacaagataagattgatgaggttgaattagtcgaaggaagacctcatcctgcgcagaagagttggattcttaagtttcgagggttggacgatgttgatcaggtagtgtagtgatccatgggagattttaaaagacacatttgaaaatgatttgttacatttgatggggtttccgtttccttcaggtgagacaactcgttggtgcaactctgcttgctgaggacgatgatcgtcctgagcttgatgaaggagaattttactctcgagatcttgtaggcatgagagttcttctcaaggtatatttgggtttttgccttttgtataatatatcgaaaatgggaaagtctggggtctaaatcagttatcatatacaggagaccggtcaacttgttggaactgttgctaatattttcgacaatggaggaaatgatcttctacatgttttgcttgactcatccatggaagtctgcaatgggaatgcaaagaccaatcagcttgtttggataccttttgtagatgcaattgttcctgatgttgatttggaaagaaaggagatgtatataactccaccgaagggactcctcgaggtgaatatgcgagcagatgatcggtccaagaaagaaaggcggcagcttgtgaggcatattcttcttcgctcttcatattgaccagtctttatagactttccagattgatctttcttggtctcttaaactctacgctctggtcatttcaggaatggaaagaaagaaaaaaacagcagaagcgccttattgctgctaaaaagaagttatgtgaaatggagcaaaagcatgtgtttgatggattaaggtttggagaaaagtctcaaaggaatttacttgctgatcatatccttaacgtaaactccacactacttcagaaagctttgcaaagtattgacacctcatcgaagaggtaaattaacttcaagaaatttcccaaccattgcgagaagtgtgtcttctcatttttcatttaaattatgatgaattagatggaatgtaactgaggaaatcaatgcactgagagctagagtatcggaatgtaatctgagtgtgtcacgagaatgccttagttttgatgcaagcaaagagaacatgggtgataacttcagtttccttcaacaagggcaaaatctgttctctgagggtaaagtttctatttgtttggttctcaatgatcacgagaatgaagaaccagaaggtgagaatggtgtagtctcgtaccttcacgcactacttgatgaggagcagaggttcataaaggttagctgatgcatacttaaaagctatgagattttcttgtcatttagttatgattttacaggataactgttgggttatgtgcaggaagaagatcgcgcttgcgtgccacttgtcatagtttcccctgaacataccattgaagctctgcagaagctatttcaggataatgatcattttggatttgagtcagaaaaggttaaggcttgaattcatccaagaatagttttgcatttcggctatcagattctcacaaagtatatgtctttactaatatatagatctggattctcaaagaagaaacgcttccagtagtttgcagctcaccagaggaaccgaaaaagcacaaaattttgatgaaatctccatgggagatacttgagtccccggttggctctggaggagtcttgagcatccttgcttcacatggaactacagactctctttccaccctgggaatcaattatcttcaggtatcgatatctaaagatcatcgcttaatctctttgaacttgactcatatccagaaattgttcctttctggttctctccttcaaatttggtaaaaggcattaagctttacgatgttggcatttttctataggtacacagtattgaaacaaaaccacaaccgtcacaacattacatcaatcccatgcttgttggtttcgtgagcgcaagaggagcagagattgggatccaagtgaccgaagaatctgaactcaagaacttggaaatgacattctcaatgaagtttctgaagagattaaagggaaaaatcgagtttgaagctgtcatgaagatgaattcacatgttcagaatgttgaaaaggagtgggttgagtcagtaccatcagaaccaaactcgtttgagtttcgttctgatatttacagagtcttgagtgaatgttcttcatcagctaagatttgtttgatgaacattaccgtttagaacttgtacattttgctacttagttgtttgtcctcacatctaaaaagcttctagagacgcaatttatgcccgaacacattactcaagcaagagagaacatcattgtagcttttgacaaatcgatgataacaaaaacccaaaccaaagctattgctctttcatagcacaaaaaaatatattttttatcaaatttcaaaaatatatccctctttttgggaaacttaagatccaactgttgatttgcagccaaaaaagatcgaaccgttgattctattgaccaatctctgatctttaacaaaattacatttttgaccatcacacagagaaccctaatttatatatttataagaaacttcagtcttccgaaaaacatcctttcacattgcggcggaggaagctctaatcaccgtaagcttctctctttcactctctctgaatctcatctttctgttagtttatgtatatatatctactgaaatcgatgcttcgtctcacgcataccttttgttgattttgttgaggaagaggagtaaaa

SEQ ID NO: 1922 - DNA, 3000 bp, Unknown
  misc_feature (1)..( 3000): cDNA_ID_3065162_gDNA_ID_1620468_Annot_ID_157962 3000 nt of promoter + ATG
gaagtgactctacggtcagattaatagtatggggtatacgcctcatcgaggactgttcatcatccgagaaccaacttggttatctaaatactctgtagcatgttcgtgaagacagtgaaacggtgagagtgccaaaagttccaagaggctcaagacattgagataggctatgagactgatcagagtgaagagcgtggatacagagtgatgatattggtatagacagtgagactgatcagtttgaagagtgtggaaatagtgatataggccatgagattgatcagagtgaagaatgtgaagacatggacgatactggtggtatatgcattgggattgatcagagtgaagagcgaggagacagtgatgaatagtgatagtggcagtgagactgatcactttgaagagtgcgaagatagtgatataggcaatgagattgatcagagtgactaatgagattgaatacaatgaagagagtagagacagagagaaccagtacacaatggcaggtaagtattaatcaagaactgaacagaataacagatatctcgccgtcaggatctttaatattataaatcactgagttgttttcttttgcttgcagattatgtgaaaaagaaatgaatctttgagatacttttgtggtgatggaatgagtagttttgctgccggttctatggaacaacaagaagagcccaagattcctcattgtctccctagctagacagacattttcaggtgacccaaaaaaactcataaaccatttcattttagttccacatcaattgtaaatacagagcatatatatagtagcatgcttttgaatttctgattgtctggttatagactttttattatatagatatttggctgtattcaattgataaatttcacagccatcaatgttgttcactgcttggttaaagactttgatattatctattatgggataattagatacatgtgtgctagtattatgaggcatatatttcaaaaaaaagtcgtgatgtagttacaaaaattgatggaattcaagccactggtttttaattagattataaagctgaaggaatggaattgtctcaaatggcagatgaagatggtactgttcatgtcaatgttttataattttttgttttttttcttaggttgcacgtttgtgataagcttatttcattactataacgatttaatttctgaagaactatttgtgttatttgtgttcacaagaatttgctgtctggaacaaagttttacagtgtacctgaattgagttttcttttattcgttttcggatttcactctccactagttgaaaaaggtctgaggctttctagattgtttcaaacttcgttaggaacatgaaaatttgcatctagacaatgccctgtggtatctggtaatcaaaattctgtttctggttacttcgtttttacatgggcagaaagtgaatctcctacaggtcttgcgacacagttagcttttgatttgataagcttactgttactttaaccctgttgacatttctcacctatgtcattcgtttgaaagcttgttttgattctctaatgatatgcttaactttcattctctgatgattcttttgtcttgcaattgttattgttcaggaaagctggaggaagtcactttgatgaccaatgttggttacggatctgacaagatattaatgtaagaataagaggctatggacatggtttttacttgagtggtggcgattaagtccaaatctaaaagagatgattaagtcaagatccagcagaaaagaggaaactttcgttaaggtgtatgacaacagtggtgcaattgctaatgtttgtgaattggtcttttttcttattagggatatataatgaagcaagcatgattgaagaaatcgccaagtcttaatcggctcacgttaggtggtggaaagacgacgcattgcaaaagttttgcaggctgacgaaaaaagaggagaatggagatcaattggaagaggttcttcttatttgattggttaatttttcttttctttctatatttagatatacatggtgacacccattattgtccaatttgtcccttttttctgtttcttttgagaccatgtctatatatgagaattgagaatcttacaattaaatattttgaactaataagtcttttattttgtttccaactcatgtgtttaactaagtcctaagctaacactagattttttttaaaagaaatttggttttcctccacagtatttttattgttttttgtggacttgaccacaaaacttcaaaagactcggaagaaaattaaacaaatattatgcacaatttcgcaccactcaatgccttgcctcccctacctaaaatgttgacaatgtcgtcttattctttatgtcaagcacgatgatgtgtctgactttaagtaatttacattttttaaaaattcgtgatagatattctcccaaattctttcaaatatcataggctttaagatgttaccaactaccaagtctcctaaaaagaccaaaaagtctccttagatatttatcaaactctttgatgttttgttgctcgttccttcgttcacagtttcctgatttaacagtggccagtaggataatgattacgttgcttcacttttcactgttactgtggaattgcttggtaatttcgaaaacttgtatccttattaagaatttgtaaaaagttttgcaacttcgtattgtacatctttattaagaatttgtaaatgaatgatatacagtagtaaagacaagaggctatgaaatatggttatgacgattgagtcaacaaagaggaaacttccgccaagtaaaagtctaagaaataattgtgaaaacttgtatggccaagttacctctcagctgttatgttaaatgttttatatccaccaagacagactcactacttgtcctctatttctcttcttaaaatctcaatctccaaagtcttcgtttctagtttcctccttctaactctctct

SEQ ID NO: 1923 - DNA, 3000 bp, Unknown
  misc_feature (1)..( 3000): cDNA_ID_2148002_gDNA_ID_1620468_Annot_ID_157963 3000 nt of promoter + ATG
tcattactatcacgattcctttaatttctgtcaggcacaaagttttaaagtggacctgaattaagtttttgatgtataatagttctcttttgtttatggagagacaacgaacgactgacttgctttgtagccacacctgcaaagtttttaggcatctttcaaagtccataaaccaacttagtctagttccgaataatctttaacacaaagcgtcacaattgtttcaaatgcaagtcgtgttgtggatacaaaaaaactgatggaattcacgcaaatggttttaacaaaatgaagatttctcaaaattggcagatggaattcatttatttgttttcaagtactctgtttctttcttagcttgcacatttgttttgagcttatgtcattactattacaatttaatttctgaatcctcacattatacttattttcttgtttcttacagtttgaggattatttctccataaatcctttcctaactcgagcaaggatcacctcaactacggtgtggagaattatgagctcacatcttcacaagaattttgtaaataaatttaagggacaaagtgtcaataaaattgttctcaaaaatttgttgtctgagattggatgaaatctgttgtttgaaactcttttggctctggattctcctctatagctgaagtcaactacggtcatgttgatatacaactttcatctaacagatacttcatattaaaaggatttggtataagattctctgaacatggtaatgtagagggataattagttggtccataaaatatttttgcttgtggcaaccaaatccctagggacggctctggctatatggctttgtagctatgtaagaaatgatatcgcataattttcaattttgcttccaatctgattatgcatatagagacgaagctgcaactatgtaacatattaaggccaagacccaagagtgaataaaccatattctgttgttactttcctatgtgatatcaaaatgagtaatggagtttctataatttgattgttgaacttttaaaatctgtcttttagagtcatgtccagaatatttgtatcagttctacttcttgtatactacgcaaaattgtagcctgtaacacaagaaacaagaaacagagtaagaaaaaaaggggtaccttcttcaacacgcttccattggaacagttaacaagcctacagaagaagaagatgaagacgaagatgaagacgaagataaagacgaagcataaatgatggaataagtagccaaagttttatgttttatgtaaacagtaagcctaacacattcaatagaacattttgactttcccggagaagcatatatcatactataggattttaattatgtttgtatttggaaatttatcaaagatgtttcatcatatgattaaagtgtgagtggaggagaatggaccacaatccacgaagataattatattaactccaatcccttttcttccaagcaatttcttctctcttttagctacagcaatccaaaaacacacgtatgatattatcaaaactacgactaccatcctgctctagttaaaaatattatgcataaattcaaaaagtattgttacggataataaatattaatcctatgagaaagtaatattcttttgctttttcagaatttagatggttgctttccaagaaacatattttgttttgtcaaactttcaggtcttgtttgctagtaaactcttttatcgcaggaaaatcaaaagacacactcataaactcttttgttatcttgttatatatatgctgcgtgattcgacttttataataagcccaaattgaagatttttttgagatttttttaacctttaattattatatgattatttaaaacaagtaaaaaaaaaaatcaaacaaggaggaaagaagaattataaatttaaatcagaaccaaatttattaaatatctttcttattaaatatagaaacataattagtggacatgatccatttttgttaatatttgtatccgtcttttaggcaaaaaaacagtggaagagtcggtttaaataaaatccgatccaatcaaattttatgaacaatatttctaatcgggtcgggtatcatttgtgtcggaaaactatttaactcatccacaaaaattacttcaaaaatactatggagatttaataaatctacggctagcaaaatggtccataacttatatgcttgggaaaccactcggtcaaattagatgtcatatttttaaggaaattatgcatctcaccaataattttcaaactcgataatattgacgaggtttccttctcaggttttgagcaattgactgaagttcaattgcctgaggaagcaaaagacaccaataatgcttgcaccaagttgtcatttatcacctgcactaactgtttcaattcaaatcaagaagccttaattaccaggtgtagaggtgtctgacgggttaacagaacttaggatcatatgacttgctccacaaggtacatccatcattgttttcctctaacaactacttatacacgtttctttttctatttttttacttgtcttgatatctgtaaaatgtctctgaaattttacacttctgaatagaatatttattcgtgtatcaaaagaaaagaaaatctaaaagcaatataaaacaagaaaaatgcgaaagaaactaagtgaaccaaagaatcttgaagtttccaacggtttttattaaattaatattaattacttttcaaatatttaattgttccctatgaatgaagcaaaatatggattctatggagacagaaaaagttaaccacagcaactcagctttacaactgcggaaacaaaaaaaataaaatgaccttatcaagaaaaaccaaacagccttaaccaagaaaagcaccattactctaacctctcttgaacctatataaaccctaagctcttaagctttaacaagaaaaaaaacataagctcttaatcaagtcatttcacacccaagaaaaa

SEQ ID NO: 1924 - DNA, 3000 bp, Unknown
  misc_feature (1)..( 3000): cDNA_ID_2147984_gDNA_ID_1620468_Annot_ID_157956 3000 nt of promoter + ATG
tgaagattatattgtacattgagatgagagaagagagaagagatcacatcttcaaacttatcagaatctgatcacagtgaagaaagagtgtgaagacaatgatgtggagaaaagggaagcagtgagagaatgtagattatctaatgacatgtggcttgttagagaaaacttttatctaatgacatgcatcttcaaacaaagttttctctttttgttttttgttttctacaacttcatctgcagatgctttgttgaagtaattcttgtaccatatatataacgattgggaattttcttgctgactctgctgtaacttaaacgcaaatgaggaacatgaaatgttgataagattttctgttgtattcaagtttgttacatagagagcctcttatttaaaaagaggatcctggtttgcctacattgtcccagtccttactaaacctgtatactcaatttaaaccggtccagaagattcaaaatcgcgaagccaattttgtcggaaagttcaaaacttttttgactctggaactttgccgttctatacacgaagctacattgagtgtggctttgtgattgttttacgctgatgtgaccgttgtaggaaatgtggagtcgtgccatttttcaacgattcaggtttcgagctttctctatatctcacgttatccatgggaaatgttacagaagtttctcagttactgtggagtttcagaatcgcgaggttttgatatgtaatcacttgttgagtcgacgaatcgatgaggctcgagaggttttcaatcaggttccatctcctcatgtgagtctttacacaaagatgattacgggatacacgaggagtaatagattggttgatgcgttgaatctgttcgacgaaatgcctgtgagagatgttgtatcatggaattcgatgatcagtggttgtgtggagtgtggtgatatgaatactgcagtgaagctgttcgatgaaatgcctgagagaagcgtggtttcatggacagcgatggtaaatgggtgttttaggtctggtaaggttgatcaagcggagagattgttttatcaaatgcctgtgaaagatactgcagcgtggaattcgatggttcatgggtatttacagtttggtaaagtagacgatgccttgaagttgtttaagcaaatgcctgggaagaatgtgatttcgtggacgacaatgatctgtgggttagaccagaatgagaggagtggagaggctctcgatttgttcaagaacatgttgcgttgttgcataaaatcgacttcaagaccattcacttgcgtaatcaccgcttgcgcgaatgctccagcgtttcatatggggatacaagttcatggcttgatcatcaagttggggtttttatatgaagaatatgtatctgcttcgctcataactttttatgcaaactgcaaaagaataggggattctcggaaggtgtttgacgagaaggttcatgaacaagttgctgtgtggactgctctattgtcaggttatagtctgaacaaaaagcacgaagatgcgttgagtatattctccgggatgttaagaaacagtatcttaccaaatcaatcaacatttgctagcggattaaactcttgctctgctttgggaacattggattggggtaaggagatgcatggagttgctgtgaagcttggtttagaaactgatgcctttgtgggtaattctcttgttgtgatgtacagcgattctggaaacgttaatgatgccgtttcagtgttcataaaaatcttcaagaagagcattgtgtcatggaattccattattgttggctgcgcgcagcatgggcgtggaaagtgggcgtttgtcatatttggtcaaatgatacgcctaaacaaagagccagatgagatcactttcactggcttactctctgcttgtagccattgcgggttcctagagaaaggaagaaagctgttctattacatgtcaagtggaataaatcatatcgatagaaagattcaacactacacttgtatggttgatatcttgggaagatgcggaaaattgaaagaagcagaagaacttatcgagagaatggttgtgaaacctaatgaaatggtttggttggctttacttagtgcttgtaggatgcattctgatgtagacagaggcgagaaagctgctgcagccatttttaatctggactcaaaatcaagcgctgcttatgtcttattgtcaaatatatatgcttctgctggtagatggtcgaatgtatcaaaattgagagttaagatgaagaagaatgggattatgaagaaacccgggagcagttgggttgttattagagggaaaaagcacgaatttttctccggtgatcaaccacattgctcgaggatatatgagaagttggagtttctgagagagaagttgaaggaactgggctatgctcctgattatagatccgctttacatgacgttgaagatgaacagaaagaagagatgttgtggtaccacagtgagaggcttgctattgcttttgggttgattaatacagttgaaggaagtgcagtcacagtgatgaagaatctacgggtttgtgaagattgtcacacagtgattaagttaatctccggagttgtgggacgtgagattgttttaagggatccgattcggtttcatcatttcaagaatgggacgtgttcttgtggggattattggtagaacagtgatttggaaaatttcaagctttcacttgtgatgtggaaagtgacttgggaatttacattaatacctgatcttaccaaaaaaaaaaaaaaatcagatattattatgttagaatatatacagggttttggcttgtgtggtggtgattaagtcaagactcaagaaccagtccaaaagaggaaatttccaagaaacaatgatgcaattgctagggaccagctactgcaatttatagggtttcttaacaaccacgcgagccctcacttcgactctaaatttttccagaatctcctctcttt

SEQ ID NO: 1925 - DNA, 3000 bp, Unknown
  misc_feature (1)..( 3000): cDNA_ID_2147994_gDNA_ID_1620468_Annot_ID_157959 3000 nt of promoter + ATG
cttccttcctttatacgaaatctcaataagctgttgaaattgaacatggcattctgcaacagtctggaaactcttccaactggtttcaacctcaaatctctggaccgccttagtttctctgaatgcacaaagttgaagacttttcccaaattctcaaccaacatctcagttctcaatctctttggaacaaacattgaagaatacccttctcacttacatctcgagaatcttgtcgagtttagcatatcaaaagaagagagtaatatgatacaatgggagggagcgaaggtgagtagttctaaacttaatattctctccaaactattttactatcactgtttatatttaaactattgtcgcagactcaaattttgtacacttgtgtattaaaacttaaaaacttaagtgacttttataaaatttacaaattttatattattcaatcataagttttaaaattctaatgaattctaatgttattgaactaacgatttaaaaatcctactatattatttgggaagtacattttaaatgtaaccttaatttttgtaagtaattacataggtatgccattagaaataaaattttaaagagtaaattaatttatctttttaatgattaaaagtcaaatactaatttaattaattaaatttaattaattaaatttaattaaaaaacgaaatacattattattttccaaaaataataaccaatcaaaatcaacatataagatttgatatctaaattttaattaatttaatttaattaaaaaaacgaaatacattattaatttccaaaaaagtaaccaattaaaatcaacaaattatatttgatatctaaattatcatattatttttttattaattattatagttcacttctcatctttatatgattttatttttgcggaaaaataatatcatcattataaaaaaataattagagttatttcgcatatgccacaatttgaatttttaaaaacgaatataaactgttcaatacatgaaaaaatattataacgggtgaaaaatagatttaagaaaactttctactgagtaacgggtcataatttgaaatatttatattcaatttcatacatattatattgaaaatttataatcttatatactacaataattaataacatattagatgtgattcaatttttaataaaagctggaaaatcctagaattgacgggtttagatcgatattaatacaagatggaatactacaggtgaaactcttaaattaacaatcaaactacaagtgtataatcttaaacactaaacaatatagataatatcaacaaaacatatacatgaactcacagtttactatacatataaaatcaaataaaataatatcatatatttttaaatcatctttacaataaaagattttattttaactaaaatataagcctacctgcggtatactgcaagtcaatttaatattttatatacgaaatcaattaaatcttaatcacataaaaattagcacaaaaaaaagtattcaacaattaaaaaattatcaaatctctgtgttatataagttttgatactatattcgaataatgtaatataccttttcaatttgtattctttaactaatttaagctaactaatatatttgctaattttatacctatcaaaaccgactatcgtttcttatctctatagtatttttgcaagacttttttggtggatttggataaaagtgtattcgggtcatatgatacattcccctattaaataaatatggtgcactcctatgttattagctaaaatgtttagaatataattcagagtcatatcattaataaaattaatattaataaactaaatgactttttggcaagacgaatttggagagacgggtttttgaatcaacattaataaaaaagtaaaatatgattaatccaccgtttcaatacgggttaaatctttaatttattattttgtaagaccactaatattaaacatatcaaatcatcataatttaaaaaagattatataaaaccaaaaatgttatgtggtatgtataatgttactatatataaaattaaataataaaatataaatgtattagagaatgatacaatttgcaaaactttaatatataaaaaataattcttaaattttaaaaattactactttaaaaaaataatcacgggacgggtaaaaaaattacagaacgggttttattttggaattgggttatatggtggatgtatttgaatcaatatttataaaattttaaaatattattaatatgctgttttaatagggattaaaacttcagttttttaacaattatctcatggattcgtggtatagggttacctaataacaattataaactggaaaataaaaatattttataaaaataaaatttgcaagttttaatatatattacttttaaaaaataaatcgtcaaaatctagttttacctttaaatctactgttattgaaaccaatttgtggatttaattcttattaattttaaaggatttaagaagatttgaaaagatttctttagttaaaaatatagaaatccaaatctcatggttttagatggaatttgaaaagattttacaataaattacatcaacttccctaaaatcattaaaatcatataaaaccccagtaaaactcaaatcattctttgtccaatacaccctcctaatttcgttttgtttatgaatactttaatttgattgaaaagtaacttttggttacaaagaacgaagaagaaaacatttgattttaaaaaataaaataaaaatacaaaataatggatttcaccaaaacaatatacaaaataacggtaataaaagagttccaaacaatctaatactgtactgatgagatttacccataatactgttattcttttgattttaaaagatttattttctaaatttaagataataacactttaaaagtaatttgccactgaaacttgttatttggttcagccgcttacgcccttcctggct

SEQ ID NO: 1926 - DNA, 2836 bp, Unknown
  misc_feature (1)..( 2836): cDNA_ID_2147824_gDNA_ID_1620469_Annot_ID_157967 3000 nt of promoter + ATG
gccaggattttggtaagatgtgctaattttcatcaggcttgttaaaggtttgagatcactttgctcaaggtttgagacacctgaaagacccgggatttcagctagaagattcaaaagctctctgtagtttggcttaacaatggaaagtggtaattctattataccagtcccctgtagattcagtgtctcaatatttgggggaatttctgggaaacttttgatctctgtgcaacctgagagatttacaactcgtaaatgtagcaattgaccggtggctgggaaactctgcagtcttgtacagccttggagatcaactacctcaagattttgagcttttaaaagatcgtcaatatcaactagttgttgggaatgacaaagcctgattgtcttcaacatctccaggtcctacgaaaaaaaatgtcaaaaaaagaattacaaaatctgtctttgagtatagataacggcgaaaaacgcatatttgagattgcttaccttggttccaccccaaagtttcttaagttggctgtacggcatgttgatttcaacaaggtgtataggatcaaaattttgaggcagaaactgcagaggatagttctcccaatgcaggagtcttagcacattaggaagagaactgagagagcctttgaggaaattgtttacatgatggacttcaggattggaactgtaaatcttgaacaatctaaggttcaacatattatcaaaggcaacatgcttaatatcaaaacttaagtttgatgtgtccagaaacatgccttcgatctcttcagggacctgaaagaatattggaagtggattatagtaggatgttggctcataaaataggttcaatataaaactattaaatgataacagacctgagcacgttcaaaagttgttttttgttcttcattttcgttttgttccttatcttctaataaatatttgatgctgcaaggttcccacagtctgctgcgcctcttagtctgtcttgtttctctatttattatttgtcggccaacatcttggatcaagttatgcatccgcactcggttttctgaaatagtcaccagactcttctccacaagaacatcaattccaacatgtggaaagaaaccacaaccctcaagcagttgcatcacgtagtcaacattttctccctggaagaaacaagctatgtccaaaaaaatgtttttttccctgtcattgagtgtgtcatacgagctcttgattgcatcaacaaaaatagctggaggacattccttgagtttgaggaatgctatctccatttctggtggtcttttcttccccatcagttctctgccatagagattgagagctaatggatggccattagcatatttaataactttcattgacacctcgtggagattctgctctgccatatcgtctatagacgcacacaaagagaagagttgaagagcctctttctcatttaaaccctgaacctcgtatatttgattgactcgacaaaggcgaaacaccgatttatctttggaggttatgatgattagacttttgggaccaaaccagtcaaaccctccaagaaaagactccacaaccagaggactgcggacatcatcaagaacaacaagaaccctcttattgtttaatctatccctaagcaagctcaatttcgtaacggtaccactagcaccagcattttctttcaaaaactgttcctccagcaaacaataaacacccttctcttgaatagctttggtgtagtcttcaataaagcaatgagcatcaaactcaccagacatttggtcaaagactgctttagcaagtgtagtcttgcctatgccaggcataccccaaattccaacacaacggatgtccaacggttgcttgttaatcattttctcaatctccagcagcttcgaatatattccaattcgttccatataaaagagcttctcatacacatctctaacagtctcttttacaagctgggagtcactacattctttcctgcgtcatatttgttcaagaaaaagaaatgcacttcatagaaacactacacataaacttgaaactgaaattgtaatgcactttttaagatttagagcttatgatctcagttttaactctgttaggtattaacatgactacacatgaacttcaatggaagaattcactgatcaacacaaacaaggtagtgaaagacacttgctctgcgattcatatataactgtgaatagcttcacagaagaagatagtttatgaatacctggaatggtgtactgatgagaatcctttcgaatccagcgcgctaagccattcggtctctgatgatctgacaccgtacaacaccggaaccaccacttgatctttgttcttctggcaatcgagaaccttcacgagcttgtcaagagataccgtacggtttcctggtaaaatcataacagaaaccctagctctctcgaccattgattgagactcgttggaaagcgaatcatcgctatcgatgaagacatcgtttacaccttttcgctggagagctttggagaggtggctgacgaaggagtatcgtacctcctctatgcagctgatgtagacgatttgctcactctcggtcattattttagaaactgtgcgtctgggtcgcacccgaaaccaactctctaaaacgattgtggtccctaagcactgaagttggccaatggtagtcgcactccattctcaagtcaaccattctcaaacagttgttgagggagaaggagaaccactcaattcctagctaaaaacgtcaacagttggaaaagtaaacttattagatgattcaacttgcaaattgtctgccttgtctcccatg

SEQ ID NO: 1927 - DNA, 3000 bp, Unknown
  misc_feature (1)..( 3000): cDNA_ID_2147844_gDNA_ID_1620469_Annot_ID_157972 3000 nt of promoter + ATG
agaattgtagatcaagcccatgaaaggagaccattggaagaattaggtttaagttgcttgccggcagaatcttcaccggtacggacgacgagcatgaactccagaacaacatggcttctcgaaacaaaatgcagatgatgcttggagaagtcttcattaaaacgcgaggaggtagaagtattgtcgacgatattcggtgagaaagttcttcggggagacccgagagagatctagatccattggatccgagagaaacagtgagacaaatctcatatttcaaagatgaaaaacagttggaatcaagggattcctcttttgacgacttcgaaaccaacgttgtgaacagaggatatggaagaaggagactcgccggaacacaccttctttctctgtcacatatctcggagacgccatgggaagaggccaaaaagagaaatagatccaaattcgcaaaaattgaaagaaaacagaactaaaatgagcaggtcttgaaaaggaagctaagagaagacgagacatcccgacgccggcgagttaaaactccaccggcgtcggaaaacatggccaacgatggtgtctcgaaaatggtgcctgggagagagctaaattattatcttaagatttccaagaagaatattgtctttcttctctataggctatatgtataataatagagattacatattgaaacttcttcacctactctgggctaatatcctaatattaatcaaaaccttattatgaattaatatgtggacattacatattgaatcggactgcttaattaatatttcctttgtctcacacataaaaaaaacataaaaatctcatttaatttatctattttctgtaaaacatcattaactacatctaattctaccaataaaaaaaatatattgtaaaatataattaaccaaaaattattaaatacatttaagttttgaatagataagtgaaaacaacacttattttataattttttttttaaaactatatataatcagaaatagagggaatatacaaactactaacattgaaaaaatagtattcgaagtaagaaatttattattttgtatacatgattttagttaaagaaacaaaataattaactagtaccattcatgttgcggatgttaaagatctttatcgaataaaaggattgaaaaaattaggatttgattgttttaaacggaaaatgatatcattagtttccattttccaatgatgctaaatcagtttttaaagatttaaaaaaaacatcgaatattttaaagcggcccaagccaaatggagagaaaaacgcaaaatctgttttagctatcgaccttcacgttgggatttctatgtaatcattatacattagactaaaaagaaaaatatgttctggaagaagactttgttttttataatactaagtacaaagaataacactgagtgctatcatcatcattcatgtttggtttatattggtcagtcatgatatattggccgtgacagcaaaatctaatcagtttaatatcacaataaaatagcagttggattagttatgaaattaattaccattgtttatttttttggttgggtgttctgcaaaaaaggctctccaaatctctgtctgttttattgcaattttactttccgtcgtcttcaaaaaatacagaacaaatttatgaaattaaaaataatatgttttataaccttcatatgtatattttaaaaggttttatggttgcatacattatatattcaaaagggttcatggtaattttaaaaatggatttaaacttgtcatcacgagagattcgatttgctatgttgtttataaaaaagtattttatgtatttttttatgtattatgaaatcaaatgtacgttatcgtaatacgtttacaatatatatatatatatatatatatatatatatatatatataaaggctagtttgcgtgttattcttgattttgtaggattattctatattttttagagttagaaataaagttaaaaaaataaacgattttgaagatgtttttgtaccatacccttttctttatttatagttttttcaggtacaagtttgcgcaaaaaaatctttattctaaacaggcttttatgtctacatcaaaacattatgggctttgatatttggatgggcttttaaacacccaagtctgcgaagatatttggatgggctttgaactgggaactaaagtacattgataaattctagaaataagagaaaattgctttccgtatttttgcaccatagaagaagttatatcttactcgtttttgcagaaatttagtcagtgaagaagtcaactctcaactcgttttggagagattcttcgaaaagtatttgcagtttccatttttggactaacgttacatggaaaatttccaaaatgtacatttcagaagattaattatactaataatagtaataacgacgatcaatgacgataataatgtcatcatactaagtatatatatatatctcacaaagatatgacttacacattaattaatttcaccaatccatgttgcaaattcaaacaagaatcgatcaaacgatcctattgcttgctcttcgatggtaggagcatctttagtttcttcttcttcttccaatgtattatttattccaacgagacctcaagtattcatcaatttccgaggaaaggagctatccctaaagaaaatatgaattagacattatatttaggaagttgcttaaatatatatatatttgtgagttttcctaatgagaataggaacttatctaattcttttgttatataagaaaatgcaaagatgttgcataacttatgagtttactttagagattgagagattaagagagagctttaggtttttatagttatttttctaaagaaataaagagaatcattctttatattttgttcttgatcatatccctaaaacaagaattggtattagagtttcaatgttaaagcaaaatccatagagaaagaagatg

SEQ ID NO: 1928 - DNA, 3000 bp, Unknown
  misc_feature (1)..( 3000): cDNA_ID_2147864_gDNA_ID_1620469_Annot_ID_157978 3000 nt of promoter + ATG
cctgtacatataacaatgactacaagacattaaatacacagagacacgcatgaatgtgtccacagacacataaaatagactttttccatgtggtccacttatttatcccacatctaaaaacaattatgtaaatcacttattgtccgtacagtgttataacattatcggataattttcagttttatttcagcgtattactttcatttgttttaattgttttaaaaaagaaaaagaaaagcgacgagacaacaaactttttcccagcaaagccatggaccaaaaacaaaagctatattttcagattcactaaaatagtaaaatggaaacagtgaagtttaaaggaatgggttccaccaaaacgtggtttatgttgtttctccccatcatggacctcacacgtttggcatgtgtaaaaactatacgcacttacaaaatagactatttatagttttaagagtaaacattggcgaaaaaaaaaaaaaaagttaacagtaataaccctataaaataattgactctaaatttgttttatcttcgtatatataaaagaaatgaagaagtgtaatccaaaattttgatagaaattgataagatagaatttgaaaaaaaaaattgtttaaaatgtaacactaactagtaaaaatataaataataaacatataaagtaagtattttagtgacatggcaaacgattgcaataatatttttatatttattgatattattatgtttttcgtaattcattttctactacacagtatcctgatttaatattatgtattatgttttataaaagacataatatatcctaatcttttaacatacaatattttcaattacaattcagaacaaaaattgtacaaatttctttcaataaccattttttacaagtaataatagctgagattggacatctcacattatattactttgattatcccatagatgaatcatctgacaataatcataatcaaaacaacttacaagtagtttttttttcatttatacgatctaggttataaacttaaactaagttttgaggattgataatttgattataattttacgatttttgctttcaaagtatcttaaattaaatcctgttaaattaaaaatcaaatatttagtggtgtgctcctccaccttacaccatcatcaagtccttttttcagtgaaagatggttttgattaatgctaactgctaactgtttccccttacaccatcattcagttgtattctttttacatgttaggtctaaaaatagtggaatgtggtattaaaaataaaaataatgagttaatcacaacaaaaccattattgggcatacgatatatattttctttgctcaaaaagaaaatgaaaattgaactatgcaattcaaaaatatatcaggttccttaccttttatttatcaaattcaacgtcacaattttactacatgacagcaattgtaacgaaaaaagttaaagttgaatcttggattgtgaaaatttttcgtaatttggtatgaaaataatttatgagcaataatcctctttcattcaacactagtcacttcaatcaaaaataactcccaacattgttatctttaagttggcgatgttgtaaaaatacaaaaaattttgaatttcttttttcttaaaattctaaagttttgaaactaaaaaaaattaagaagacatttcagtgagtactcatgctcacaattttgtctatgaatatatcaaagattgacagagtgttaatatggattttaatcactcaaacacccttgattatagaccttatttgagattcaagattaacaaggaataagaatagtaaaggtggcatatcagattaacaaatgaataacaaaatcaatagaaggataacaactgtaagccgaacaaattttatttttttaaaacgccataaagctaaaatttagttataattttaaaatgtgctagtgctagataaattaaattacttattatttccacgttttataattcaatgcaaagttttgtgaattatatgtattcaacaaatcaaattttcaaactgtaaaaacatggaaaattgtatatcattcaatccctaaatcaaactagacacgacatttatttaaaatacacacttactcaatcaatatgtttggaaaaataaacaacaacaatacaatagagttattatattgtcaaaaatatatacacggtcgaatcttcttggtaattgcatgatgtagcaagcgtggagaggaattaacacataacagatacgacttgcatgcttctcgatttgtttttgttttctgccagtacatttgagaaaattgattttaccaaaataccccttaagattcttacctatgacatatactgaccaatcatatcaatgcttatagatagtaaaaaaaaattaaaaaatcattccgtttttatgtatagtcaaaagaaaactgaaaaaggtattttaaatgattcctaaatttcgtatagtcaaaacaaaactgcaagaaaattttatattagctagatttatttccttttgctatgatatattataccaagatataaatagcatttatgcacgggaaaaaataacagattttaaggaaaaatagctaaacaatttctttctttaaacattactaacaaataaaaatcaattttaaatttacaaaattaggaatacacaatatttataccatatcactacaagtcaagtcaatcaaaaaaaaaaaaaaaagtatacatatacagtcacatgtgctggtgtttgttaagatatttatatataggaaattaatttaaaaaaatgtaaaactttcaaaaggataatttattctctttctagaaataatcttattttaatttattcatttttgactttttttctctctctctcttccttaaataaaaagcctccctccatagatttcttcaccagtcttcttcttcttctgcctccaaactctctctttctctctcgagaaccttaagaaaacgttacaa

SEQ ID NO: 1929 - DNA, 3000 bp, Unknown
  misc_feature (1)..( 3000): cDNA_ID_2105961_gDNA_ID_1620469_Annot_ID_157981 3000 nt of promoter + ATG
tatatgacccggtccaagccacgccaagtctcttttaatacacgaaaactcaaatatcaaaggtggaaacgcatgttatataaacttttttaattgatattatatcaaattattcgatattataaaaaaattacataaggagactttgtatgataaaccatatattccgcgtagcttctcagcaggaactaggaagcatcaccgacactgacacaccaccccattggatcgatgcttcaatttttatttccagtaatacatttacatgagtcatcaaggttgttttctcttccaaaatataaaaaagttcatcatatacaggttcatacattttagatgctttgggacaaatttaaaagatatattccttaatatcataatttttttatatacttcttcttttaacaaaaacattaggtgccttttgagtatatacaaaaaacaaattgtgtccatcttgtatagatttttttttttgtgccctataaatttatgtatatgtagttatgtaccctataagtttatattatcggcccctatagttaagccggcattgactatatatttttatggaaaatttaagagttttctttttgttttgttatttttctttttaattgtttcatcaagttaagtttcgtttccaattcctcttagaatgatttttatctcttgtgttaggtcacgctttactagtttacactcctctttagaatgatttatctcttgtatgagttttgtttttgtctttttgttaagaatttaaatattccactaaaatgaaaagtgttaggattttcatgaagtaaagcctgaagtttttggtcttatggcaaaaaaagaaaaaaacatgaaaacaaaagaaatcaatccattgacatcaacaaaacaaattacgtttttgagtcataaagtgatataacaattttgaataactaccaatatatatgtcctcaatcttgtgtgagttcaaggctttatgggttacatcgttatacttagtttatgtaagaaatttgtaaatttgaatgggttaaaacttctgatctaaataacgaattggtaggaaacttttttttgtcttgttaatatttgatggttttagccaaagtaatacataaaataattatttagtgaccaaaacttatcgcatatttgatgatttaagccatagtaatatgatttgtattagtgacgttgatggtttaatatatgatttagtgatacttagtgaacgaaagatacaaattaacatatggtttaccaaagtaacgcagcgtcactagtgaccaaaacttagcgtatatttgatagtttaagtcaaagtaatatactaatatgatttgtattagtgacgttgcattgtcactatccaagtttacacttatatgttattttttgttaaaaatatatatttatagttagaattctatattcgatagcattaccgaaagtcgaaaatttaatcataggaatcattgccaatcgaaataatgctaattaaattttatttcatataaaaatttgatgaataaactattcaacgactatccttaaagagtttttttttttttaatagtcagctaacgcatttcaccgattgtatttgtagccttgtaggtagagtcgaatttccgacgcgactagaatgctagcataagagacttcaccactttgttacgaagccaagaatcttcttgttttaaaaaaaaaaatcaagacaaaattgtcgtccctcatatctatattcaattcatttcaaaacgttatttatgtcttaaaatttggaactaggccacaaagaatgactttggtcatcacaaaattataaatttaataaaaatttggaccactataggcatagctattgcctattataatctctactattactttatgatttatctactattccgaaagtgtaattgtttaatacgtcatcacattgcagcaatccacacacaagccacgtcattcatatgccgttcgtatttgctttcgtcacttccttccgtcatcaatagtgacggctatttcttaatattaatcttcttgacttaatgctatttcgtgacggcattaattggcatatcattacaagttatttacacctaagaaacaaattaaaactattgaataatatgatgtaaataaaaatatattaatgatgtgatatatcgcagtcaaataaaaatagtgattttgatgagaaaaaaaatatgtgtttatccatagatttgttaaattagagaaagatgtggaaaatgttagtgagtggcgtcatacacggagaacctttggcatcatacacggatttttctagtctttgttttctatttgtcaactttcatttgagtctttctttatacactttattagaccatgtttttaattctaatgcttattaattcatattattaaatttacaaaaaaaactattatattaactctcttgtttcctctgtatcttccttcacattgaagctgtctctttctttcaccatcacttgcacctgttgtgtcctgtttgttctcaatttcatcatcatttatcctttatatacctctctttctttcttgacttttcctctaaattctcttcctttttatctctttgatacatctcaatttggttcttttgccttctctttgatcttatctcttacgattgtgcagatctcaatctctatatccttggttgtgtcagattctcttagggtttattttctctcccaattttgtttgattccttgtccaaagtttcttcctttccttttgacttttttttgtggtacattgaatcagaggtgtaagagtaatagtttcataactcaaatccccaagtgtacaaattttcctcttttggttctgggtttggttgattccttgttagaaatgtaaatttagggcttttgtatctgaaaccgatcttcagacttgtgtaatcttcttgatcttcatgcaagattgataattctacaagaagaagaagaagagaaa

SEQ ID NO: 1930 - DNA, 3000 bp, Unknown
  misc_feature (1)..( 3000): cDNA_ID_2147840_gDNA_ID_1620469_Annot_ID_157971 3000 nt of promoter + ATG
caagaagaagatgtgagcaaaggtctgatcaattttctcgaaccggtcttacaaaacaaaaatataaatgtcttcatagacgaggaagaggtaagaggcaaaggtctaaagaatctgtttaaaagaatccaggactcaaagatctcactcgcgatcttttcagagtcaaaatgtgattttaatgatttactgaagaataatgaatccgccgatgaagcgattcctatattctacaaggtagatgcgactggagacttggccgatctccaaaacaggtattgtttcttttcctctgttcttggtgaaggacacgttttacttcttatttggtctttttgaatatttggtctgacccaaatgtttaagtaaagtaaaaaaagtcagtctctcagtaaaaaatgattataatttcaaattttattttatattctagtaaaattgtaactaaaagattaactttttttttttactgataaatactgtatatccaattatcaaacatgctttggttctaactggcaccctatcgattgaattttttattatccgtatcgaatgacagcgtaaagtgcaagaaagatctcataaattctgccgtggaggaaatgagtaaattgctggcgaatatttctgtgggagtatacagagaaaaagaagcaaatagcaaatgtttcatggtccctgcaaggaaactccagatgagtcactcggagaaactgataaattggacatggagttctatctacgagacaccaaagtgagtgcaatatatcagatcaatgtattttgtggttagtgtttagtacataggtacataaccataaatttaaacaagttaggtaaaaactgttattataataaaataacaaataatatttaattaaggtgtgtcgaataaagttgtagttgtaaaataagttagtactcaaaagtattttactaacttaaggagttatcttgatgtttaaccgaaaagattaagtgcactaatttaaggagttctctaatgagggtttgttggagtttaaaaaactcttaaatttaaggggcttgtttgagatgctctaactattttgcttgccatactacttttgacatacagtcacatggttttcttctgtcctttttctatttttataagattgaaaatatcattaaagtgatagttttggttttacaagaaatgaagaaagtaaacctataagacattttatgaaactaaaaggtcctatgccaaaaaaagtacaaaatatatgatagcataaaatttcgaaattcaatgtatcgaagtaaaactttaacgcttaggtcagcgatgtgataactttaaacatcttttttaatatatttttttattttaaaaatggttttattatgtttcagtgacgctgcaattgaagttgccatgttgaatgaagtccactggctgcacatgtctggaaattttcacacaagaaatctgacaccagggacaaaatatgaggttgtctttttggtgagcttagatgatacatcttcaggatgggagcagccggtgaatctgaacttgaaggtaattaatccagatggaactgagagtttgcaggagcgagaaacaagcttggaatgtcacataggtgaaaactgggtggatattcaagctggagttttggtggcacctcctaggaatgcggccgcaaagatgactttcaccatgtatcagtatgtgactagtgaccggaagagcgggctcgtggtcaaaggtgttgctattcgtcccatgcagtaactaaagaaaaagtaaaacattggatctttttatctaatattgtgattgcgtgtattgcacgaaattattattttttattgtatacgagaaatccaaattttcaatactaaagatatttattttggttgaataatttaattatatatcatatctagcaaacattagcaatacaagatgtgtatttaaagtaaattcctacgtgcttttaatactgtggttcaaatcctaatatagctaataaaatttagttatcatatcgtatatatatgatgcatgacttgattctgatatccccgcgttcgagatcttaatttttcatgcatggtcattgatatgaaaaagtccacttctcttgatatttcttgaacttttcgcagttgcagttttaagttgacactgttttttctaattaatatctacggaaagactttatgaattgccgaggtcttcgacacttgatgtatacaacaacactaaaccctcgtaaaatggttatatataaaataatttaaaactcggtgtgaatttcaaaacaattgtagtttagtggtttattcatgttgatcaaggtcataatttgattatgattatatgcatctgtcatcagctacatattttaatcaattattctgagttatctcttttaccaaattatccatcacataagaacatactcggtgttgacctagagacatccatacactacaagaaaacagacaaacaacgactacagaaagcgacaacagatgtagtcgttgtttttggcgactacgtcacgaccgttttacgacgcatatacgacaacatgaacattagtagtcaattagtcgttattttacgactaaaaatgttagtcggcaaatactcgtatagtaacgactatttaacgattatattatagaagaaaaacgtttgttgttacatagtcgcaaatggacgactacagtttccgactgcggaagttagtcgcccaatcggcgactaaaatacgacacatatctgtaatcgtaaactagtcacaactgagtcgcagaatagtcgcattaagttgttggaaaacgttttccgcattgcgaagtaggtacacctaatttgtttgttgtagtcgtaaattagtcataaaaattcgtctatataatcaaaattcacgacactcttctttcacaaacaaatcaaaacaacaatcaaaagaaaaaaaagaaaacaatggaaatttagtttattctataatg

SEQ ID NO: 1931 - DNA, 3000 bp, Unknown
  misc_feature (1)..( 3000): cDNA_ID_3065206_gDNA_ID_1620470_Annot_ID_157994 3000 nt of promoter + ATG
cttcacgaatcaaatcataaccggtccttaaccagctccagttgagatcacaaatatattttattttctgttctttgaaagtttgaaacaaatacatcataccaaactacaaaatttattttatatttatcgtatttgttcatcaaataaacaaataagaatggaccggagcaaatcataatgataatcacattcatgagcgcaaacattacaaaaaatgttataccactgacctgttgattttcttaagtaaacaatcaaaagtaatatcaaaagcatctcgaaacttttcaaacttagcattggagtctccatataccaatccaggcaaaagctgttgaactatgtaacttttcatatcctttttctcctttagagtctttgccttcaatatctccaccacatttactctcttttccttcacatcttgttcgcttatatacactgagtacttccgatgatcctcaggaagatgccacgcgtactggtaataagctgtgtacggagtaaagatcaccggaatgcagccggagattagtgaatcaaatactgatctccttgttgcactatctccaggcggctgcagacaaaactctgaatcttgaaacaaatcaaggacattcttgggattcgtgcagctttcgtttgtacaatttaagaaccgacattggttggaagatatgcattgctcgattagcgttgatcggatgttattagggttatcgggtcttgcacctcccgcgaagcttactagattccggcgaagtttactcatgatcttgatctgccagcgggtgatatcatcatctgttcgcggatggaaataagttgggtgaggaatggcgatgtcgttgacctgccatggctgtctttctatgagtagcttggtagggttttgcatttcttgtagctcaaggaaccttgagccccaagggtccttatctctcctaaaatcccaagttatttttcctagaacgaacacatgatctttcccggcgtttctcctccatgattcctttgaattaagccattttaaaacctcgatccccaaacggtccttcacatcttcagaaacattcctatagtgccatctcaaaacatcatacccgccatagtaagggacaaagaagagcttagcttgggtctcgttgtaaaccctacaaggatgcttcaaaaccctagagtgtaagatgggctcaagagaatacatgtgtgtagcaaaccaacctttgccaagattcttaatagcttctccaaagccttcattcttgaagtagctacacaagttaacccctggaagtatatcgttgcatcctaccaacaaatcgctgttgaattttgacggtaaatcataaacgtaaactcctttaccttcacacgatcgcggtttattgaggttttcatctcccggagatagccatgatctttgtaggtaaagatacttgatggctgcccttaacgcatatccctcatcttcactcgtaggtttgatgtatttgctgtattcttcctcggcttttagttcaatgagtgaattgagatcaaccttgttctttgttttgtgttcttgaacaggaactgaattaagaatcttgttgtgatccttagaaactctatctcctgcgatctctccggcgaaagttacattttcttcagaaattatttggaaaccgggtttagaaccagccgtgttacaataagggtcgttgaactttcgagagaagatacacatatggaagttgttgtaggagattccggtggtgaaagataaacaaagataaagaagaaagaagaagagaaataatgcaggaagagtatagtacaagaatctgaagaagacagaacatagatggatacaagaatcttctatagtctttgaagttcttgactttctctttgaaaccatttttctgacttggtcctttacttcttcactttggatatttataaaaactcatttggttacctatgggatttatattgtttactttattttaaccaaaaaatatattttctctactaaaaatagcatagaaaattaatgaatagataaatttaagtattaaattttctaagaaagtagctgaaaatattttcctatctatgtaattttaatattttaactaggggaaaacttactgtttattttatttttatttctattttttcctttcctttcctcttatgttaaatgatgaatttatgttgtataatcagaagagttagaatgaaaatggaaatatatagtgtacaaaattatactaaaacaggtcagttttgttaatatacattatacttttaaacatagaaatatatagtgcacaaaaaaataagggactatattacttttcaaatgcaatagtatacaatgctatttatgatatgtatgccatcaatatatattttagtctagctacatttattgaaatttgcataacttatgtgctacagtacttgaaagaaatatattctcagaaaattatatattcaacatattcagttttataaacttgtgagtaattccaaaactaattaattttgctattagcaaatatgagttgtttctttagaattttcttttttgacacactgttgagttgacttggatactctgctttgctgtgttcattttggatattaaaaaagatcagaactttattttgttaacaaaaaaaaagaagaattatctggcaaagtgtttaatttccgagaaagttgaagcagagaagcagaaagtttcagaattctcttttctccaagtttaacgcttttttagctcaaagctcacacacacgaccactctattcctcctttaacctttgtgtttgtcaatttgtgtttcctcttttgtcgactcatttctcgattcaatctcgattttttttttttttttttttatggaaatctaatgaactttttttatggatttgatctgttaaagtttcgattaagaagatagtggtttaggtttacggttttgtaattgatttattatctgta

SEQ ID NO: 1932 - DNA, 3000 bp, Unknown
  misc_feature (1)..( 3000): cDNA_ID_2148046_gDNA_ID_1620470_Annot_ID_157999 3000 nt of promoter + ATG
atgttctcatccataagtcaactcttttgggagaatccaagaataaaaacaaagaccaaaaaaaccaaaacttaaaacaaagaccaatctagcaaaataacaaagaccaataaacttgttaaatcaacgaccttctctctaatctctatatataatacttcattttcttttcttttatttcataacctctaaaaagattaaaaaacatggaaacaacaaagaaactctctgttcttctctgtctcttcttcaccatgaaccaagctatctccgaatccgattctgacgagcacatggcgactttttgcaatgattcatccggaaatttcactcgcaatacaacttacaacacaaatctcaacactcttctctccactcttagcaaccaatcatcattcgctaactactacaatctcacgaccggtttaggttcagacacagtccatggaatgttcttatgcataggagatgtcaacagaacaacatgcaacgcctgcgtcaagaacgcaacaatcgagattgccaaaaactgtactaaccatcgagaagcaatcatttactacttctcttgtatggttcgctactcagataagttcttcctctccaccttagagacaaagcctaatacttattggtcgtctgatgatccaatacccaaatcatatgataaatttggacagagactgtctgacaaaatgggagaagttatcatcagatcatctttgttatcttcttcgtttacgccatattatcttatggataccactacgttcgataacttgtatgatctagagtctgttgttcagtgtagtcctcatttggatccaaaaaactgcactacatgtctgaaacttgcgttgcaagaactcactcaatgctgtggtgatcagctttgggctttcatcttcactcccaaatgtttagtgagttttgatacctcaaattcatcgtcattgccaccgcttccaccgccaagtcgcagcggttccttctccattagaggtaagcatatatatcaaataatgatgggttgttaattttttatatatacttttatttatatagattagatgatacgtaccttaatttgaggctttgacatgttatgcatgcttagaaaaattcaaaatctattagaatatatattgtagtaaattttcgattatatataacttatgtttcaatgtaacacattttgtttttttcaaataaatttagaaataaaatgtatttaagacaataaagaacaaaataactgcaattttagttctctcttgtatctttattttagcattatggtcaatcttgttatgttttgatttttgtttttcttttacaggaaataacaaaatacttgtgggaatgattcttgctgtttcggtgtttgcatttttgggtttatgatcagatctacatatactaagaaaaaaagtttggtttttgagtttgatttggagtttttctaagagcaaaataaacatcattgtttccgttaattatgcttcatgcttatgtttttcctcgttttatgtggttatacattcagttgttgcaaggattgtcccatttttatacacggaattgttaatgagtacagctttctgaagaaaagtgtcatgtaaattcactttgtgaaaacatttctcacaattctttcgatttatcgttctttgatatccattaatttgtaattacttgtatatcaatgaccatgtataactcttttaaatgtaacccaaattaaagttttaactactagagtatcttataatgttttgttgggttagtttcatgtgtaaaataccattttatatgtataatatagaaaaatattttatttcatattattattcaccaagcaaactaattttttcataaatactccactattgactcaaaataattatgaaaataggcaaatagtcatgagtaaaaaatatactaacctcaaataaaagacaaaaatacaacaatgtattgtaatttagagaaaaatatgaaataaatactaattacacgaaatccaaaaataaaaataatcaatactgaaatattaacgacgtaagagaaatatccaatgagaatcagaggaaaaaagatcatttaataaaatagcatgtcaatactaaaacatttaggaataacatgttgttgttatggaggtgacgatggtggttgttaatggttacagagatggtgatagaaaaattattataagggaaacatattatattatataattaatatgatatatttttatttctctaagttactaattaatattatcatgaatagttatcaattaaatattttatcatgtgtcatgatttaaagggatttagtcaccattgatcgatcatctttatagttttaacgtgtctaatttaaagttatttttgtttcattcaccaattttatgatgaaaatttttaattttaacttttatataattattcaaagagttattattatgcgatataatttttattcatatataagttattattatataatatatttttcattcaaataatttttaatcaataattttagttgtgaatgaaacaatgcaagagtaaaatatatttccttttttatctttgaaagacaatttatgtttagaacgttgttaattcttacttttgttaaatttgatcggactggttcgtgtctagtatatatatatagattgattggtttaagatcatttcatacattacttttacattgtaattggtttcacgtcttttaattcgtccccctttgtttttttaatcccccacttgaaatatacatatgttctcatccattagtcaactcttattgggaaaatccaagaaaaaaaacaaagaccaaaaaaaacaaaacttaaacaaagaccaatgaacttgttaaatcaaggaacttctctctttctctaatctctaattctctatataatctttttcttcttcttcttctctttttttatttcataacctctaaaaagactttaagaat

SEQ ID NO: 1933 - DNA, 3000 bp, Unknown
  misc_feature (1)..( 3000): cDNA_ID_2148066_gDNA_ID_1620471_Annot_ID_158004 3000 nt of promoter + ATG
aatgggccgctaaaagagtttcttatccaaaaaagcaaatattttattaacccaatctctttttcacacaaagataaaatacatcaaagttcacaaacagaggcatcatacaaaaacacaaacattcaaaagcaaaaccccaaatcttcagttcccagaatcttgaactcccttacctccgccactgcctcccaactcacttccaccggaatccgaaaaccccatagtccctaccatagcaaccaaaacattttgagtaaaattacaaaaataatacacacatcaaaatcttaacattacgtgtaacacaaggacgagggagttttaccaacggtggtgccaagtgattgtggagactcttcaacggaccgtggcgacttcggtttaccaccgagccaagaagtgaccgctcctttaactttccccaccattccttctccaccttttccttcctctgcaaccgcctcaccatgtcctttcccctccgctatctggtcggaaggtatcttctcaaccgtcacttccacctcctttgtagccgttgtcttcttctctcctcctcctccaaaatgaagtttctcagctatcatttccgataaagctttgtcctcttctccaggtttcagcttctctgatatataatttttagccgtcacacctttctcttccccttgttgcgtctccttcactccacttccacctccggagagaggtagctttgtcatcaccgttgatcctgtttctttgactttttcgtaaaccggagtcaacttctcagcaacagttcccgccactttctgcccgtaagcagtaacagatctcggagtttcatcttttacagggctctcgctttgcccgccgccattctctccggtgtaacctagctttgaggcaacgacgttctttgcggctatagctttgttagttatggctgatgtagctgaagctaactgctctgtgtaggtgcttggttttgtctcatgtgtcgactcatctttggtttcctcagaatcatctctctctttgggacgagatagttctggtgagaactgatcatgagttcccgtcggtaagtctcttcccaatccactctctactttcacatcacctcttgtcggaaaatcttcctccatcccagcttttgattcccctccaaatcttgccggagaattcttgttgatatcagattccttcttcagatcaaactcatggcttctcgtcggaaagtcttcttcgcgtccttgtcttgatttctgatcaggagactcatcagtcactttcattctaccaagagactcagcaatctctggtactccagcttctccaccttaaacagaacagacaagagttattacagattcataaaccctaaaaaaagtctcggccaaagtcattacctttatgcgtgggatcagtaactttggactgataattagatacaccactgagataatccgatcctcctcctggagcagccggatcttcctccaaacgttttggcgtctcgacgttgactttccgttgaccaccgagatagtcatcttcaccaccaggagcaaacgtcctagtcacgtcctctgttgctgaaagcagagacacaggagtgttcaatggctcttgatgagcctctctgctctctcctctgtctgaaaattctgacactccgagaggataatgagtcggtgcctctcttttcgcttcccagtccgatgtttccgtcgttcttacaggatcagccagtgcctcatgtccgtaagaggtatcttgtaatgatacaggctcaatgggtttggtgtggtcagaagacacgacaggaaaaacttttgtccctggaggaacaatctcctccgatgccggaacattagtttctccggcatgactaagagacttaggtttacccgttacaccacctctcacggcagaggattcatacactgtgcatacacataaaaaaacagaaaaaccgttaatacacaaaaaaatataactgctgattgacgaggactttaatacagagaaattaacctggtgcgccgtgaacttctgggtcttgctcgtcatactcatcatcatcatcttccacatcgtgatcatgaccatttccatgtttagtgagactgttcttgattttcttagccttttcttttactttcttcaacactttggatgctcccttctcatgatgctcttcttcttctgtatccgaatcacaataaataaggcaaattaagagaaaagttctcaaattagaatcttctgtcatagatatatatatacctggatggtgaattctgattggttcttctgcttgctcatgaccataaggacgtgtcaactgtgactccattttccaaagctgtgttttctctttttcaagtgaatcaatcaaaccctctttgttctagtgttgttttctttcttttcgtgtctctgagaaaatcagaacaaagttccataaagtttatagagagaacgatgacatatggccgaaccacctctctctggcttctgtctctttacttctgtaggattctgacacgtacgatgcgtccgtttcgtcctgccacgtctcagccagttgctctctacgtggctatgcgacattatcttttatccgatctttagagaagcctatcgatgtatcttctattatttagttttagtcggtccacgtttattggcccatcatgtagttatttggcaaatgcactgtgtgttgtttaaatataacaaaacggcaaaagaaaaaatcaattcagctatcaactgtgtgctgttttgaacatttaaaacggcataacgtactcaattaaaattaaaagacgacaagtggcgagagttgctttggtatctccatctccctcttgaaatcgacgggggatattttttaatttcttaaaaattcaaaaccgccaatttcaaaattcgttctcttcttcatcatcatcatcatcactgatacagtctgagctcccaagacggatctagaaaattacgatg

SEQ ID NO: 1934 - DNA, 3000 bp, Unknown
  misc_feature (1)..( 3000): cDNA_ID_3065243_gDNA_ID_1620471_Annot_ID_158020 3000 nt of promoter + ATG
agttttcgtcgtagttatttgcctcatgttcttgaagctctttctgcgttgttggatatggccagttcgagctcaaaagaagcttagaggaaacggatttgttggtccagctcctagttttccatttggaaaccttaatgacatgaagaaactgaaaatggcctcggttgtggtggataatagcaaatcttccaccatcatcaatcatgacatacactctattgcacttccacatttcgctcggtggcaacaagaatacggtaactaataaatctatatcctcttatttaaattccggacaattagaccatataagttgtttagctaacaacatttggattaccatatctaaatattaacgtagattattggttacgtgttatgtgatgcagggaaagtatttgtgtactggctagggatagagccgttcgtgtacgtggccgatcctgaattcttgagtgttatgtcgaaaggggtattggggaagagttggggaaaaccaaatgtttttaagaaagacagagagccaatgtttggtaccggtttggttatggtcgaaggagatgattggacacgacatcgccacatcatcactcctgcatttgcccctcttaatcttaaggtatagatatgtacttacaatagttaaactttttttaaaaaaatcgtttgcattggcaagagtccaagttgtagaaaattaatagggtgactaatctagttcaacaatttagactatatagtccttttccaaaagcatgagccaccatttttcatgacataaatttcaaggtcttatgatgttgaaaagactagaaagtactatattagactcattcaaaatcaaagattcatacgaaatattcctctttttctcattacttttaattattcgtcttaaaaacaggttatgacaaatatgatggtggaatcagtctccaatatgttggaccgatggggcatacaaataaactcgggtaatcccgaattcgacatggagagcgagatcataggaacagccggtgagattatcgccaagacaagcttcggtgtcacgggagaaaatggaactcaagtcctcaaaaacctaagagccgtgcaattcgctctcttcaactcaaatcgctacgtaggcgtgccattcagcaacattttgagttacaagcaaaccgttaaagcgaaggggctaggtcatgagatagatggtctccttttgtcgttcataaacaaacggaagatatctttggctgaaggagatgaccaaggccacgatcttctcggaatgttgcttaaggccgatcagaaagggaattttacggcgaaagagcttgtggacgaatgcaagacattcttcttcgctggccacgagacaacggctttagcactaacgtggacgtttatgcttcttgcgatccatcccgagtggcaagacacgatcagggaagagattagagaagtcatcggagattccaagattgagtataacaaacttgccggtctaaaaaaggtacattaccaaacacagtacacaacaatccacgtgcttaattatacgcatgcatacattatgtttggacgcgttcacaaaatagtttacaatttggcttggcatgttcatattttcttaataaataaacgaattgaatgcacgtaaaaaagatgatattagcctgaacgcctgatactacataagatttcataaaattaaaataaacgaaaaatataccttaagtatactttaagcctaattaattaatactttaatatacatctgatcaatgtggtcaaagtcagtggtcacatagaagtcaaaatctacaaaacgtacaatgatcaaaccatagaggcgcgtcaacgactgcgctgaccaatgaacacgccacgtaatcttaaaaaaactgaaaaatctaagccacgtggcaatatcttctcataatgaatattctatctgtttttattcatgactaaaacgtgtgacacgcatatcatcaatgatacaatgaaatcacatcttttagttaattaaatcacttaacctcctgaatgttaactttgatactaatgaatataacttccgatcattttatgcagatgagttgggtaatgaacgaggttctccggctatatccaccggcaccgaacgcacaacgacaagcccgaaatgacattgaagtgaacggacgagtgattccaaacggaacaaacatttggattgatgtggtggcgatgcaccacgacgttgagttgtggggagatgacgttaacgagtttaagcctgagagattcgacggtaatttgcacggtggttgtaagaataaaatgggttacatgccgtttggattcggagggagaatgtgtatcggtcggaatttgaccaccatggagtacaagattgtcttgtcgttggttttgtcccggttcgaaatctcggtttcgcccggttatcgccattctccgacgtatatgctttctcttagaccgggttacggtttgcctctaattatacgaccactttagattacattaccgcacaaatataaagtttttattttcaagtttaattaggaggatcaattcttttcttcttttttttttttggtcggcagatcaaaatttaactatttaagtcctcgacttttagtatatttgtaaacgtgtcttctttttccggataacggaatacatcatcttttatttcttgtaatttcactgattaatgcaatatacgattttgagactaagattcaagattgtgtgtgtgtgataaaatatgtgttaatatgtaagataaaagatggatgggttacacctaataaataaattaaggtgggtaaattttgaaagtagtagataaatgtaagggcctttaccgtaattatacgaaaggttcgtatcacgtttcttgtctcgtctatgaagcaacggaccaaagtaaagcgtaaatggaaaattcagtttcatgcgaattttcgaatcgtttgctaaattatggcgtctaca

SEQ ID NO: 1935 - DNA, 3000 bp, Unknown
  misc_feature (1)..( 3000): cDNA_ID_3065239_gDNA_ID_1620471_Annot_ID_158024 3000 nt of promoter + ATG
cctttttgttctgtatattatttcgatgttttcttttgaacaattcagtttatgtagtagttcacagttgtattagatttcttacgataataaccgaatctatgtttctgaaagaacagaaatgaaaatgttttagtaatgatatagaataagaccattcacgatctcagttcaaacaatatatttgtatgaaacagtaaaacaagaaataaacaatttatatcaatgtaacaagattagatgtaggagctgatccaagaatattccaaagtttccaactacatgagtacagaagttaactgcaaatcaaagctttaagcttatttattcagtgtgtataagttgttagaacccaaatctcttaccttttttcacgatccatgttcaaggtttgttacttatagggttttatatctctgtctttggtaatgaggaagaagaagaagagatgtcattttaatttggttagctgactccagatcgtaaccccgggaagaaactccagctgtttcctgcaaccttctcgatattctcgtctttcgtgttgtcgaatttaaattctttgctagatccaatcgatgaggaactcagcttctgaattctatgctgttcgttctctctgtctcctgaccttttctctatgtttcttcttatgtctgttgatgaactctcctctgtttcgatccggtcattgttgttcattctgtcgtgtgatcgatttagcttgcttgcaagacaacgtgcaacgtcttcacctgttaactcaaacgaaactctgtgatctgctaccatgacttcagagccatgatccgaatttgccagtgaagcgacctcagagatctgattttgaagaggccatgtggtattgttgggtgttaagtttccagatactatctctggaccatttggtgtcagagcgcctgaagccaaacctgaaccatgcccaacaggtgtgatcgatccagaaccgaacctcgatccccatttacgagctgtaaagtgctcaaaacccaagaactttggaggctcgcctattcgaaactcaaccatgggtgatttaccagggtaaggagaagatgtaccagagtttgaaatcactgacccgggagagattagattaccaccaccaggactccccggacacacctgattagaccgaaactcatagtgcgaagacgaaaacttttgattcatcccactagtactatccctccgagttagctccaacgaagaagtaagcaactgagcaaagggcacttcaggtgaagaaggtgtagttatatggactgatgattcaggaggtggagtatacggtgcagtagatggctcagttataaacgcagagaacaccggaggagtgactggttgagtttcattagcataaggtccaacggtaaagacagattgaggctccttaggcgagaatgtattgctagtaagagaaagtggaccaacaggcgagtgagaaaccgatgaaggatccgattgcaaaaacgaagctggagatgaaggaggagctataaagggaagaacaacagtagttgaagtagctgagttttgaacagtaactaccggaactccagatgtaaccggttcaggtacaagcacagcattaccaatccttttattgttcttctgagttccaaaacatgaatataaactccaacattttccccatcttcccttctgtacaaattaaacacacaaaattagactcatcttgatcccctttagagagaactgtttcaacaaaactttctcaaagtaaaagcttttgataataaagttaatcttgtttagtttctaataagtagctaaacgtttgtaattcacttttggagaaatttatactatccgtggaaaattaaccaaacatgaaatagaaacgcttttaacctttttaatcatggatgctattatgacttgtaaagccaatccacaaaaagattgaaaaagcaacaacgcatctttttacctttttgagaccacaattgtaatccagagagaacaaatcaaagtcgtgaaatcaagaactaagctcaccattagctctgatctagaatcgtaatcaaaatcaaaacaccaaaatcgcaaattcaaatcacattcactacagtttcgtaactatgagctaaatcaaaacagcaaaatcgcgaaattcaaaactaagaacagatcaaattttcagagcaatcattcaaacaaaagctataaatctcggaatcacgatctaaatcaagcaagtaacaatactgatctatgagcagaagaaaaacacatttcaatcacggaaaatctggaagaagaagcttagtagtttacctgagaagaagacggctgtactcgagactcggcggtgacgatggcggtagcggcggcgttaacagtctcaacgctgttattaacaacgttcctcatctttcgaactcagattcacaccgactacaataacatccagatttgcttgcttactactactcagaaaccaccacttggatctactacgcagagagattttcccgagaaaatcaaatgagaaaaggataaataaatcaaataaaaagcgaagaaggttttgtataatgatggatcgaattctctctctctctctctcactcacaccggtcgttatctagtccagcttttcattcaatttcaccacgagcttttgccacgtcatcacattttagatggttcatggttcctttccttcacaccaccacacgcgcttcacttaaaatagttatgcatcatttgggagggtaaataacggtttgatcggtttggttcaatccctagaaatgcagattcaatttttatctacatacatagttactaaaacttgttaaagaaattctaatatattggttgtgaacatatatttgtctctgcattgtgggttttctcaaatcaaagttccaaaaagaaaaagggtaatatctagaacttaattttttttggtatatatagactagtatcgtaaaatactaacgttggcca

SEQ ID NO: 1936 - DNA, 3000 bp, Unknown
  misc_feature (1)..( 3000): cDNA_ID_3065233_gDNA_ID_1620471_Annot_ID_158027 3000 nt of promoter + ATG
aatccaaaggtttgcatatatgtataggaaaaaaatcaaaaaaaatgatattaattaccaaatcaagtttcacattcagacatttattcctaatatcctaaatttggaagatttttttttggtaaattaaattaaagattaagatacatggttaagaataaattgatatgggaatatgtaatttgtagaaagacagagagagtgaggaaaaactgacgaggaagctgaaaccggtgacggaggcgaaagaggtggcgatggatgcggcggagagaggaagagagccaagatggccaacgaacatgacggagataacttgtagacaaaactgaagaagactcacggcgatgagtgggcctgaaagccatagctgcttcttcacttcttccttgacactacttttctctccgatcaaaggccatgacaaatcaccctctcctctttctctgtcgtccctcatttttttttgagaaatagcaaagctatgacaaagtatcttcctatctttaagggctttgtgtttggtccggtctctctcttctctctcgctttgtccctattgatgtgtgatttgtggtgtgtagggattagtacttttttattttgtcaactttataaatagagtgaatcattacttggctaataatgaaaaatcaaatggattttattccttttaaaatatttattggcagtcgcatacaagagcgggttgaatccagaaaacattggcaaatctattattaataaaatttaaaaatataggaatttgataaaatttcgttttattcggttcggttttctttgtaacactaaaattgcaaaaaaaaactatcatttcaattttataaaaaaaatttcaggtttgtgttctataacttcaaaggtaaaatctaaaattgtcgaagttggtatgtagtattcaattccctcataaatttgtatttttcttccagattctcgatgggcccggcaatggtaaaatgttatgcatcaaagaaacaatgtgtccaatatgttcaaagaagttagaatatgttcccatatagatgtggttttgcaccaaatggtaagagaatatacattcttcatttaaacacaagcgtagacgttgttgaaactctaggcatagactttaagaccgtttctatcacctctctctcttcaagatggaaggttgatatctctctcttcaagattgaagattgaaaatgttcccatatagatgtgactgtcactttctttaaacactttgcattagcaaaaatgtatcttatgagctgtgtctcttcttcgtttcctctatatccatgccacacaaactcctcatctaaatgagccgacaagcatctgggaacagtaccttggttggtaccatgacaatgggagatttccgggtcgatatccacttacctggatgcaagtacataaaaatctatgaggtggaatcaaagaatcagtttatacaacaaggagattgcgttgttacttgttacttacagaagtgatagcaagaaatcttagtttaggagagttgttgagaattagtggaattatatccaaccagagatggccatgtggacatatcactaattttccaagtcgagtgaaggtaaagccacgaaaatccagagccttcaatgactaaatcaaaagccaatataaatcaatgtgatcaaacctaacagccaagaagaaaaaaaacaataataataaaaaggatagataccattggatcttccaaaggtaacacaagatacgtgaccaaggaaatagctttgagaaacttgtcatcagtatgacatacaacgtcgatatgtggcttttcaaggcgaagcttatgcaccttcgcgaaacggtagtcccggttatcactgatggcgaggcccactttcgatcgggcaagaactgagcaacttgatataagcctctctagagaattttcatctttgaacaccacataaaaaaggcgtaatatgttgagtgacgggaggcaaaccgaagaaggaacatccactataatcttgtccgaaagagtcaattccacaagtgttttgcatgtgtaaagactcttaggcaagctggtaggctctgccgtccagtggagctctaactctagcttgcgcacaaagcgatcaactgcatttgcaactaatttcccaacatctacctcaatagaaaatttttaccgagttggatgcacaaagtttctagaaaaggtgccttgtgaagttccaataacttttcaagaaacttccacacgctttcgcattcatcaccaggatcactgtactcgagtttaggcaacaacgtccagacataacgccatcgttttgacaatatcattgtcccaactgcatctttgatcggtacaagcaacaaaatctggataagcaaatcgtcgggcaacgaactgatctcgtctctagaagcaacaacctcttcatcaattctttgacaacgttcggccattagtgatgtaatagctagctgagtttgtgataaagatttcaaatataggtaagcagagacgaggaggagcaagtcgaaccctaaaaactttagatgatcgagaaccttagatatattcgtaatttctctatgagaaattgagaataagtgaataactaactcttcttgtctcacaaaaataaaaccctaacttatcttttccgtgagacataaacaaacccactttgggccaataaaatcggcccattattatcttgacccaatccggatcaaacccaactccatactttggagtttggacccatcgttaccaatgtagtagactaatgtagttaagatatatataatagaagggcctatttataaaatacaagaaatgttaccaaagcataaaccctaaaagccctaaaatcttaatatataaaccaactcacagagactctaaaatcagccaccaccgcacatctctctcctttgccctcgttttttttcggttctcgtctttcgttcttcacttttagacaagcaaat

SEQ ID NO: 1937 - DNA, 3000 bp, Unknown
  misc_feature (1)..( 3000): cDNA_ID_2148131_gDNA_ID_1620471_Annot_ID_158025 3000 nt of promoter + ATG
tcactttgcttcctcctttcattcctccacgaggtggtcctccacgaccacgaggcgcaccacgtcctctgccgcgaggcccactacggcctctgtcaccactacggcctcctccaaagcttcttccacctccaaaacctcttccaccaccatctcttccacctctgaatcctccaccaccacgtcctcctgattataacaataccaacatacagaaaattaactaaacggaagaacagagtgttattaaaaatctctacttttatctttgaactttattgaaacagtgaagatacaaaaggctcatgaattaaaaccctaactaccaattcaaactacagaaaccgtaatgatacgaattcagatttgatacggacagggttatactctagaggcagacagaacaagaaagacataaactttaactaaggttcttacctgtaactgggggtctcatatttgcttgtctaaaagtgaagaacgaaagacgagaaccgaaaaaaaacgagggcaaaggagagagatgtgcggtggtggctgattttagagtctctgtgagttggtttatatattaagattttagggcttttagggtttatgctttggtaacatttcttgtattttataaataggcccttctattatatatatcttaactacattagtctactacattggtaacgatgggtccaaactccaaagtatggagttgggtttgatccggattgggtcaagataataatgggccgattttattggcccaaagtgggtttgtttatgtctcacggaaaagataagttagggttttatttttgtgagacaagaagagttagttattcacttattctcaatttctcatagagaaattacgaatatatctaaggttctcgatcatctaaagtttttagggttcgacttgctcctcctcgtctctgcttacctatatttgaaatctttatcacaaactcagctagctattacatcactaatggccgaacgttgtcaaagaattgatgaagaggttgttgcttctagagacgagatcagttcgttgcccgacgatttgcttatccagattttgttgcttgtaccgatcaaagatgcagttgggacaatgatattgtcaaaacgatggcgttatgtctggacgttgttgcctaaactcgagtacagtgatcctggtgatgaatgcgaaagcgtgtggaagtttcttgaaaagttattggaacttcacaaggcaccttttctagaaactttgtgcatccaactcggtaaaaattttctattgaggtagatgttgggaaattagttgcaaatgcagttgatcgctttgtgcgcaagctagagttagagctccactggacggcagagcctaccagcttgcctaagagtctttacacatgcaaaacacttgtggaattgactctttcggacaagattatagtggatgttccttcttcggtttgcctcccgtcactcaacatattacgccttttttatgtggtgttcaaagatgaaaattctctagagaggcttatatcaagttgctcagttcttgcccgatcgaaagtgggcctcgccatcagtgataaccgggactaccgtttcgcgaaggtgcataagcttcgccttgaaaagccacatatcgacgttgtatgtcatactgatgacaagtttctcaaagctatttccttggtcacgtatcttgtgttacctttggaagatccaatggtatctatcctttttattattattgttttttttcttcttggctgttaggtttgatcacattgatttatattggcttttgatttagtcattgaaggctctggattttcgtggctttaccttcactcgacttggaaaattagtgatatgtccacatggccatctctggttggatataattccactaattctcaacaactctcctaaactaagatttcttgctatcacttctgtaagtaacaagtaacaacgcaatctccttgttgtataaactgattctttgattccacctcatagatttttatgtacttgcatccaggtaagtggatatcgacccggaaatctcccattgtcatggtaccaaccaaggtactgttcccagatgcttgtcggctcatttagatgaggagtttgtgtggcatggatatagaggaaacgaagaagagacacagctcataagatacatttttgctaatgcaaagtgtttaaagaaagtgacagtcacatctatatgggaacattttcaatcttcaatcttgaagagagagatatcaaccttccatcttgaagagagagaggtgatagaaacggtcttaaagtctatgcctagagtttcaacaacgtctacgcttgtgtttaaatgaagaatgtatattctcttaccatttggtgcaaaaccacatctatatgggaacatattctaacttctttgaacatattggacacattgtttctttgatgcataacattttaccattgccgggcccatcgagaatctggaagaaaaatacaaatttatgagggaattgaatactacataccaacttcgacaattttagattttacctttgaagttatagaacacaaacctgaaattttttttataaaattgaaatgatagtttttttttgcaattttagtgttacaaagaaaaccgaaccgaataaaacgaaattttatcaaattcctatatttttaaattttattaataatagatttgccaatgttttctggattcaacccgctcttgtatgcgactgccaataaatattttaaaaggaataaaatccatttgatttttcattattagccaagtaatgattcactctatttataaagttgacaaaataaaaaagtactaatccctacacaccacaaatcacacatcaatagggacaaagcgagagagaagagagagaccggaccaaacacaaagcccttaaagataggaagatactttgtcatagctttgctatttctcaaaaaaaaatg

SEQ ID NO: 1938 - DNA, 3000 bp, Unknown
  misc_feature (1)..( 3000): cDNA_ID_2148128_gDNA_ID_1620471_Annot_ID_158023 3000 nt of promoter + ATG
aagaacaaaagcatatgcgcgcatagtatagttagaccactcactgggatcatttgcagtcacaggagcttcagtgctaggaactgatggtggtggtggtggaggaggaggttgaacaggattcgttctgttttggttgtacacgtttggcgttgagatatcatcaaggccaatttcacgctcaagggtacttttaaaatctcttgaaacatcctaaaacaaaagacatgtaaacaaacaaaaacagttaggcacaacatatacaaacaaacctcataatttctgaaagtcttgagatagaaattaaacctgtagctctctaatcgttggctgaaatgtacgcagagtttttccaagattccgagctacctgcacggatcatagcaagtaaaacacttcttcaaagagctaaaacaactctaaaagactatatggagaagcaacagtgatatcttgagctcttttctcttctcattcccaaactcagactctcaaatggctccgtatagacgtcgaactttctccaagttaagattttaaatccacagagaatcaaacactattaagccaaaaggtcatctatctctagcctcaactatacaccatactccaattctcataagagaaactaaacagtactaattcataagttgcttaaaccctaaaaagatatgattccaaatcaatcatcaagaaattttacacacacaaagacactaacctcagcaagacctttaggaccaaagactaacaaagcaacaacaccaataaccaaagcctcaggtgctccaacaccaaacagagacgcacgaatcatcatactcttacatcttctcttcttctctgcacacaaaaaaccacccaacttcagaaattaaacaactttacaaaaacccagaagtaaagaagcaatcatatctctgaaatcgaaacctgggtttgaagatttcggcgagattgagatgcccaaatgctttaaaccaatgtaaggagagaaacgagaagaacccagaagagaaaaccatgaggagaggttaggtttcgaagctttataacgagattgcagaggaggataagagaaaaggtgagattttgtaatcgttggtgatgaagaagaagaagctataatctgtaacgccatggccatgggcagcttcgaaattgtaatatagttttgtatgtagctttgaagactatcttaagccataaattcactccctcagcttcatcaccaatcaaatgtccagagcttgaaaatgaaataacaacacacacaaaaagataaaacagagaaaatctaaattatcctttggaaaatctgaatgagatagtcgcaaacacagaaatattgggccgttaaaaatgtatgatatttaatttgggcttgatttattgggcctgagctgagttctttggttgctctctttctcttggataaactttctctaaacatagtggagtgtgcaagtatcatagtattctttccattctgtttcgggttttcttttattctcaatcgaatcgagtaacaagtgagatttgtgtttatagttcttcctcaaacgtcgaatcatagggataaatttcaacaacaacaacttcttttaaagttttagtttagttattctttagaaatcttaactcgataatgatacagtaccaaacaagttgagtattataaagatacacaaccaatttgattcatgtattgattggtggtattgaacttaaacaacataattaattagggaagactcttagttttgactgatgtcaacatggttcatatcctaaaaaggtaaaaagaaagagtaataattagttttcattgtagagagacttaataaagaagaaagtaacaaaagtagaaaagaaaggtaaaggagtggcagccacacacacgcacgagggtttgctcaaaaagccatcacacacaacaagatggtctgcgcacgtgtgcttcttaattcttcttgttaccaacctttctccaattattttattttgttttacttaatgggcataaatagttacaaagttaaggatacaaaatatattgaaaacactaataataactatttgtgaataattagagaatagtatagcaacagtagagaagaacattcaaaagaaattaataaaagtgactctagttataaaaagattaaagaaatgctcaaaacttgagaggaggtcacatgggagttccaatgatgaagcggcttctattatattacctctctcacttattgatcggtccccatatcatatgcgtacataaaggctatgggtcaactcttccccatggtctaatatatttcttctttcctttgaacaagtatagaatcatccattttataggtacatttgaagaccaataattattctataaaaaaaacacctacatatagacattggccaacgttagtattttacgatactagtctatatataccaaaaaaaattaagttctagatattaccctttttctttttggaactttgatttgagaaaacccacaatgcagagacaaatatatgttcacaaccaatatattagaatttctttaacaagttttagtaactatgtatgtagataaaaattgaatctgcatttctagggattgaaccaaaccgatcaaaccgttatttaccctcccaaatgatgcataactattttaagtgaagcgcgtgtggtggtgtgaaggaaaggaaccatgaaccatctaaaatgtgatgacgtggcaaaagctcgtggtgaaattgaatgaaaagctggactagataacgaccggtgtgagtgagagagagagagagagaattcgatccatcattatacaaaaccttcttcgctttttatttgatttatttatccttttctcatttgattttctcgggaaaatctctctgcgtagtagatccaagtggtggtttctgagtagtagtaagcaagcaaatctggatgttattgtagtcggtgtgaatctgagttcgaaagatg

SEQ ID NO: 1939 - DNA, 3000 bp, Unknown
  misc_feature (1)..( 3000): cDNA_ID_2148095_gDNA_ID_1620471_Annot_ID_158014 3000 nt of promoter + ATG
cgacggttttagtattacatcgtttattgcgtccttatatatatgtacttcataaaaacacaccacgacacattaagagatggtgaaagtaggctgcgttctggtgtaacttttacacaagtaacgtcttataatatatatgattcgaataaaatgttgagttttggtgaaaatatataatatgtttctgtttttggtttttaatgtttaaattaaattcaaagaaaaaaatatcttttgtacaacaagtgcaacattttgttttaagaaataaagctaaaaatcagtagttgatgaactcaaccactagattcataccaaatttgaaggccttttatggtaatgtctatcaccaatggctcatattgaggacatcctgtaccgttcattaattgatactagaatggcaacaagtagaaaatgtagaaatttgggtatctatactccaaaaatgatttcaaataaccaaaattcaaaagtttggttattcgtactcaaacgaataattgatctcaaatactcgaattgaaagtacaggtgttagaatgtcttacgttaaaagtatgtacattagttttctttattcataatcaattggtttttgagtatatgtttattagcattcgagtaaccaaaagaatacgtatatatttcgattgggtacgggtatacgaacgccaaaagtttaaatgcataccgctaaatatttaggaacttattagaaggcaatgtgcccatccctagaccctagttgatacttgttaacatggttagggaaatgttcttatacagtgggataagttttgctatgcttatgtgagtaagctaggcaataggcatgagcgaaaaaaaaaaaaaaagttaggcatgaccggctccaacaaaactttgactctgactctgactgttctaaaatttgaaataggcccatttaaaacacaatatcccttagcaagattaggtatatgaatatttgggtctattaacagtgggccagatgattgaagcccatttaaatcacaacatcccctagcaagagcttcttcaacgaccaaacaaacttgtgtcttcctcgtctcactgcctccaccgccgccggcgaaatcaatcgtgtctttctctaattacagtagtcaacaatggtgaaccaaaggagaagacttgcgcagaagcgatacaaggaagctaatccagagctgtttccaaaagcagaaccaacgccaccaaaggaccctaataagaagaagaagaagaaaagcttgttcaagaaaaagaaacctggatcttccactgatagacctcagagaacaggctcttccacaagacatcctcttcgagttcctggtatgaaacctggagaaggctgttttatatgtcattccaaaacccatattgctaagctttgtcctgaaaaatctgagtgggagagaaacaaggtttgttcttttcttctttaatcattggttttgggattagggttttagttcaatttagttttagatttagtagggttttggcagctcttgttagaatcagttgagggtttaatctttatgaactcaaagatgaaatttttcatgaaatgttggtactttgatgatcactagacttgttggttactagaaaatgaatgtttttggttttgttgtttgtagatatgcttgcaatgtaggaggagagggcatagtcttaaaaactgccctgaaaagaacaatgagagctccgagaagaagctctgttacaattgtggagatactggtcattcactttcccattgtccttaccctatggaagatggtaatttttctcttctctggatccggaatatttatcttttctcatattacaagatttcaggaaacctagcatcgaaatttgtatttttttttacctctgtacacagatatttgacttatgatctgaagtgtagttcatgttatttagagagtttaacattatattctctgaaaacgtatttgaggctatactgtcacttgtttgtttgtttgttaagagtagtcactaagattagatttggttgctgtattgattcttttgtaggagggaccaaatttgcaagttgtttcatatgcaagggacaagggcacataagcaagaactgtcccgaaaacaagcatggaatctacccaatggtacaatgctcaaatcttgtttcgagccttttcttttcctcatagaagatgagttttgatatgttgaacaatggatttggtgggccttcttttgcagggcgggtgttgtaaagtgtgcgggagtgtggcgcatctcgtcaaagactgtcctgataaattcaaccaagagtcagcccaaccaaagaagacttcaagtaacattttcttttgtctcactcttccaattcttgagcttctaattatgtgatcctagtcaagtagtttctctttcaagtgattcggaacagtgaatgcgatctcatttatcttataaagaccataattgtatctccctgactgaaatgacaggatttgatgctacaccaagaggaaagctcactaagtttagtggggacgatcttgaagacgatttcactgaagagcccaaaagcagcaagaagatcaatacctctgatgattcagctcagaatagtgtcgaggtgaagaaaaagaaacaaggtccaaagattgtcaatttcgttggatgatcacaagaggatcgaaaagggtcatcaattttgtaggatatatcaaaagttttgttttctaatctcccttttagtcttgtgtaagaacaaaaaaatcctagttattcagaacaatgctatgtaatggaaccacacagccaattctgtttcagataatcttctaaaccgaacaaaacccacctagaaccaaattaattataacatatagtctgtttgtgaataaaccaaaagttgtgcttctcctcctcaacctcagtcgccgatcttcaacagtggctgaaacttgagagagagagagagaggaagagagcgacactatg

SEQ ID NO: 1940 - DNA, 3000 bp, Unknown
  misc_feature (1)..( 3000): cDNA_ID_2105598_gDNA_ID_1620471_Annot_ID_158007 3000 nt of promoter + ATG
catcaagagccattgaacactcctgtgtctctgctttcagcaacagaggacgtgactaggacgtttgctcctggtggtgaagatgactatctcggtggtcaacggaaagtcaacgtcgagacgccaaaacgtttggaggaagatccggctgctccaggaggaggatcggattatctcagtggtgtatctaattatcagtccaaagttactgatcccacgcataaaggtaatgactttggccgagactttttttagggtttatgaatctgtaataactcttgtctgttctgtttaaggtggagaagctggagtaccagagattgctgagtctcttggtagaatgaaagtgactgatgagtctcctgatcagaaatcaagacaaggacgcgaagaagactttccgacgagaagccatgagtttgatctgaagaaggaatctgatatcaacaagaattctccggcaagatttggaggggaatcaaaagctgggatggaggaagattttccgacaagaggtgatgtgaaagtagagagtggattgggaagagacttaccgacgggaactcatgatcagttctcaccagaactatctcgtcccaaagagagagatgattctgaggaaaccaaagatgagtcgacacatgagacaaaaccaagcacctacacagagcagttagcttcagctacatcagccataactaacaaagctatagccgcaaagaacgtcgttgcctcaaagctaggttacaccggagagaatggcggcgggcaaagcgagagccctgtaaaagatgaaactccgagatctgttactgcttacgggcagaaagtggcgggaactgttgctgagaagttgactccggtttacgaaaaagtcaaagaaacaggatcaacggtgatgacaaagctacctctctccggaggtggaagtggagtgaaggagacgcaacaaggggaagagaaaggtgtgacggctaaaaattatatatcagagaagctgaaacctggagaagaggacaaagctttatcggaaatgatagctgagaaacttcattttggaggaggaggagagaagaagacaacggctacaaaggaggtggaagtgacggttgagaagataccttccgaccagatagcggaggggaaaggacatggtgaggcggttgcagaggaaggaaaaggtggagaaggaatggtggggaaagttaaaggagcggtcacttcttggctcggtggtaaaccgaagtcgccacggtccgttgaagagtctccacaatcacttggcaccaccgttggtaaaactccctcgtccttgtgttacacgtaatgttaagattttgatgtgtgtattatttttgtaattttactcaaaatgttttggttgctatggtagggactatggggttttcggattccggtggaagtgagttgggaggcagtggcggaggtaagggagttcaagattctgggaactgaagatttggggttttgcttttgaatgtttgtgtttttgtatgatgcctctgtttgtgaactttgatgtattttatctttgtgtgaaaaagagattgggttaataaaatatttgcttttttggataagaaactcttttagcggcccattaataaaggttacaaatgcaaaatcatgttagcgtcagatatttaattattcgaagatgattgtgatagatttaaaattatcctagtcaaaaagaaagagtaggttgagcagaaacagtgacatctgttgtttgtaccatacaaattagtttagattattggttaacatgttaaatggctatgcatgtgacatttagaccttatcggaattaatttgtagaattattaattaagatgttgattagttcaaacaaaaattttatattaaaaaatgtaaacgaatattttgtatgttcagtgaaagtaaaacaaattaaattaacaagaaacttatagaagaaaatttttactatttaagagaaagaaaaaaatctatcatttaatctgagtcctaaaaactgttatacttaacagttaacgcatgatttgatggaggagccatagatgcaattcaatcaaactgaaatttctgcaagaatctcaaacacggagatctcaaagtttgaaagaaaatttatttcttcgactcaaaacaaacttacgaaatttaggtagaacttatatacattatattgtaattttttgtaacaaaatgtttttattattattatagaattttactggttaaattaaaaatgaatagaaaaggtgaattaagaggagagaggaggtaaacattttcttctattttttcatattttcaggataaattattgtaaaagtttacaagatttccatttgactagtgtaaatgaggaatattctctagtaagatcattatttcatctacttcttttatcttctaccagtagaggaataaacaatatttagctcctttgtaaatacaaattaattttcgttcttgacatcattcaattttaattttacgtataaaataaaagatcatacctattagaacgattaaggagaaatacaattcgaatgagaaggatgtgccgtttgttataataaacagccacacgacgtaaacgtaaaatgaccacatgatgggccaatagacatggaccgactactaataatagtaagttacattttaggatggaataaatatcataccgacatcagtttgaaagaaaagggaaaaaaagaaaaaataaataaaagatatactaccgacatgagttccaaaaagcaaaaaaaaagatcaagccgacacagacacgcgtagagagcaaaatgactttgacgtcacaccacgaaaacagacgcttcatacgtgtccctttatctctctcagtctctctataaacttagtgagaccctcctctgttttactcacaaatatgcaaactagaaaacaatcatcaggaataaagggtttgattacttctattggaaagaaaaaaatctttggaaa

SEQ ID NO: 1941 - DNA, 3000 bp, Unknown
  misc_feature (1)..( 3000): cDNA_ID_2148081_gDNA_ID_1620471_Annot_ID_158010 3000 nt of promoter + ATG
atgcattattacctaaagatatggtcaagaacaaatatctccacagttcgtctaccccactcatttaaacatatctcataagcttccttgttgatatcttcttcatccttgtcctcctagatttgcatccaagcaaaaaaaacaaaatttatcaatacaagtaactttctagtggaaaagtgcataagataaacaataacgcggataatggaattaagccgaccttaatacggttttgaagagctttatcatctttcggaggcaatggctctggagcagccctctctaggagtgcagccctctctaggagtaacaacacatcatcatcaactaatacgaacatatctctgtccactttaacaaacggagctggcaattccttgtcatctaacagttttgggctagctttcttgttcttagtttggacttcaagatccttcaacccattatacaagcaatccatcgctataggtgatgtaacaacattttccatgaaaaagtgttttacaaatccttttaggattacgtccattttctctctagacatctcacgcctagagtttttgtccattcctaaccagaaaacaccgaagctgcaaccaagaatgcaaatttataatggtctctagagacatggttggaagacaatatattaatctaacatggcatggtttcctcaaaagaagaggtaactacatttatggaatctggaggagttaagggtacaagttgaaatgtgaaataccttgtccatttggccttgtcctctatcaacttctcaagcttgcttcttctctcctccacaaagcgtaggaaaatttgctctatatttcgaaaatacaccctaacaatttctgtcttgtaaccataatcaaggaagaaaggtcggtccaccctgtctctgcaaggaccaattatatggccgaggaaatgaaaaaatataacatatgaacatgtggagatgtaacttgtaagtatatggtagcatggaaaaatggaccgtgcatgtggtaatattttgctcatagagtcggtcttgcattacctgatcacctgaactttagtttcaattgtaagacagccagaatcatctatgaagccatcccgtaacttcggtaactccataaactttttccatccccaatcatgttctttcttccaaaaccggtgcagcgtatctacaagatcatgaattcagttgtctggatatcgaaatggaagcaagcaattaaagattcgaaaaatcacctgaaaacttagacttctttggatctttatgcatcacagatatagtaaactgagccaactgactccagcctggtgtccaagatagcaaaagaatatatatcactaagtatccagagaaagaaaacaaggaccaagcagaccagtggaaaaaaatacaaacctggaagaagttcatcatggtttgcaacacagagaaataatgagagatgattgctaacatcacatccttctggatacattaaaatatgcctgacacattgaagataaaagtaacaacacaaagccttcaaaaccatttccagagtttttttgagacaaaaattaaagatgagaaagatatgcatgccatgtaccaactgtagcctccaatttcaaaaacactgctagcgaactcccttttgctgatttgtgaaaatttcttaatcttccatgtattttttccatataactcagagggtttaagacctgagaaaaataagaaatttcacattaaattagctgaaaaagagaagtatattactaaaacacaaaaacaaacaaacgggtatagtatctattaacatatctcgaaaaccttaatcatttgtggacgggatagtggggacgtttttgacgatattcataaaaaaaatcatattgctaaaacacataccatactcatcatccacatcagtctttgccattctaaaggatgattttttcgtcaaagctctcttttcttcaactacgaacaaaaaaaaaactaacgattagagcaaataaaattagattattgaattctgtaattccccctaagatgcacaattctattataaatttatcgtaaaataatattatatgatttgaaaagttctaaagagtaagactagctgaaaaatcaattgatttgatcaaaaactgaaaaatgaacaaagaacaagcacataggtttggattatattcaacaatctgactccctcaaaactgtatcgaattcatagcttaaatcgaaaccctaagaacccccatcagatcatggatgggcaataaaccctaaattccaatcttaaaataaataaatagattgttaaaaaatcaaagaaggaccagaagttcatttctattatgaaatcaacgatcggaaaatcataaccactctctcgtatttaaaaacaaaattaaagaagaagaagaagatagagattaaccatagaaactttgattctgagtgtagagactctaaaaatccatctctctattcttacatataagatgattgtgatcgataataacgatgaagtgtatcctaaaagatattttgtttacctaataaaatatatgattctttacctaaatagatgattcattttttggtatgagagtagattttgttttccactatgagaaaggggtaacgatttttatgtaacaaccccaaatatattatagggaaaatatcttgtctatttgtttattaagcttatatttttttccgcaattaataaaaacaagtagggacccacaaaatcaacctaaaaatatgaaagtaacgaaaccatcgcttatgtggtggggtctctccaagcaaaatcgcatgaaactttttaattgtatcgtcgtctcacgaatcgtagaggagcgtctctaactacaccaacaaacacatttacatttttccaatcctcaaaaaatttctgaatctttacgcaaccaaaactattctctatcaattttcaccatcttcttttttgttcatcgatccaaatcaagaaa

SEQ ID NO: 1942 - DNA, 3000 bp, Unknown
  misc_feature (1)..( 3000): cDNA_ID_2148087_gDNA_ID_1620471_Annot_ID_158012 3000 nt of promoter + ATG
ttagtaagccaatggaacctgatcgccttttcgaatgtcttccgagtaatcttcgaccatcatcagaaggtgaaggtggtggtggaaagactcatgatccccatcacaagagcttagaaaacgctatttttactgtcccaactgtcattcctccaagggttctgcctctgcttcatgacttagctcaacaaatggttcaagctggtcatcagcaacaacttttcaaatcttacaggtccaacttctcagttttctttcaagtagaacctctatagtcacacatattagttttgtaatccatatacgttttcgaactttattagggatactcgagctgcggtgttggaacagagtttgaggaaattaggagtggagaggcttagcaaagatgatgttcagagaatgcaatgggaggtattagaggccaagattgggaattggatacattacatgagaatatccgtaaaaaactctctcccacaaaacaagaataccttactagatcgctactgtttccttcgtttacacggcacttgcttttgttgccttgagacaggtgaaactgttattcgccgcggaaaagaaaatctgcgaccaaattcttgatggtgttgagtctctcagagatcaatgttttggtgaggtcactgtaaatagtgtagctgtgctgcttagtttcggggaggctattgctaaaagcaagagatcacctgaaaaactgtttgttctgttagatatgtatgaaataatgagagagcttcagcctgaggtaacgtttaatgtctcacaccgtcaaagaaactatgtgtattagctagcccctctaattgtctttcatttatagattgagttgctctttggaagcaaaccatgtgctgagatgaaagaatccgcgctgaatctgacaaagcggttagctcagacagctcaagaaacttttgctgattttgaagaagcggttgaaaaggatgctacgaaaaccgcggttatggatggaaccgttcatccacttactagctacgttataaattatgtcaagttcttgttcgagtaagtaactttacttagaccaacggacattgtcatttttgttggactaatcagtggtttttgggatatggaaacagttaccaaacgacgttgaggctactttttcaagagtttgatagtaaagatcctgatagcgagcttggagctgtaacaacgaggatcatgcacgctttacagaataatctggatggtaaatcgaagcagtacaaagatgtagcattaactcaacttttcctaatgaacaatgttcactatatagtgagatctgttaggaggtttggttctgtttcttcggctccatctttcttaaacagaaccagaaaagcctaaacataatcctgagttagagttacatttttcacaggtcagaagcaaaagatttattaggtgatgattgggttcaaatacatcgaagaattgtacaacaacatgcaaatcagtacaagagagtttcttgggcaaaggtttactcaatcgttttaggtttatactttaaaaatgctttaaaatgtattttctgattagtcttttcttctgcagattttgcagtgtctcacggttcagtcgagtgggagcggtccgatagaaaactcaaatatatcaagagcatcagtaaaagacagattcaagactttcaattctcagtttgaagagcttcaccaaagacaatgccaatggacagttccggacagcgagttgcgtgaatctcttagacttgctgttgcggaagttcttttacctgctttcagatcgtttcttaaacgttttgggtaagatcaaaaacacttttaaacagattttgtttcgcgcttgtcaagaaagagttaaaagttttgtttctttggttgtgttgtgtatcaggccgatgatagagagtggtaagaacccccagaagtatataaggtttagtcctgaagatcttgagagaatgcttaacgagttctttgaaggcaagacatggagtgagccaaagagataaatatgtattcatctttgtttttccattttgttgtacattctcttcttctttgtttttgcaacattactctttaatatttataagttcttttgtatttctccttttcttgaaggttttttttttctcctttcagttttatttttcttctaactgtaaagttgatgaagctgtcatgttttttctaagctgtaaaagtaaattggctaatatccatatatactatttcaatgatgattcagcgttttgcattttatcattgtatatatcatatatatatatatatatatatatatatgtaagtttaagtctacacgtatacatgttatgcatgcagtagagaatgttaaatcttctttagagtataatctcgttcaagttgtataacatgctaagtcaaattacttttaatataatgttttctgtttataaacagtagacgtcgcatatgatttgtgtcaacaaaaaattatagtctggaaagtggaaacttaagaagaattcaaacgagaaaaaggtcatcaaggacttaagaagaattcaaacgagaaaaggtcatcaaggacattagacatgatttaacataatgccaattagctttatatatgttctagagttgacatattctgtaaaacaaaattgcaaacatgtagtagtgtttatatatatatatatatatatatatatatatatatatatatatatatatcattattcattaattaatgagttcgttattcgtacatgttgtaactaaatctatacatagttaggttcctaaatgagtttctattcgttgtagaaagtgtgactactattcttttagattatagttttgttcaaatggcattaaagaaataataacatgctaagtcaatgtcgtgtaaatagtgtcaaatgaggaaaaagtaatgatgactttgatgaacgttatataaccaaactagtccttaccagatcacacatatcacaaa

SEQ ID NO: 1943 - DNA, 3000 bp, Unknown
  misc_feature (1)..( 3000): cDNA_ID_3065266_gDNA_ID_1620471_Annot_ID_158005 3000 nt of promoter + ATG
aagctttcctttagatatgctgagtaacttaagtttatcttctgataaattctctgattcatccttcacaagagttaaatagctcttcacaaattccccaacaagagcctgaatattttctgaagggcgcacactgtgaagtatcatttcctctgtcttcgggtttgggtgcataccaccagatctacatgaagccttcgagtcaatagacatacatttatggttggtagtcttagcagcttcgactctagactcgagattatcttcaatcacagccttcttcggatccatgaaaaaggttaagtcatcaaaagcagacattgatttgaacaacagcgtagccttcttagcattatcatccactgcacaatcccttgctcctgttttttggaaagggttttccaataacccatgcgaagtattaacaggagcatgctcatcaaggttagatataccatagaaaggttcagtgcatttctctacaagtggctcgcagaaagcatcttcagagaaaatgaaatcataaacccatttgtctccttctgaagcttcccagttataatcaatgttgaatgtaactatttcttcaaacggataatcacaatggttgtggtttctttcctcaagaaggttccacggcaagtatatgtcatttgaggcagacaaggattgaggcttgatctttgacaaaacatcctcataaatgagctccagagatcttgtcatctcataatcatgtaaaataggagtaggcaaagacttgaaggcatcatctgtgaaggcaagttcggaactgacaactaattcatcgaaatccttgaagttcatctctttactgaacataccgtaacagatttctggttcaatggctttttgaagacaaaggaagatatcaaaaacatcagagatatccacatccaggatctggaattcctcataagttactggtacagccacctttccctgaaattcctcagcatttgatatttccaggatagtcactatatccatttcagaaaattcatcctctggtaccacatcagattggccactcttgttcaaatagcaatccgtagagagtacatccaatagatcataatcctttgagcctataagctccttagaattgataatgagagaactccctgcattagtgtcttggggttcaatcgtctcaagaacagtaaatactttatcaagcacagataagcttgatagttcgctcaagtttacttcatccacttctagaaggggaaatctggcatctttgaaccatggttgaatcttgcggaagcattcattttctgctacagaagtgttgttctctgtaaagtaatcagaaggaatgtaatcaacagaataaatctgctcttgaatgtcctttgagttctgcaggataatatctgacccctcatatttaacctgcaataagaagactagctaaaatcagatgatgccaagaacaggaaccagctctaccactctacagcaaaagcaaaaactactgttgtgtgtgccaactaaaatcaactcagggatttaccgggtcatttttgatctctagaacttcagagaaacattggagatgatcctcactcgtgcataagagcttgttctcctgtatatcaaaagatgctttatctcgcaatgaaaaagaaaaagctgaactagttcaattagtacaatgcttacacagcttgagcaataccatctcaaaatccaactctggagtctccaactcaataattttaggtgtagctttatccgcaatggcatctccgtcatccttctgcaaatagatcataacttcggttttcaaactccggtaagattcgcttaagctaccaaaatttccaacccaagtatgaatataagatctaagcaacaatcagaaatggaaactgagaaaacacaccacaaatttcgaaaaatctacaaccaatctcactataagaaacaaaggaccgttgacagaaacagtcagcgagactcaggaaattcgaaatttcacctccaggaactgataatatctagatcgaaggaactttacctcgtctgagtaataaactccgagcgaagagtcgtcgatttcaaaaactcgatagtccacactgacgcggtcgggaaccacgtcggaaaggaacttcgacaaagcagcttcaataggcaaatttccgatagggatactaacattttcgatcgagccaaatcggagacggtcttcttctccgttgtagacgatgggtgccgggaaattatcaggagccggaagattgaggaagcctagggtttcaaatacgtgagaaggtggagtagagaagtaatcgatgttgagaaatcgagttcgcatcgtaattttctagatccgtcttgggagctcagactgtatcagtgatgatgatgatgatgaagaagagaacgaattttgaaattggcggttttgaatttttaagaaattaaaaaatatcccccgtcgatttcaagagggagatggagataccaaagcaactctcgccacttgtcgtcttttaattttaattgagtacgttatgccgttttaaatgttcaaaacagcacacagttgatagctgaattgattttttcttttgccgttttgttatatttaaacaacacacagtgcatttgccaaataactacatgatgggccaataaacgtggaccgactaaaactaaataatagaagatacatcgataggcttctctaaagatcggataaaagataatgtcgcatagccacgtagagagcaactggctgagacgtggcaggacgaaacggacgcatcgtacgtgtcagaatcctacagaagtaaagagacagaagccagagagaggtggttcggccatatgtcatcgttctctctataaactttatggaactttgttctgattttctcagagacacgaaaagaaagaaaacaacactagaacaaagagggtttgattgattcacttgaaaaagagaaaacacagctttggaaa

SEQ ID NO: 1944 - DNA, 3000 bp, Unknown
  misc_feature (1)..( 3000): cDNA_ID_1712019_gDNA_ID_1620472_Annot_ID_158034 3000 nt of promoter + ATG
aaaacaggaaacatctaatcaatcaaagtagtttcacattttattccacagaaattacgacaaaaaagtagagagtgaagagtcttacggctaatattgctctcccagatgcagaaaagcgctcaccagcgatatcaatctcgactgtagtttcagcagcaactgctggctgggaaacacatgctaggtaatggcggacaactagctcatatacattctgaaatagtggaaaagaatgttggctccaacgtagaaacatatacctatgctcgggtatgttaaaccaaactgacagccatacttacaaggtgatctctgctccagttagactctccgctagaaaactttgttgggtgaatgggtgggtgagccttgtcatcatgaccaccattagcagggtttctccagaggcccccctcaggttctaataatctttgtgcatatgatccccatgcaggatgtcttgtttgttcctccaccatagcctacacacaactagagatcctaagagactatcaaaggaaatgataaagtccaaactaaccttactggctcatgagaaaaaagttacttacacgtaaatctgtcctgctcgaaaaagaatcggtctccgtacgaggatagctgatgaaaccagcctgatataattcttctgccacctgtccagacatttttgatgtcatttaacaaaagagagatgtaattgtaattcaaagacatatcagcctatacgacagcataaaactctaccaagagagaacagaatttagattatgttgaacatgcaatcctaataggccaaagaatcatagaaagtatcttaaccaatctaaatactcattcagaccttcatggtgtgctctgaactcagacggaaatatcttgaagcacgtttttcaagttcaatcgtgttcaaaggataaggaggatacttgaatcgttcccttggatgtgggacattcattacctggatggagattataaagtaaatacacaatgttaactagagatggagtgtcagatgatataattccgtctgataagatgtttcttttttactcacagtggcagtaggttcctcaacgcacatctcatataatatgacagctgaagcataatcgaagagatgaccacgcctgcaatagaaattatatcaatgtaactttcaagaagattgggaacaacaataaggaaggcagttgaaaatcgtacatccaattaaaggtggcaaggccttcttctgattggtgagaacagttgattgtccaaaactcttctggttcatgtgcctggatctcccagtatcgctcgacaataaagccaagtgtaggaaacttcagttgaagcagagaaatatcaaatctagctacattaactggctctgatatgtaaaatgggacagattgttctgaaacttatcgatactggtttcacattacctgacacggaccataacttataacacgactcctctcctcacccgtagagtcaatagcaaacctatctctcagcagcatagtctgaaatctagtgaaagaagcaccaatgcgtaggtctatttcctaaagttttcgaaaaaaacattagctaatacaaattcggtaggaaatactgctaacacataaacagaagagggatttcaggagaaactcacttgtctagcatctacagcctcagcaaacaattgattaggatctctaagattctgaactgcttcatgaatatccctagcaattacatcattggaatcagttcaatcgtttgaaatagagtgcttagtagaagatatatgaggaataacgtgtaaagcaatctctacctgtcaattaacgcagagaaatgagccctgcgtataaaaagattatgcttgacagctctgcaaacatctacaacttcaaatgcaatgttttcaccttccctatcacaatcaagccacagcacaagccagtcgcttttccttgcctcctcctccaatgtcttcttaatatcctttttgtcctaattcactcaacaccagaattaaataaaacttgcaagtcagaaaaccccaacttcattataaaggcgaatcaaagatcctagtcccgttttatacagttgcaattaccaaaacaaatcagacccaatcaacaattcctagttagagaagcaatgactaaatcaacaacccagaactatacaaaagcatacaagtacaatgggacattaaatcaattaggcgtgcacacacatacaatagaattacctcgggaacgtgtttcatgaccggagcttggtacagatctgccgggtcgcaggagtgccatttgcggtaacgatcggcgaactcaagctccatcaggtggccgatgacggaggtcattagcatacgacacggctgcccattgatggcgtaatcgaactcgaagattttgttgtaccgagacctaccctcccgagtccggaaagttccacgggatagaatccccgccactgacttcgccacggacggcttctccgccacgttcaacactgtcacggggccaccgcctcgtcgcgacatcgccggtaaagaaaaccctaacggttagtaattacgtttttttgttttcagtaggcgaattttcccgctcttatgatatagcctagctactattggtggtgtcactgagacactgaccgaacagttgtggaaatttgtgcctttaatgggcttcaataattcggttaaagttgatctcacaattgaaattgaatcaaaaccggactcggatccggttagcttcttatgatatatgactatatgataagtatgtttaaatcgtatagaatatagatcttgagcttaatgagattaattcaatttctttagaacacttgcaaaataaataaataaaacaaaataatatttttcctttatgcactatagagttagtccgataggataagggcccaagaaggcctcattgataatttacaatcgagagagagagcgataaagtcaactcgttgactaaaatg

SEQ ID NO: 1945 - DNA, 3000 bp, Unknown
  misc_feature (1)..( 3000): cDNA_ID_2148185_gDNA_ID_1620472_Annot_ID_158045 3000 nt of promoter + ATG
aattgtcaactgatatgagtattttcgaattaggatgtgaaaatctgagattttttatttatgaaaaaatatgaaatggggatctagctagacgtgactgaaatcttcgatcttgttatctcttcggtttcaatgtttataggaattgggtttttgttttgtattttagtcagattataacaagtgaaattgatttgctttttttccaggaagtgaggaaatctctgttggtaactgacgtttggaacaaatcagatgatagtcctgttactgttgctgattatggttagtagtaaaattgtgtatcactcagaaaaatgatatctttctctgttatactctttagatttcgatatctttattggctcattaatgaaacaaagtcatgttgttttaggttcgcaggcggtggttagccttgtactggaaagggaactccagaatgaacctgtgtctttagtggctgaagaggtgccaaacatatacaaaataatacattgctggtttttcttgattgaactaagatggattttgtttatgactttgtaatttatgtgtaggattctggtgagttaaggaagattgctgctgagaccgttttggctcgtattacagagcttgtcaaagatactcttgcaagtgatgaatcatatgctattgcttctcctttgacttcggatgatgtgctcaacgctatagatcgtggtaaatcagaaggaggtcctaagggtcgccactggatcttggatcctattggtggcactagagggtgagttctcatatgttgttgatatttcactaagcacaaacttatagttagttacttttggatttgttttgcaacttcatctcgtttcattgttcaacgcctgtgtcagagactaatcaatctcagagtattgttgcattattgaactgtcgtcatagatttgttttgcaacttcatctcgtttcattgttcaacgcctgtgtcagagactaatcaatctcagagtattgttgcattattgaactgtcgtcatagatttgttttgcaacttcatctcgtttcattgttcaatgcctgtgtcagagacttatcaatctcagtagtattgttgcattattgaactgtcgtcatagagcatcggaacttaaatttaactataacctgcgaatttccattttgtagatttataagaggagaacaatatgcaataggattagcattgttggtggaaggcaaagtagtactaggtgtaatggcttgtcctaagcttccattggcatcaactgctggtaatgcactcaagtctttacctgaaaaagttggttgccttttctatggttcggttggcaatgggacttatgtccagtctctcagtgtcgactctcttcctgcgaaggtaaactacttgaaaccactctgtttccatgcatttactatcaaatcttttcatatattgctaaagaaatgatcaaatgcgctattaggtggaggttagcagcatagatgatcctgcgaaagcgagtttcttcgagtcataccacacacctgtccccatccataacaccattgctacggtaaaacatcttcctcacattctctatacgtatcttcttgcttactctaaattttactctgtttccgcggtgacagaaattggggataaaagaatctccaatcaagatcaacagccagactaagtatgcagctttatctagaggagatggagaggtttacttgaggtttactcgcaaagcaagacccgaatcaatatggaatcacgctgctggctcaatcattgtttcaggtaaacccatttagctcttacctacatagcttttggtctattatagttcatgaatgatcacacaacaaatccttgtatgaaactttcagaagcaggagggaaagtgactgatgcagcagggaatccattggacttttcgaaagggaagtatcttgattacaagagaggaatcgtcgttacgacgcagaaactgttgccaaggcttttaacagcagtaagagaatcaattaaagaagaagaagaggaagaagaaaaagctgcttctctaaaacttcactaacacgcaactgtaatatacttattattgttgtctttgggtatactctgttgtctctgtgtttttcacagtctatttattgaaaaccagaaacaaaaaaaaaactcacctttgatatatataagaaacactaattctcttttgaatatagtttttgatgttacgaagctcgtttaaaatgtattttaaatagtttatgtctgtaatctgagatacgttaatcaattttgaaagtttttaggaaggttggtaaaactagggaaaaaaacaaaaaacgtacgtagctagtgcctagtgattgctatggggataattaaactcgacaatagaaaaaagacagtgcctttttctggcatatatgaaacagacaaatgagaaggacctttcttaataagaaagacaaagaaaatttcttaattatgaaatagattactccagtcgaatcttctgcgaagtttcttgtgaaataattaaaacataatgtagtataaagaaagattagtgtattgattaggttaaaataagcccaatttgtttttttttgtttttttttggtaaacattttttttttctaagtatgttaaccatttctgatcagtcactctcgtcaagtcgtcttctaacgaatataattaaattatgacaaccgatgcaaaaaaatccgtgaaatattctacagaataataatccatattctttggtctacatattctatccatcctcttctttttttagcgtcaacttgttgtgtataattacgtgaaagatggtttgcaccaactccgtctcacacgatacactcggttatattatatcattcaacgatgttgactacgtcctgacttagagtacggctataaattgtttcaatatataaaaccattattagatagaataagcttttacatagtctattcttgaagcttttca

SEQ ID NO: 1946 - DNA, 3000 bp, Unknown
  misc_feature (1)..( 3000): cDNA_ID_3065281_gDNA_ID_1620472_Annot_ID_158043 3000 nt of promoter + ATG
tatctccttgtttcggcaggctaagaattacatatgaactacaactcgagatttatgctttacaattcttctgcttggactgtacaatgttctacagaagtataaacatgaagctcaagtgcttaaccatataatttgtctcatctctaagaatttttccgagtcaagtgtacagccttatccttgttgttattggttgtctgcatagtgggcatgttgtgataacaactccgcattccttgcatgtctttatttgaaataaaaagtatcggagatgtcacaaaatcgatctagaagcagtacagttcatagaacaagtaagagtataattgttcctttgaaattttcacataccgtgtgaccgcagctaaaagccatgtcctttggattcgtcaagcaaatcgggcatacctttttgaaaaacaaaaggaatgtaaatctcagtatcagagaaactgagtatactcattgacaaaagaacagaaacaaaggcagaaataatagagtatttaccggcactgtggaaggagcgagtctgtcacttttctctgcagtttctgtcatctgatttggcaccgatctaacagcattgtcacgctctataacctctggtggtggcgggagtggcttgtggtgctgatgggaactgcgcactggttttctactgttcataagcacaatcaaaggttggtttagttggcaaagaatctaatgcaataagaccataaacagtgagtgatacaagtagtttccaacggtaaattttttattgcatttacttgagacttaatgtagccttgtattgaaaagggatctccatgagagctgcgagtgcgaaagcagcctccttcttagccgcatctttgtgctctgacattatcttcgtgaagtttacaaactgtggaacaaaacacagtttttcatgattcatgtttcaggaacaaaacagagctattcagggttttattatattacctggaagttatcgaattcacggtgaggaatattgtcatcgaattgtttcattgtgtcccatggtccatctcctactccaaccaagactatcgacaatgggtaatggctggaaaatttatatcaaacatcattagtatacatatgaagtctgatcatgaatatgagcttattgaatagttttacctcgctgccattatcgagttcatagtagcttcttcctgtggactaagtcgaccaagcggcacatctggatttcttgtgacctgaccatctgcgataatgacgagaacatggtattgcatattgttctgctcaactatgttgatggcagcatcaataaccggtgcaaacgaggtaggacctgtgagggaagaatacactgattaatctttacgataagagagaacaaaactgctccatttttgaaagttcaaaaataccggacaacttcaaatgtgggacaatctctctatatcttttaactgcgttttccaatccgtcgcagcttttgttctcgggataaaagctgaatacatattgatctcgcgttgttactgcaggaagaagaaaacataaaaccattaagaactttggtttatcttattcattcatcttgaaagcaagaaataagaaactaaccatcgccaaaaccgaaacaaggtataagatcatcttcatcaaagggagacaaagtacgaccaataatcgatattgctttctcatatggattctgtcttttaccaatggcatgaaggctttttctattgaatgaatatctccctgcaatgaaaattcagaacattaaccaaaaccattgaatcttttcgtaaacatgtgtagcattttttatcaaatcaaataattacctgtccactcattgctcttggtaaagtcaattcctagaatcagatttgaagattcaagtccagcttctctcagagaagttatcacctaaaaagcaaagttcacaagaaattcatcactatgaaagagactaaaatcaagaaataactaagtaagtttatgagacctgatccaaactgctgaaatgatcagcaatatacgaaggttgctgattacgtttattgctcatgttcattgaaaaaaccctgcagcacaagaaccttcagaaatccaatctttggagaagaaaccaatcaaaatcaagaataaaagatacagttacacaagtggcaagtatatatcaacctggagtttgttgaaaacacaaaagacttctcggaatctttcttgtaagaaaaaacttttgttggagattatcttctgtaggaagattaaattattaaaaagatggcacaaaagagaaatatgaacatataaaaatactttagcagaaaaaaatgaacatataaaactatagaaagtgggttttgttgaatcttgaaagttagtggaacgtgaccctttgcttgcgccggcaaataatcaaaacgtattttgctctctcacacgccatcatcaatctagaaatcttttttagtcttgtctctgcgtcattaatgatttatccataacccaaaatcatagaccaaatttcaacatgattcatgtggacaacgtggcaaagctgtagctcttgtctgaagaaaattatttgggcttttgattccctcaaaatatattaacccagaaccgtttttattgggcttcttcattcatcaagaagcctttttgtatcttcaccacctataaattcacttatgtttcaaccacaacatccacgtgcgattagcccaaaactcaacaaccaatctacgaagatcactaaagttttttatttttatgattttcaccgtttgtacttgttctttcaattggtgccacatggacccctaaaccaacagagcaaatatggcctttcttgatctaaaataaagtttagggtttaagttcagagaataaataagtacactggtgtaaatgggaaattcaaaaaagtaataataattgtctctgcaatcagaaaatgtgaagacatatatttatcttcttgaaaagcgaatg

SEQ ID NO: 1947 - DNA, 3000 bp, Unknown
  misc_feature (1)..( 3000): cDNA_ID_2148196_gDNA_ID_1620472_Annot_ID_158048 3000 nt of promoter + ATG
ccaaaagaataaggacgatcaaggccagtgatacactccctctgagtatatgactttttccaccaaacatcttagagataacatcaactctctcaacaaagaaagctccttgctatgttgttaagttcaagatcctaagaaagaccagtcagatagtgtaacaaaatcttgtcagtcgttgaatcattcaaagacaaaagaaaaaggtttcctctttgttttaacaatcaaaatcccaaattctagcaattgaattttgtatagttttaaggatggtttcttcttcaatccgaattcatccaaatcagaaaacataaccaaatcaggaaatttgattaaacccatggataataaacagaattatatccttaaacccaaaatcaaatatctaactaataaggttctccacaaaatcgagctcgaagatgattgaaatcatttaccggaaacgattgatgatgattggatcttcaacgagcaaggatagtgaagtgtagatctggagagcaagcaaattacgaatccccctccgaatttggatctctcacatgttcgttggtcaataaacaatattcattgtacgagtgactcatcaaattcaacgttgatgtttttttttcttttcttgtgtttggcttcttgaatttttcggcgcaataaagtggtggtaataatttgggtgattcatgttcttttcgctttaactttgttcccataaaaaaaagatactataactgatgcgttaatttctggatggtataattagttaataaataaataaataaaagttctatctcttcttcttttacaataaaacaatctgaatggaaagaatggttcaataccataccaatcaaacaacctgttcaatcttcaaacgaatagttaaaaaattgaaataaaatattattcatcatttaaaaaaaaaaaaatcatcataaacaaattacttatttaaatgcatcaaactaatcattttgttaatatatcacttattcatgtttacattttcaaaacatgatttcactataatttttttatccatattaatatctaatacacgtattcaaaatataacttaaaacatgaaagaagaacaataaccaacaaaatctagtttatatatatatatattatttagcattgaataaaaatctacttaacattacttttattaaaaagtattaactttttgtatattcagataacatatgaatatgtgtgtatttagtagttgacaaatgaaaacgatgtgtgtctttttagtattactatattctccaagacgtgttaagaaaaatagatgaaataagcaaagacgtggacattgggtctgtgtgatttaacaaaactatagagtctcgattgttactaatcgaaaatatttggtctctctaagtaaaataaatgacctttacatcgttggagtgaaattgaagggatctatatccctacatcttatttggtccttcaatattttactttaatcgttttcatgccaaaataataatatctctcatccaaaaaaggaaacaaattgtattgtatctaatcatcgaattaattattaccttcaaaacatcataattaagacgtataaatatggcgaaactgtatcttttagaaacgtcaaaactttaaaaacgcaagacatgtatcattttcacctttcttttgttgttaatttaattttgggacattatggtaatcgacaaagaggtgacaaaaagattagttctatgaataatcaattataaaacaaaatttaagctagagtaattatcaaaacaaaaaaagcaaagaaagagtaaagtttaaaaagtgttatattttattttttttgcttttagctaaaatcatgccgtagtaaccacttctcaacaacttgatttaatttattcatatcatgatgatataaaattccaattagtaaattataaagtcttaagcaattgactaaactagtcttttgtccaactaaaataatctaaaaatgattttaataagattttcgaccactactaaattcacggctactccgtacttctctcattctctctgcttattgatgaagcatctaaaataagcaaaatttattaatatgtcttttgatcactaataaagattttgttgttgtcatgtgtgtgtaaaatcaaaatcgtaaagatcagaatcaatattctcttgccacatatatcctttatatatacacctttctctcccgcatcttcaacatatatccagtgccattgcaattttctcgagaaagtgacggaaaatggctccgcagctgcaaaattgagattcggattctcccttctttcgtcactctcattcattctcgcctgtatcaggtccgccttgtgcacattcctctctattttttccttgtgtgatttttttttttgtttagcgttggatgatctctaggatgtagaacaatggtgattcttccgagatctgttacagatctacagtttttttcatagttattgtgttgatagatttcttgtttttgttcttgaggttttttgttgaacggcgttgtttgttccttgattatcttaacttgaaattctatagtttcgtctgcttgatcctttgtgtttgctctaggatgtgaaattccatgttgtgagtgtaacttttagtagtgattttgaaattttatgtggccgtgacaaagccactcgaagatttcgtttctcggcggtatctgggttatactttaatggcgagggtttaagcagatctgctgacattagccttttgtttcgatctgtgttacaattaccaatttgatctcgttagagaaaatcgagctgatatatgcatgcatagatcttcaagaaatttgatagttttcttaactacacttgccttgctgtgtctttggatatgatgatactgattttattgctcgcctaacatctgtttccttgttactctatccgtgtaggcgtacacgcgttgttatcatctgttgcttatatttgaacc

SEQ ID NO: 1948 - DNA, 3000 bp, Unknown
  misc_feature (1)..( 3000): cDNA_ID_2148192_gDNA_ID_1620472_Annot_ID_158047 3000 nt of promoter + ATG
tcactgtagagcaataatttgatgagggcctcctgttatctatcctagtgtaccttggttgcgccatggttcaaatataagcaacagatgataacaacgcgtgtacgcctacacggatagagtaacaaggaaacagatgttaggcgagcaataaaatcagtatcatcatatccaaagacacagcaaggcaagtgtagttaagaaaactatcaaatttcttgaagatctatgcatgcatatatcagctcgattttctctaacgagatcaaattggtaattgtaacacagatcgaaacaaaaggctaatgtcagcagatctgcttaaaccctcgccattaaagtataacccagataccgccgagaaacgaaatcttcgagtggctttgtcacggccacataaaatttcaaaatcactactaaaagttacactcacaacatggaatttcacatcctagagcaaacacaaaggatcaagcagacgaaactatagaatttcaagttaagataatcaaggaacaaacaacgccgttcaacaaaaaacctcaagaacaaaaacaagaaatctatcaacacaataactatgaaaaaaactgtagatctgtaacagatctcggaagaatcaccattgttctacatcctagagatcatccaacgctaaacaaaaaaaaaaatcacacaaggaaaaaatagagaggaatgtgcacaaggcggacctgatacaggcgagaatgaatgagagtgacgaaagaagggagaatccgaatctcaattttgcagctgcggagccattttccgtcactttctcgagaaaattgcaatggcactggatatatgttgaagatgcgggagagaaaggtgtatatataaaggatatatgtggcaagagaatattgattctgatctttacgattttgattttacacacacatgacaacaacaaaatctttattagtgatcaaaagacatattaataaattttgcttattttagatgcttcatcaataagcagagagaatgagagaagtacggagtagccgtgaatttagtagtggtcgaaaatcttattaaaatcatttttagattattttagttggacaaaagactagtttagtcaattgcttaagactttataatttactaattggaattttatatcatcatgatatgaataaattaaatcaagttgttgagaagtggttactacggcatgattttagctaaaagcaaaaaaaataaaatataacactttttaaactttactctttctttgctttttttgttttgataattactctagcttaaattttgttttataattgattattcatagaactaatctttttgtcacctctttgtcgattaccataatgtcccaaaattaaattaacaacaaaagaaaggtgaaaatgatacatgtcttgcgtttttaaagttttgacgtttctaaaagatacagtttcgccatatttatacgtcttaattatgatgttttgaaggtaataattaattcgatgattagatacaatacaatttgtttccttttttggatgagagatattattattttggcatgaaaacgattaaagtaaaatattgaaggaccaaataagatgtagggatatagatcccttcaatttcactccaacgatgtaaaggtcatttattttacttagagagaccaaatattttcgattagtaacaatcgagactctatagttttgttaaatcacacagacccaatgtccacgtctttgcttatttcatctatttttcttaacacgtcttggagaatatagtaatactaaaaagacacacatcgttttcatttgtcaactactaaatacacacatattcatatgttatctgaatatacaaaaagttaatactttttaataaaagtaatgttaagtagatttttattcaatgctaaataatatatatatatataaactagattttgttggttattgttcttctttcatgttttaagttatattttgaatacgtgtattagatattaatatggataaaaaaattatagtgaaatcatgttttgaaaatgtaaacatgaataagtgatatattaacaaaatgattagtttgatgcatttaaataagtaatttgtttatgatgatttttttttttttaaatgatgaataatattttatttcaattttttaactattcgtttgaagattgaacaggttgtttgattggtatggtattgaaccattctttccattcagattgttttattgtaaaagaagaagagatagaacttttatttatttatttattaactaattataccatccagaaattaacgcatcagttatagtatcttttttttatgggaacaaagttaaagcgaaaagaacatgaatcacccaaattattaccaccactttattgcgccgaaaaattcaagaagccaaacacaagaaaagaaaaaaaaacatcaacgttgaatttgatgagtcactcgtacaatgaatattgtttattgaccaacgaacatgtgagagatccaaattcggagggggattcgtaatttgcttgctctccagatctacacttcactatccttgctcgttgaagatccaatcatcatcaatcgtttccggtaaatgatttcaatcatcttcgagctcgattttgtggagaaccttattagttagatatttgattttgggtttaaggatataattctgtttattatccatgggtttaatcaaatttcctgatttggttatgttttctgatttggatgaattcggattgaagaagaaaccatccttaaaactatacaaaattcaattgctagaatttgggattttgattgttaaaacaaagaggaaacctttttcttttgtctttgaatgattcaacgactgacaagattttgttacactatctgactggtctttcttaggatcttgaacttaacaacatagcaaggagctttctttgttgagagagttgatgttatctctaagatg

SEQ ID NO: 1949 - DNA, 3000 bp, Unknown
  misc_feature (1)..( 3000): cDNA_ID_2148188_gDNA_ID_1620472_Annot_ID_158046 3000 nt of promoter + ATG
tatgttatctgaatatacaaaaagttaatactttttaataaaagtaatgttaagtagatttttattcaatgctaaataatatatatatatataaactagattttgttggttattgttcttctttcatgttttaagttatattttgaatacgtgtattagatattaatatggataaaaaaattatagtgaaatcatgttttgaaaatgtaaacatgaataagtgatatattaacaaaatgattagtttgatgcatttaaataagtaatttgtttatgatgatttttttttttttaaatgatgaataatattttatttcaattttttaactattcgtttgaagattgaacaggttgtttgattggtatggtattgaaccattctttccattcagattgttttattgtaaaagaagaagagatagaacttttatttatttatttattaactaattataccatccagaaattaacgcatcagttatagtatcttttttttatgggaacaaagttaaagcgaaaagaacatgaatcacccaaattattaccaccactttattgcgccgaaaaattcaagaagccaaacacaagaaaagaaaaaaaaacatcaacgttgaatttgatgagtcactcgtacaatgaatattgtttattgaccaacgaacatgtgagagatccaaattcggagggggattcgtaatttgcttgctctccagatctacacttcactatccttgctcgttgaagatccaatcatcatcaatcgtttccggtaaatgatttcaatcatcttcgagctcgattttgtggagaaccttattagttagatatttgattttgggtttaaggatataattctgtttattatccatgggtttaatcaaatttcctgatttggttatgttttctgatttggatgaattcggattgaagaagaaaccatccttaaaactatacaaaattcaattgctagaatttgggattttgattgttaaaacaaagaggaaacctttttcttttgtctttgaatgattcaacgactgacaagattttgttacactatctgactggtctttcttaggatcttgaacttaacaacatagcaaggagctttctttgttgagagagttgatgttatctctaagatgtttggtggaaaaagtcatatactcagagggagtgtatcactggccttgatcgtccttattcttttggtcattatactcctggtttctgaggaaaacccgcttcgtgattctctctttgaagtaaaacgtcagttttcatcttcttcttcttcttcttcttcaggtatttatatgcgcttcacagcttttagtattcatttttttggttataatggtcgaaacttttgaactcttgttatcttcagaatttcattgtctgtttttctgatacattttggtttcctattattcagtttgtaactttgcaaagggaaaatgggttgaagaccggaagagaccattgtattctggttttgaatgtaaacaatggttatcatccatgtggtcatgtagaataatgggcagacccgatttctcatttgagggttaccgttggcagccagaaggttgcaacatgccacagtttgacagattcactttcttgacaaggtatgtaagtttttctccaatgacacattcttcttatacatggtccttctctgtatattggattttatgagaatatgtggtagcagagcaagtttctgaaaatatctcaaatttgcttactgccactttgcttttgttttttagaatgcagaacaagacgatagcatttataggagactcattggggcggcaacagtttcaatccctaatgtgtatggccagtggtggtgaagatagcccagaggttcaaaacgtgggatgggagtacggtttggtgaaagccaaaggagctctccgtcctgatggttgggcttatcggttcccaaccacaaacacgacgatcttgtattattggtcagctagcttatcagatttggtacccatgaacaatacagatccacctagtcttactgcaatgcatctagatcgtccaccagcattcatgagaaactaccttcaccgtttcgatgtattggttctaaacactggtcaccattggaacagaggtaagattgaaggaaaccattgggtgatgcatgtaaatggaacacaggtcgaaggcgaatatctcaaagatatcagaaacgccaaggattttacaatacacagcgttgcgaagtggctcgatgcacagcttccattgcatccgcggttgaaagctttctttaggacaatttctccgaggcattttaaaaacggagattggaatacaggtggaaactgtaacaacacggttcctttgtctagaggcagcgaaatcacaggggatgatggatcgatcgatgcaacagttgagagtgctgtgaacgggacaaggatcaagattcttgacataactgcactttctgagctaagagacgaagctcatatctcagggtctaaactcaaaccccgaaaaccgaagaaggcaagtaacgtgacctcaactccaacgatcaacgattgcttgcattggtgcttaccagggatcccagatacttggaatgaacttttcattgctcagatttgaagtattcaacatcatcacacacacaaagctagctcaatggattggctctgttgattctttgttatagaaaggtttttttttcagattctttcttgggagaataacaaagtttcagttcttaaaaataggttttagatggtttgtcagtaaatgattcatctgtaacaatcacaatctggtttttaattatacacgagaacattgaaattgaaacaatctttttcttaaccgaaatctggtacgatatcgggacggttaaaaattgataaatggaattggcttttaaagaccggtttacgggagaagaagacttttgtgtcaaaaactcgcgaatgcttgagcttttttcttgacatg

SEQ ID NO: 1950 - DNA, 3000 bp, Unknown
  misc_feature (1)..( 3000): cDNA_ID_2148150_gDNA_ID_1620472_Annot_ID_158036 3000 nt of promoter + ATG
aaattggaattccaccaggctttgatgttaatcacttaggtaaaaaaaattgcagccaatttgttttcttgtttaccaggctttgatttttttaccaggctttgattttaatgtcatcacagccaccgtgccaatttcatcgtgacttcttctaatatgtcctatggtaatgttgtgatcaggttgcgtgggtggctgtgatgacattcttaaacagttgatagacatctgtggaactggatcccgttctcaaggttagtgctttgttgttacgcaatacatatacctttgtattagacatcatacaatctttctttcatcatcttctgtcctaaatgagaatgcaagaactttagtatagtgtcttgcgaatagagaacatttaggctaaaaagaatcaatgatttgttcttgcagcaaggagaactccaggtactgcaccgtcaaacaatatccaaggaagcaacacaagacagagtaatgtctgcatacattgtcagcaacgaggacatgcttccacgaattgtccctcacgggttccagcatctcgaaattctcgtcctactgcaacaaatccgagaaacggtactgatccttgtataatagtttagcaaacaaagatcatcgattagcttttgctagtatgtactatatactagtcaaaattcaagcaaattgtccagaccaagtcttccttattgacatgtaatttatattctagtattgttggttataatgcagatgaaagtacagtatcatgtaacacttgtggatcacaatgtgttcttcgtacagccaacacagaagctaacaggggaagacaattcttctcatgtccaacacaaggctgcagtttctttgcgtaagagtctggttttaccccaatttcttcgcataatccatttttttttccttttacatcactcaacacatcagttttttgtttgcactgcttgtaaacagatgggaagatagcataaacaacagtagtgggaatgcaacaacagggtctaatagcggcgggagcggtagacgtggcagccgtggtcgtggccgtggaggtagaggcggccaaagcagtggaggacgacgcggctctggaacaagctttgtctctgcaactggagagccagtgagtggtataaggtgcttctcatgtggcgatccttcacattttgctaacgcttgtcctaatcgtaataactctaacggtaactatttctaagtctacttactacgaactttgactatgtatgtagcatgattaattagtgctactaacttaatttgggtttttgtattttattttattttattttatgaccactttttctctggaattcatcctaatttgcgtagatcactgttagctggatattttaaatataatatttcacgtgctattctgaatcactgaatagtttccacctattttatttataaatcttgaatagtcgtttttaatttttagttatgttcttagtgagctaatgtggatccatatttcatcattttttttgtattgtctcataattcataattcatacatcaactatatcactatgtatatgccattgatcttgagtctagacatggtcaagtaatagatattaacaaaatgcttaagctacaaagtttagtcctccgaatttgtttttagagatggtcaagtaatagatattaacaactgttaataacacaaaccacagtcgttttgctctgtaagaaaacgacacaacaaccggaataaacgccgttttgttgtttaaaaacggcacaccaattttcagtccattttgaacataaaagatttaaaattctcaaatcgaaattgagataacagaggatccggcgagcttctccggcgtaggattcgggtcattttcttcggcaactatgaaagggaaaaaaagagagagagaggtgattactgattaggccgtctcctgtggaacaagaacgcgtttcttcttacattcctcatcgaaggagttgttgtagccacttgaggtacttttcatactaatcttggaatttgtatagcttggttcggtatattgaacagtcaattaggtatcttgctgtgaatgatcaagtgggtacttatcattgcctcttcttagtagtctcattacaagactgaagtttggtctcaaaattgacaagcttctcgaagcatttgtccttggactataacttatagtcgagcttgttgtcccttctccagttgttatcttggttgtcgtctgtatatagaagattaaaacaactgttttgcttggagtataattgatactttacaatagaataataatgcacgaaattgaggtcgtgagagaatgaggaaagccaagttctcatgccatgtcggccatctctatcttgttgatttgagtacttagagtctattatagcttcaaagttacaaaaaggaccatcatttttaagccttgtagttctcactttgactaattcatggcttactttatttgttgcttcaaagacaaaacgaatattgagtttcttttttacttgaaataaacaaaagcaaagctgataggcttctgaaactaatattaaaagacaggccagtactaatagaagacttttttaatgaacaaatttcaaacttcaaagctttcaatgatcaaaaaactaatcatagcttgaccatttcctttttatattgttttcctggaaagaagaaaaaaaggtctgcacctcttctattctctctttttcctttcctgaaaccagtttcaaaggttgttttcttgcctagaattttcatagctatgtgtcttggatccagatccatagtttagtagggcctgtattcttctttcaaatatgcttgttatgctacatgatttgagtttttttggatggttttatggtatgtagtctttaagagatgtacaaagtgaggtttttgcagacatgattacatcttgtttgatgtcttctaatgaagatttaagggcttctgtgtatgcatga

SEQ ID NO: 1951 - DNA, 3000 bp, Unknown
  misc_feature (1)..( 3000): cDNA_ID_2148166_gDNA_ID_1620472_Annot_ID_158040 3000 nt of promoter + ATG
ttgcagtagcaacataaagtttactaaatctttcactgagtcctccaggatttaacaactgtaatagaacttacttttgcaagcaaggtgccaaaaaacagatgaagaagaagtaatgcatatataataatgaagaggcaaaaacaataccctccaagctagtaagacctctctttctgtttcaaaagacatgacatctacgcctacgattggagcacatgacttaagagtcatgacattgcgtacaaatgggtgatcctctccctgaagagtaacaaggttcgctatctagaaaagcaatgagaatgttgtttcaagaagaatgcaaacaaaggtaacaaaaaggtatatcaaaaaatgacaaaaacagctaacctggattacaggatcatgcttagcttccggaaaatgtcctttacgacctgcacactcaatatcgaaacttagtacacggaatggagccatttttgagtattcaccttctgcagcatgactgattagatctgagtacctaaaacccatgttaaagaaagcactggcataaaatacaatatgttactataagcatattattgttccagaaaagaaattccgatgaggatacaggcaatggaactccaattggcagtatgacaaagttcttgcatttttcttatacttcccagtaggtacttcaatccaatttcctccgacaatatcacaatcaaccatgaaacggagaacgaaaagaatattgctttcatatgtctggaagctcttcatacccaatccatcaatttgtaggcctctatcaaggatgcctaccaatttaataattacaatgactttaaatcagtaaaggataagagatagtagacacatagcgcacaaatatttgggaagtcataccgcgacagcttgccaccatagtcggcaatgcaactgtaatcttcagaaaagtttgggatttttgctgttggtaatacataatgcttcttttctgcaccatttctatacgtttaacaaatttcgggaccttggcatttttattggattccctcatccttccctgaatgaatcagctgagctttaaaacaaaaccagcgagatcaaagtacaaaatatacagagatctacatagtaaatacctcaagactctgatggaaattagaaatatcgtctggccccattccaggagggcaagcaatgtaaaagtatggctcaaatccatgaacaaagcaacacacactgttacctgacaatataccagaaactcaaatccaacgaaatcgttccccacaaagagcaaaagaaaaagaggtttaaaaacactcaccttctctggtaaccccaaacatcctaatgattggagcttgccctgaggaacccggtaacagctccttatgactctccgcgattatagagtcaatctccaattgttggaaaactaaacaaatcaaaatacacaaatccaagtgttgagaaattttccagcaatcataagatgaagaagcccttatcaaactaagatagtactcaactgatactctgtgaattcgagagatacgcgggggagagcggaggtcgagcccaagccgaggaacgcgattcacgctcctcaatgtcacggaggattagggattcctcatcttcgtcgccgtacaagagagtttcgtccagaaacacgtcctcttccatcataaattcatcatctagggttccgatggccggagatggtgttgaatcaccagtggctcgatgcttacccgccggtggtggggtattcgaaggaggcggtcgctttttggaaataccggatctattcatggctttgggtgagcgggaaaagaagagaatgtgtgtgattttgtgagctcgtggaggtctgagagaagtagaaagtgagactatacaccactccgattcccgccagttttaagggttttgctattagagatttgatgtcaatgtgaagttttttaaggaacttttctttaagtccctagacaatgctattattaaccaaatcgttacggactttttcttattgtggttgcaattattttgaattaaaatatattttgtcggatgaccaatgtttaagacttttaagtgcttatacgaagttttgattgctaaaaaaaacgaataattgtagatcaaaagagacaaccttataatagagttcgatcgtgatacacatagaatcgttcattgttcatttgatctacaattataagagaattcgacctctctttaattattttatttttagtatatcaggattcatgaccaagacaattaggcaagtgatggtacacttggtagctaactagctaaggttgatgccgcatttcataatggaacttggtttatgttggaagcagaactcgaacatgtcgagcatcttcaaatcaatagagtctccaaactcttgcagcaaattttgttgtactgtatatggaaggagccaagtatttaccaaggtagtaagtaatgaaccctccacgtccacgagctcacaatttcacacattctcttccttttcccgatcatccaaagccatgaatagagccggaaattccaaaaagcgaccgcctccatcaaaccgtcattttttggttccatcatgagatattgaacaaattattacttgtattatctgaaatgacttgtaatatctgaaatgacttgtaaaaaaagtgtaccacatcggatgttcttgttactaaacaattcagaccaacgcaaaaaatattatactattatatctgaccaaaaaggaaataaaatcatattttgttgtattgtaggttaaatgtgagagagagagagagagagagagcgcacaagagccatttgtctcggaactgagaaatcttcaaaattcaaaaaagccaaggaaggcgggattccaaacattctcttcatcatcttcttcttcttctcactcttctctccatttatcacaatcgatcatcgggaaacacaaactcatctccagaaaacggtgtagcaatg

SEQ ID NO: 1952 - DNA, 3000 bp, Unknown
  misc_feature (1)..( 3000): cDNA_ID_3065284_gDNA_ID_1620472_Annot_ID_158041 3000 nt of promoter + ATG
caaattaaagaaagtcgctcttactccctagtcatttgtgaaagtcccacggtagctaattctttcatccagtgaggcagcaaggtttttggggccactaccagagcacgcttgatcaatttggagtggaataaaccagcaagaaaactacaaatctgcaatgcgaatcaaccaaaatcaaagatacattattgataacgaaaagaaaagtgcaggttgcagatttccgtacctgcatagttttacctaaacccatatcatctccaagtattccacctttcccttgggtatgcaatgaccaaagccaattcaacccttccctctgatgtggatataacattgttgcaatctttccaggcaatgtgtaagacaaattgaggccagttaaagtgatagacccttcatcttccaacgatctctcatcataaccatgtcttttggcgttataagaccgagctggcttattaattttcatttcagccgcctttttcccggacaaaatgagacagtcatcatcatcatcatcctcgtctaagtctcttagcttggcagcattagaccttccgactgttcttatcttctcacttacctctatgtgcctggtcgtcttcatactttggtcgacttccttgcattggctcttcccacggtcaagattgtatccctgcctattatcttcagagttatcgtcaaagtgccgaccagaatatgagttttgctttccaacattcgaaattctttcttcccattcccttgaaaattccttactagtttgctcttcccggatggcaaaaccagatttgccttgcttgtccttgatactattaacgccagcattatatgtggtaaccacatctggtgaggacttagatagatccgatagcaaggaaaatgaggatttggcatcctcaaaatcaaatttatcaacctggctcttcactccacatgcatcaaaatcattgctttggctatccttcttcttctgaatcgacattgtcccaagcttagaggtcaaatcatccaaaatacccatgatctcgttccttcctccatcaccttgcatttcctctttttgcttcaactgaggtgagggcgaacaaaagtctgtgattatcgaaaagttaggctcgccagccagctcagtgttagcttcctttgattcatcccaagatgtgaatttgttcccaattccagcgctgtctagtgatgtctctcctttaactgattagagcatcatgcaaaaacaaacgtattcaagtaaagttatctgacaaaacgcagtataataacagctataaagaccgaaaatcaaacaccagactagaaactcagatttcgaagaaaccctaatttcaaagtaagctactaggacaaaattgaaatacatcatcaacggaaacaccaatttctttctgtaaactaagagacatgggtttgcgaaaaccctaaaatcgggtgaaatctcaaaattacctggggaatagaaatcaaccaaatcaggatcgtcatatccatcagcttcgtcttcctttggcaaggccttgcaaagacgacgtcgtccagcaagcttaatcatggacttcttcgtctcttcatcttctccatctgaagtccccaaatataataaataaaactcaaaatcaaagacagatacgaatccgaaaccatagagaaacgatagaagagaacaatcgtacgagaagaagagggaggctgtctaggaggcgcagaaagatcctggaggatactgtagtgacgatcgttcaagctccgaggttttcttctatggctggccgtattttccgccattgctacaccgttttctggagatgagtttgtgtttcccgatgatcgattgtgataaatggagagaagagtgagaagaagaagaagatgatgaagagaatgtttggaatcccgccttccttggcttttttgaattttgaagatttctcagttccgagacaaatggctcttgtgcgctctctctctctctctctctctcacatttaacctacaatacaacaaaatatgattttatttcctttttggtcagatataatagtataatattttttgcgttggtctgaattgtttagtaacaagaacatccgatgtggtacactttttttacaagtcatttcagatattacaagtcatttcagataatacaagtaataatttgttcaatatctcatgatggaaccaaaaaatgacggtttgatggaggcggtcgctttttggaatttccggctctattcatggctttggatgatcgggaaaaggaagagaatgtgtgaaattgtgagctcgtggacgtggagggttcattacttactaccttggtaaatacttggctccttccatatacagtacaacaaaatttgctgcaagagtttggagactctattgatttgaagatgctcgacatgttcgagttctgcttccaacataaaccaagttccattatgaaatgcggcatcaaccttagctagttagctaccaagtgtaccatcacttgcctaattgtcttggtcatgaatcctgatatactaaaaataaaataattaaagagaggtcgaattctcttataattgtagatcaaatgaacaatgaacgattctatgtgtatcacgatcgaactctattataaggttgtctcttttgatctacaattattcgttttttttagcaatcaaaacttcgtataagcacttaaaagtcttaaacattggtcatccgacaaaatatattttaattcaaaataattgcaaccacaataagaaaaagtccgtaacgatttggttaataatagcattgtctagggacttaaagaaaagttccttaaaaaacttcacattgacatcaaatctctaatagcaaaacccttaaaactggcgggaatcggagtggtgtatagtctcactttctacttctctcagacctccacgagctcacaaaatcacacacattctcttcttttcccgctcacccaaagcc

SEQ ID NO: 1953 - DNA, 3000 bp, Unknown
  misc_feature (1)..( 3000): cDNA_ID_2148174_gDNA_ID_1620472_Annot_ID_158042 3000 nt of promoter + ATG
atttctttttcgaaaatggaagaaattctcactggtgaaattcggtgaaagaaaatgaaacaacagttacagagaaacaaagaacgtacgagagaaaaaaacaaatcagagagctgaagctttctcttgctcagctatggagtcacgaactgctttcaaaagcagaggcattagcttctcgttagcaacgataatgcctgtgtccaaatcaagatacttccctttcgagaaatccagtggctttcctgctgcatctgtcactattccacccgcctctgcaccaaaaagaagaatcaaccttgcattccttatctatttacatccgcatgtcgacactataaaattagcttcatagagagtaagctttaatgttacctgtaacaactatagcaccagcgacatggtcccaaatcttttcgcggtatcctttatgaggaaaccgtaagtatatagctccatctcctcttgataaagctccatactttgcttggctatcaatacggactggtggagctttgacaccgagtttctgtatattacaacatagaacatgatcaaatggatgaggaaaattagttagctattagctggaatcacatggaaggaaagaagcaatttacattggcaatggagctggataagtcatgtagagagtgagctccttcgaatgactcgaagaacgatgcctcttcaggattctcaacactagagacttgcacttttacaggagaagattttgaatctaggagctgcatatatgtccctgaaccaattgtagcaaagaagaggcatccaatttcgtctgacgaagatttgttcttgttgtttcctgctatggatgctaacggcaagtttggacaagcaagcacacctaaaactactttcccttcctcgagcaatcctagtgctactgcgtattgatctcccctcagaaatctaaaatcatgaaaatgctcagtgtcaggaacataacatctgactcaacattctatcaaatttacattttctctgaaataagaagatttgactttaggctagttagttttaaaacgtaccctttagtgccatcaattggatccaagacccagtgtcgaccatttggaccaccttcagatgttccacagtcaatggctctaagtagatcatcagtagacaaagtagagccattaaacgattcctcggtagccaaagtgtcgttcacgagttttgtgatgcgctccagagtatcctgagaaccatccttgcgtagatcgcctgagtcctatatagatcattttagacaatgtgagtccataaacacaaactcaaagataagtaaagtgtgagacatctaacaaggatttattaagcagtttcacctcttcagccaccaatgaaaagggttcagaactgagctctttttctaagactaaactaacaactgcttgtgaacctgaaattcaacacaagacagatcaaattaagtgatttcctaacaatctcagtaacattcaaagagaagagctttttctaatcagggacaggtataacaaactaaccataatcagcaacggtcactggacttttatcagattttgattgcacatctgattgcaacaaagccttttgaactttctgaaacaaacccaaaacacaaagataagattttgatcaaagatttacacgagcttcgtatgtagaggaccattacactatatcactagaatctattcccaattacagatgcaatgcacaataaacacaaaatgttaaacgaaatttggaagatttacaaaatgggtttcttaaagaatcaaactttagaatctatgggtcatgattgaatcgaaaaaaccctaacctgacagagacgagcagcgagtgaagcagctttcttagcagcatcaagctctttctcgtaagccatcgatgaaacaactctgagagtaacaaatgaaggagaagaagacttgcgtccgaatacagaaacgagacggttcgatgaatttctaggtctcgaattcgttcttactgctacaaatgattgaagcggagccttcgctgttcgaaaacaatttatagacatcattcgcttttcaagaagataaatatatgtcttcacattttctgattgcagagacaattattattacttttttgaatttcccatttacaccagtgtacttatttattctctgaacttaaaccctaaactttattttagatcaagaaaggccatatttgctctgttggtttaggggtccatgtggcaccaattgaaagaacaagtacaaacggtgaaaatcataaaaataaaaaactttagtgatcttcgtagattggttgttgagttttgggctaatcgcacgtggatgttgtggttgaaacataagtgaatttataggtggtgaagatacaaaaaggcttcttgatgaatgaagaagcccaataaaaacggttctgggttaatatattttgagggaatcaaaagcccaaataattttcttcagacaagagctacagctttgccacgttgtccacatgaatcatgttgaaatttggtctatgattttgggttatggataaatcattaatgacgcagagacaagactaaaaaagatttctagattgatgatggcgtgtgagagagcaaaatacgttttgattatttgccggcgcaagcaaagggtcacgttccactaactttcaagattcaacaaaacccactttctatagttttatatgttcatttttttctgctaaagtatttttatatgttcatatttctcttttgtgccatctttttaataatttaatcttcctacagaagataatctccaacaaaagttttttcttacaagaaagattccgagaagtcttttgtgttttcaacaaactccaggttgatatatacttgccacttgtgtaactgtatcttttattcttgattttgattggtttcttctccaaagattggatttctgaaggttcttgtgctgcagggttttttcaatgaacatg

SEQ ID NO: 1954 - DNA, 3000 bp, Unknown
  misc_feature (1)..( 3000): cDNA_ID_2148158_gDNA_ID_1620472_Annot_ID_158038 3000 nt of promoter + ATG
ctctcatgctgattgctctcattgtctacctcatgagacgcccagtgagaacagtcgcttcttctgctcaagatggccaaccatcggaaatgtctttggacatatacttccctccaaaggaaggattcacgttccaagatttagttgcagccactgataatttcgacgagagctttgtagttgggagaggagcttgtggaaccgtctacaaagcggttcttccagccgggtacactctagctgtcaagaagctggcatcaaaccatgaaggcggcaacaacaacaatgtggataatagctttagagcagagattctaactcttgggaatatcaggcaccgtaacatcgtcaagctacatggattctgcaatcaccaaggatcaaatctgcttctgtatgagtacatgcccaagggaagccttggagaaatacttcatgatccttcatgcaacttggattggtctaagagatttaaaatcgctttaggtgcggctcagggtctcgcctatttgcaccatgattgcaagccgagaatcttccaccgggacataaaatcaaacaatatactgcttgacgacaagtttgaagctcatgtgggagattttggactagcaaaagtgattgacatgccacattctaaatccatgtctgctattgctggctcctatggctacattgccccaggtaaagtttttgcttttgtttgtgcaattaagtatccaatgagggaactgaaattaaactgttttaacaactttgcagaatatgcatacaccatgaaagtgacagagaagtctgacatctatagctacggggtggttctactggagctgctaaccggaaaagccccggttcagccaatagatcaaggaggagatgtggtgaattgggtgaggagttacataagaagagatgcattgtcctcaggagttcttgatgctcggttaacgctagaagacgagagaattgtctctcatatgctcactgtgttaaagattgcacttctttgcacaagtgtgtctccagtcgcgaggccatcgatgcgacaagttgttctcatgcttattgagtctgagagatcggaaggagaacaagaacatttggatacagaagaattgacacaaacaactaccccatgacacaatacacattcttgttgtatcttcttcttttttcacacgagattattcttctatgtaaccatggcgaataattattgtaaagtctatacgcacgcagctatatcaaaagatataagcagtatctatatctacaagttaccgttaggtttaattaattagtgttaatccaatcattatccatgggacccaaacggtaattaccgttgtctttttagtatgaacaggtaaatagtagtactctctaacattggatattgtttttggtcattggatcatttaatagatcataatttaatactatggaagtatccatgttataatcaacttgatttttcatagtgattaggtctataaattattgttaatttaatgaagacaccaataataatacggtcacttttgctctggaaatcataattagcgtagatcacggttagctggatttgttataaatataatatttcacgtgctattctgaatcgtgcccaccagattatatatctaatctcttctagtttttaattttagctatgtggtagtgagttaatgtggatctgtttttctcaatattaattttgttaaataattagtcctcttagtcttcacttctctagggatatgattttaaatcaaacgaaaagattcgagtcatactaagacttattcgtacgccatgaaagtttgaaaggtctttttttccttttcttcaaactgaaaattcaaaataaaggataggatatgaataatcgagaagttcatctttaagtaaatgtgattaatatcttagttataatatcataatgccaaacattatcttgcgtgtattaacaatatcattatggttagaattgagattcgttaacaatactcgaatcactatgagatctttagcgataggatgatatgtgtattcctaactcgatcatgaactttaatatgtgctagaaacatctaatgtagtttctgttttttctttgtcgttcccaaattccaatgtaaataaggtatctaattacctcataagataattcctagtagtctaatttagaatacttctttaacaaaaaaaacatccaaatatatacttttcacaatttctactgaatgtagtgtgttggtaagttatgtaacaaattattgaggaaaaccatcaaaacaactgtaaattaaaaccacctacaatataagaagaaacattaggtctcatcttttattttgttaaaacattaggtctcttcaccgacggatctatttgtgtcctctacttttagccattctttaagaaaaaagaaatgaaaaaaaatgagggaattggctaccctttattgaaaatgaaacatgcatgatttgttttcgttagagatgagaaatataatgacataataaataagaatccaaagtgaagaagaagttggaaaacaaaaaaaaaaaaaaaagagagaaaaagattcttttgtccattaaaagagaatgaatgataacgatgtccattattattctccgtcctcgtgcttaatttaattatcttcccctctttaattaaaactaattaactattagagaacaataaataattaaatagtatagtaagaatcggatcgtaaggtaaatcaacggctgagattcattcaaaccagaggacacaaaacatctcttctctctctcccactttttctcccggagacagttaacgtgattcgcccttttctctttgcccaagagctatacgacaatacctccaccacaccccacacacacacacgagagacagagagagagagagaggaaatttgctactgagagatacattcagtgagtgtgtgtctgtcaccgtggaggagaaacggaaggaggatag

SEQ ID NO: 1955 - DNA, 658 bp, Unknown
  misc_feature (1)..( 658): cDNA_ID_2148146_gDNA_ID_1620472_Annot_ID_158035 3000 nt of promoter + ATG
ttggcttgatttaagccggtggaaacagagtagttacggaggaagtgagctacggatgagcctccgatcccactcccgacgatacatacggtcgctggagaatcatcctcgacgccgccggtggaatcgccggagcaaggtagaagaaccggcgatagtagagcgaacagaagggagattgctatcgggaaatctttcattttagtcaacgagttgactttatcgctctctctctcgattgtaaattatcaatgaggccttcttgggcccttatcctatcggactaactctatagtgcataaaggaaaaatattattttgttttatttatttattttgcaagtgttctaaagaaattgaattaatctcattaagctcaagatctatattctatacgatttaaacatacttatcatatagtcatatatcataagaagctaaccggatccgagtccggttttgattcaatttcaattgtgagatcaactttaaccgaattattgaagcccattaaaggcacaaatttccacaactgttcggtcagtgtctcagtgacaccaccaatagtagctaggctatatcataagagcgggaaaattcgcctactgaaaacaaaaaaacgtaattactaaccgttagggttttctttaccggcgatg

SEQ ID NO: 1956 - DNA, 175 bp, Unknown
  misc_feature (1)..( 175): cDNA_ID_4359993_gDNA_ID_1620473_Annot_ID_158051 3000 nt of promoter + ATG
gatctttgcatcagacagctttcttgaattgacagagtattcacgcgaggaaatattggggagaaattgtcggtatgtgaaaattcttctttttgtatcttctactcatgagatttatcatgccttttaagttatgcagtcttctccggctgcgtttttgttgtttcgtgatatg

SEQ ID NO: 1957 - DNA, 3000 bp, Unknown
  misc_feature (1)..( 3000): cDNA_ID_3065358_gDNA_ID_1620473_Annot_ID_158058 3000 nt of promoter + ATG
ttctgacgagatatgttgacttctctcgcaggggaaagaccagtgatggctgataatggcgtccaacaggtaatttaattcaatcttcttcttcttcttcttctattttgaattattgtaaaaccaccatcctaggtttaaaatgcgttgttcctttcaccaccagcaggtttctcacgacgatggaaggaacattgtttcttcgtcttatagttcttccgtggttccttctcctgatcccgctccttattataacgttcttcaaacccctaccaatctctatcactacgattgggatatcgcaaattctggtaattttttgtcttcttctctcttctaataaatcaaacaaaatctgtaagtgctcattgcattgttgtgttttctctaggctatgcacaaggcatcaatacttgggatggatatccacgatatgctactactacccctgaagccatgcatgtgccaccggttagtatgacttgccctatttatgttctatcttcctcttgctacttaattaacttagttattctttatcctcaggttgtctacaatgacaattcatctcttatgtaccaatatcctggttatggatttaacccttatccttctgtaatgttggagggacaaattccagtctccccagcttattacccacaaccttttggtgcaccttctgcaatgcattatttaccctcagatattgacccaacatctgctgcttatatgattccttacgggcaatatggtggagggaattattccggaaatcaaggggacatctctttaacatctcatataccttatcctcaaacgatgggtatacttgggccatacgaccataatgcttcacaggttaatactcttccctctttagttttaactattatgggcttatgtacataacctttatttggtttggttcggtaaacatttgcttactaggaataaaactgcataaaagtgccactggttattagtatcactagttttttgtgagtccatctctttagctttgtcgtgcaagataatgaatacatgctgacacactggaagagccatgatattttctcatatatgattgaactttcagttttgttcttccctgtaatggttttggggaatagaggtgtctttggcatacgccttggattcaaatcagttcactgttttattggcttatcacatttctttggcaccttttatcaggtagcgttgcatgggagcggggttgcttcaagctcttctttgggaggttattatcatgtaggatcttaccagaatcctagctctaccccctcatattatggagttgataatcgagtcagattaacccctgacataggtaaaagacgagagaaggatcagggctctatatctagcaccagtgatctgtatggtaatcgaggaccacgggcatcaagcagggtaaagagcaagaacagctccaaaccttgctctactattggtgattcagcaagcgattcaagtacagctggaccaaatcccagtttgtacaaccatccagaatttgtgacagattataagaatgccaaattctttatcgtcaagtcatttagtgaagacaatgtccacagaagtatcaagtacaatgtctgggccagtacaccgcatggcaacaaaaaattagacactgcttatcgggatgctgagaagatgggaggaaagtgtccaatctttctgttcttttcggtatggcttttccactgtccaatctctctgttttctttctgtatggttttttttcgatgtagtagtatatataattcctgggaataaccaaaagcgtaattgataagctgcttcaatgaaacagtaagcttaaccaaagtttaaaatcttgcaggtaaatgctagtggacaattctgtggggtgtcagaaatggttggacctgtagattttgaaaaggatgctggttactggcagcaagacaggtggagtgggcagttcccagtgaaatggcatattgtgaaagatataccgaataaccgattttgtcatattcttttacaaaacaatgacaacaagccggtaacgcacagccgagattctcaggaggtgggcattacttatttttttgtcttatgatcattgattcaatgctctcttggttgcggtgccatagtgatatttgtcttggtgtcactgtgttaggttttatgtggacaagtcttgggcaatttcacattatcatgtatgactaggtgtatatacccagtaatagggaaatccttgcatatgtgtattaggtcaaacgttaatagttggtatagggatttggaagctacttaattatgaggtacttgaaagttatactttatagtctcccagggaattaaagcttgcactttttgcgttgggttttcttgagtgggatattaagcaaaaaatggaacatagaagagtaagtttttgtggtagggagagagatttggaacgcattaattggatgttgcatggatttataactaaattgattgatgaactgtaacaggtgaagctacgccaggggattgagatgcttagaattttcaaagaatacgaggcacacacatcaatccttgatgatttcggctactatgatgagttagaggggcaaaaggtgggagaagatggaacaaggaaaaaagctggggaagaagagacctccgtggagcaattatcagagcgccttcaagctgtcaaagtagaagatgggaaggaggaggaaaaaaaagagttaatagctgattgatacagtaatagtcagtagaaggagacattcttttggtaacaataagcaatggggttctcttttttctatttgggtggggatgtatactagaatggtcgggacaaaaaaaatccaattccttgtaggcttgtaagcaattattgcttttgtagcattgtatcgtaaaacggcaacgtttcgccttttaacaagagactcgggttatataacaaaaaataaatataagtcttcttcttctcca

SEQ ID NO: 1958 - DNA, 3000 bp, Unknown
  misc_feature (1)..( 3000): cDNA_ID_2148624_gDNA_ID_1620473_Annot_ID_158064 3000 nt of promoter + ATG
caatgtttccacctttcagtacaagaggctttgcgtcacttgtatttgtgatgtcagatttctcctgaaacagtaagagaataccacataatcaattcaacatgccaggagtgcatactaaaaagcatgcatttaaagcattatcataaaaaaaaaagtgtttaagaaacttaaccaaatgcagagtttaaagaaacaattataacatcctcacatacctctagcaactggaacattgatttcatgtccacaaggctctgaattgtttcacggtaaacactacccaaaaaatttagaggaagagacagctgaaagagaagtccattcaccataacctgcatcacccaaatatgcaaaagcttattagaaaacaatttggataaaaaatgcagagaaacataaaataccaatgtcaaggaaaaatcaaaggacgcactgaccaaatcaccgactgtcatctggccattcatgataccctgagagcacaacaccattgctgttgataaagctgtactaaatatgatactttgtccaaagtttaagaaagcaagacttctttgagtttgcagggcagcatcttcatattctgggataagcagcagaatcgtcacaagataaattaaggtaaatggacggagcaataatatattatggtaaaatatcaatcggttttcttcctagaaaaagaacgtgtaaataaagatgtaaaaagagtcatcagcgcattttctgatctacatttgttacttgttggcttgttgctactattcttgctcaaactaaaactggagaattttctctttttttttggaaattaagataaatgttttcatctaaacagctagtagagttacttacttttcaggaactggtcatacttttcagcctcataaccttcattgttaaaatatttgacagtctgaaacgaaaaagaaattctgtcaaaactgcaagtcaagcaaaatgattaagattaaaaatttacctcataatttatcagagaatcaatggcccttgtgctagcatcattatcagctttgttcatagcctttctaaacttggttcgccactggataaaataaataaaaccgtgagcaaagcgtttgacaccaaaaagatttgtaacaagataatgaaagttgaagagaatgtatgaagacaactatccttctatacatcatcaaacctaatatcacaactagaatgatttaagccgatccaaagagttgatacagttaagattagagaagcttagtaacgaattccagaacaatgtatactatagtagtttcttaaataaaatatcacagttattgctggattatcatgataataacgcaagtattgcattatagttggcattgaaaagagaataccgaaaaaggcacagtacctgtgtcacagctaatgtgaaaacgatatatgatccaacggagagagaagtaatccaggcaaaagcagctccaaacttgtatgccagtatacctgataccatagatatctgaaagatacatattaattacgtcgagtgtttttagagacgaatgaatagtgaaatccaaatatgaatgagcaactgccaattattcaaaatgagaaaaaaaacaatgatcatgagaaagcaccaagtggtcagacaagctttacctccaatatggtaggaacaacattgaaaaccatagctgagaggataaaatttattgcacggctaccacgatcaataatcctgttcaagccgcctgtttctcgactggacataagcaattaagtaaggaagttatgatgagatgaatctaagatggaatgagcgagactactcacaagagtaagagaggagagatagataccttaggtggtaacgaaggtcaagatcatgtaaatgtgagaacacctgcaaagcgaccatatgaaattgattcatacattaaaatatctctatcgacaagatagtttagagcagcagcagcatacctttctagaaacagatcgtattgttcggagagctaccttagagaacacagcagtacgaagttctgcgatgatgaaaagtaacaaccaagagtgaaaagtgcattcttttttaaagaaaactagagctattgagagttaccattaaaagcagaagaacccgtccgagcaatcccgtatccaatgagaacagcagcaggagtagcaaaaacagtaagaagagttgggtttgtagcagcgaaggtggtaagtgaggctccagtaccggtagctgaagcaagccaatcaacagctaatttgaagaggaaagggacttggacattcaagaccttagcacccacgagaaaacccaaagcagcgatgaccctgaaacggaattctggattgtctctcatccacaaatagccagcaagcgtacggagaatcttcatgtcagccatagctgagtctgaatccgacgaggttgtcttgatttccttagtcttggtggtggtttggtctggattgggagtagaagtcgagaagagacgaccattaagcattgaactccgttgaacaaaacgaattggggatggtgatggtgacggggatggtgagttatctgagaggaaggcattgataaccggagatgttcgaattgagttacgtctgatgtaattggagaaaccattatgaagacgataatcagagcgaagactgtaggaaaaagatgggattttgggttgaggttgaagattaacgcgacagagtaagagcccaggagccctaacgaatcgagatcctctcgacatcccttcttctccgaaagtttcacagactgaattttgctccggcgagctagctaacaatgtcacgacgttcggcggtgcttaatgggcctaataaataaagcccaatacattttaagcccattaatgtctatccctttgtggagtgagtcgtcgtttctccaccattctttcatcatcatcgtcgtcaagcaatgtttattatgagctacttccacaagaagtcattgttagtaaagaaatg

SEQ ID NO: 1959 - DNA, 3000 bp, Unknown
  misc_feature (1)..( 3000): cDNA_ID_2148544_gDNA_ID_1620473_Annot_ID_158067 3000 nt of promoter + ATG
aaatattccacgatcgttggggaaagggggctcaaggtcagtattttgatgttatatctggaatgcatgattgagttatggggagttagtcacccgtcgtttttgtcattgtcataatcaaagtaaaacaagctaagtcaatcaggcttccaagtcaaagttcacctgttgaaaacttgatgaagaatatgatctaataaactagtttcgcaggactgtaacaatcatgaaaaataaaagatttaactgattgaggttttctatataatggcaaagagtagcattgatgagtgaccatcctgagtttgagtagagtcatatattgatggggtttttgtattgtgataaccatggagtggtgttgtgtgcagttgagtggtggagagaaacaaagagtggcacttgctcggacatttttgaaatcccctgcgattctgtaagtaactttgcacagaagcagcattgagtttacttatgtgattatgtacgtgtctagtcctcacatacatagagatggttggtgtacacaggttgtgtgatgaggcaacgagtgcgctggacagcacaacagaggcagagatactgaacgcactcaaggcactagcgagtaacaggacatctatcttcattgcccacaggctgaccactgcgatgcaatgtgacgaggtttgtagtaaatagtgtttgtcaacttagctcaaagaaacaatgtttttgcataactgaaacttttggttgcgggcagatcgtagtactggaaaacgggaaggtggtggaacaaggcccccacgacgagctattgggaaaatcagggagatatgcgcagctatggacacaacaaaacagcagcgtggatatgcttgatgcagctatcaaattggaatagtgaacctcagagccaaatgtgtaaaatttatatttatctcattgattttctatggagcttatatagttaatagagtcccaaagaacacaaaacaaagggaataataaatagtggtgaatgatataattttaacacgagtttttgttgagcaagtaaacttacgataaaaaaatgatcaattttattagttaaagcccaaataggcccaactagttattaattaattaacaagaagaagtccgtgatttcgaaattcaaacgaagcgccatttctttctcctcctaggaaactctgcaatggccatggcctatgaggaagctcgcaagctccgtcttcaagagaatcacaagcgatttcaagttacccttcatcgttaccgcgtttcttcttctcctccttctctgattcgtttatcaattttgattattgaatctcaggatttaggaatttcccagatttctaagactctgactcagattacaaagaaaacgcctcaggtttcgtgttttttccttccatttctgcttcattcctagtccaattttgtagctttaccacaatttcagcttcttcagcagcgtaatcacaaacccatcgataaagccctcttagctactgctgaaccaagacgctcttcccgtgttcgtaccgtaatttcttcctatcgcgatgatgtaattttcccagctttctcttacttctgtaatagatttttcacagcaatcaatcaacccaatcccttgtctcttttcaggtcgtcgtagacactggtcgtacttcgaatctgaggagatcgcgacatagctctacatgggcgacgtaagtgccctgctccacaattttgccctaaaaaactatcctttcatctgatcaattagttaaaattcatcagctacatttctcgacctctccatgagtgcaagtttgcatcttatgaagaaaaggttggagcattcaaggctgcagagaagttccagaggagccttaaatctccacatccttactttgtgaaatctatggttcgctcccatgtttacagttgcttttggctggtacgttcgttcacaacacttgtgtgtgtttcttcttcaaggatttcgtgttagtaccttacttgacctacatgggtttgcttgcaaatttcaaggggcttccttcaagattctgtgcagacaattttcctgaggaaactatggaaatagaactagaggatgaagaaggcgaagtgtatgaagcagtgtacattggtagaagagctggactcagtggtggttggaaaaggtttgctcttgatcataaattggatgatggtgatgctctactctttgaattggttgaaccaaagaagttcaaggtatgtatgtgtcttgaacaagagtcatgtggttggagttagttgacattctcacatgttgattataaaatgtttgcttggtgcagatctatgtgtttaaaggaaatgagaacgctaatcttacaagcgccagaaagagaggcagagcaacgacgccaagtgaagaagaagaagaagaagaagataaggatgttgaagaatcaggtgatgaggaacacagctcaagagccactaagagatcatccgtaaggttactaaggaagaggaaagcataagagagctttcttttgtctacatgccccatatatttttttggtttttgagtgggctgctaatactactaatactaatggcatatttgtaagtttatcaacccaaggtaaactttgtttttttcaatttgaaagtagaactgaaactctgatgagcggctttggttcggaaatttaaattgtttcctctcagttttggttactaggcgatgatgagctatatacttctgatgataccatttagaccaactccgtcacaaaataaacaaattaaaatggagagagtaaacgggctattaaatatcaaaactgggccttactatgacaaaaggcccatttaatctattttccttttatttagatgagtcggctcacaaattaacatttcttttcctctactccaaagatatctcggttcgcaaaagtctatttaatttcatagcaatctcacttttctcttcccccaccctcaaagatctctcaaaga

SEQ ID NO: 1960 - DNA, 3000 bp, Unknown
  misc_feature (1)..( 3000): cDNA_ID_1032303_gDNA_ID_1620473_Annot_ID_158070 3000 nt of promoter + ATG
tgtgccgactcaagcatgtcttgcagactcttgagttttgcatcatcagacttgcttttctcgacttcttttctcatgataccgttttgtttttctgcctcccgaagcctcaggcttgtaattctcagctcttcagacaaagtctcaatgtccagttcttgagttgaagctgccccttcgctctgttcatcatccaacccagatggcaagtatctagcaagctgactctttaaaatatagatttggtcttctgaattctgtaacttctcatttacatctttcagttcttgctcacaagcagcaagttttgccgggaaatcaacaaatttagtctcacttttcaccctcggcaacaagctctcagtgttcccttcaagttgcatcctaagtctttctttggcttcacgtagctcaatctcaagatccatgatcctcttgcttagggactgaaagtcagagcctatactcacataaccagggtaattagtcacagaagaatcatcagattcaagttcagaatcagtaatggaagcagaatcatctccatctttgtgataaagatcagaaggaagtcctccattgccaaggaagtattcaaaaccaggagcacgtcgaccagaaggaggacgacctaacctattaacctcattagaggtccataaagcagagaggtcagaagcagagatgtcagaaagaccagagccctgtgactgaagctctaaaggagagccttttctcaactctccggtgatgttctcgtaccgctctgccaaagcacggtacatacggtgaaactcatccacaagagcaataagctcaggtcttgactggtaatacatctctgccttcttagcaaaagaatctgcatcctcctctatcaacttcaccatccgtttcacgctccggtccatctctgatcataatcatcacacaaaacataaacttggcatattttttatttcctttatgaaaaaagactaaccacctaatttgggaaaccctaagcctaataaggtattttcattacatgaaaacgacataatgtgaatggactcaccatcgagattattctcaagccacttagaatttttgagaccgatatgactatcccaccaccatggatttgatttggtggattctacgcgtttgatactcttcttggaacgaagctggcaaaaaaaaaaaaaaacaagaatcaagaatgagaattcggttgtttttggtatgaagaaagacaaacttttgatggttttggtatgtaccagatcataatccatggctgcaaaaatcaatggaccctatgggaaagctggaaacacacaagagacaatcatgagactattgaaaaaagatgacaaaataatacagattctgtctgtcagacaaataatacaaaaaacgtcggttatttttatttttcgctaatcccaaaaaaaaacgatcggtactgttcacagagaatcatgacaaaacgtatttacacaaaagaggacaaaaaagagaacctgagaagaagaagaagtagaagatatgatgatgaatgatgatggatgagggaagaagatgaaactactttttagaatgaagaaaaaccgtgaaaataaaatatagtcaaatgaatttatacacttacctttaagacagatattgcggaacaagtcttaactagtacctagcaatttcaacgtggccaagtgattaggttgtctctctgtaattaaaatatgtaattaagggactaattccgctgtgtccacgtggtgagagaatcgtattatagagagtcattgacctctccttctccactaatcaaaaccgaccattcacaagattaatggccgtcgtgactatttctctctcgttttaattctgttgccatttgaatacttgaaggctcatgcagtcaaaagatcagatttatacagtcattgaaaacttgaaatggcttttctccttcctaaatgtaatacttttaagggttttggagtaatccacgttattaattagtctcgagaggccaacactttctatcaccttttcaatttgtggcgctccacttctctagctttttcatttcatttcaaatttaatgcatttaaaatgtcattctatatcattaattattgatataaaattacgtatgttgaccaaacaaaatatatatactataactttttataaagagatatctctaagatatatgaagatgatgtaaacacaaagaaaattattctgccaatgtgtaagcgactagattttagattacatttctttttcatgaagttgtcaacacctgattttaatttctttttcaccaaacagacattgttcaacaaatgttattagagctattagactttttgaataaatataattaaaaatctgttttatttcatacacacaaatagagaatattatcttgcaaatctcaatatcttctagttagaatcatataattaaaattaagtagatttgtaactatcaagttttcatattaaaatctatattttatatttaaaaggaaatctatagatgcaacatgtaagagtctttatttcagtttcactgtctattcttcttatgtaatttttgaaaactagaaatctcaataaaaaaaacttatagcgtagaaaataagaagtgtcagtggtgtggactcattagttgaaggagtaaatctcaattcaaaaaaacaaaaaacatgtacggtacatattttcttaagaaattaaaaaaagaagaagacggtatctatcttgatttgggcctcactatagaatatgtgtttgggccttcaaagttgacccagtacacatcaaagactggtaatggcagtcttttagatgtaatctttgtgagttttggacaaagctgccgtttacatcgttcatttaaagaacatgatcatgatcatgaaaacattacagccatacagaaatatcacactaactacaaaagatagtgcaaggaatgtgatgtacgagaagaggattaaagatg

SEQ ID NO: 1961 - DNA, 3000 bp, Unknown
  misc_feature (1)..( 3000): cDNA_ID_3065332_gDNA_ID_1620473_Annot_ID_158072 3000 nt of promoter + ATG
catcacatatattatagaaaatcatatatttatttttattgacccaattgtaaatctaaaaatcgaaagtttgacaaatcttacttgccaatacaagatactcaaaccacaaaaatgaaaaaaaaatcatcaaacgtgtaccacattgaaaacacatggctaaatatgctcaaaagatgcccttgtttattttgtgaaccacaaacacaattgcaaagaggataagagttaagaaagtgtggatactgggaaatgcgatattcaggaaagagttttgtttcttgaggaaactgcacaattttcaattgaaccaattattagtttggtgaacacaagcaatccaaaataaatagattgaggttaacaaaaataaaacgacaaagaaaaggggaaaagtcagaacagaagtggggaacatgacaagaagttgtagagaatagagtgatagtgacatcaccgttgaaaattgttttgtttttgttggcggccagttcctgcagccctcaaggagttcacggttctgtaataaactaataacacgtaacaaatatgcattcaccaataaagtatgtgcatgagagctcccatcatattacttcgctttttatctaaggagggtctgaatgttaacaggcaatatctaaggagggtccgaatgtttgacaggcaatatcatagatcaaaatggttatgcattttttgactactgttttgttctggtttagatgttagttgacacgtggaaaaggagagagggaagcatggtaggaattaggaaatgaagataaggatggaatatatctaaaacaagaaaagccgtataagtttgacactgactgactacagaggttgcagccagaatttttcccacaagcatataattatattctgctcattcatcattatcattcaccacacaacatgggaatggccctttctccaccatgttctccacagttgatatatcacaatacacaaaggtaaataactctacagcattttaaaacatatagcacaagattcacaaaagatgttacctctacccaccgactaagttcctccatttatctttcaaatccacctaccaagttacaacatttacatcactcacacttggcatatatcttgttcaagtaaatggtgagtatgaatgttaataaggaaatgttcacctctgtcctctccgcaaatactgtagggtttccattctttatatctttccatgatttaccatacctgcacaacaacaacaacaaaatgagccagtggtataatcttaatgaggtccaagatgtatcactattgaatattgataatagagtacgggactaggcaaagagtgtttgcatactcttttactccttccctcagagcttccacttcttctggcttccagaatttctttggtctcctgacatgtggtttcgccaatccgcctttctttaatggagatacactcagagttacaggggttggtcgacgaggccgaactctgctagaccatgtttcctgactatccgaacctttctcatttacattatcctgttttcacaattaaaccacaaattcatgaaccaaagaacaagatttttagaaagcatcttgagggaaaattgactaacactcaccgatgcttcgttatggtcttgacagcctgttccagtcctattcacccgagtaggcggaggagtgacatctactgagtgatcaattgcactgttaggttcttccccttgcctagtggaagggtcgatgtgtccttgaatctctactaaatattccttcagctctcgagcagccatttcgtctcccttatcaagacttggctcatgttcctgatcttgtgcactcactgtgtgctcctcgtctgctgcattcacattatcaatcccatcattctccagacattccattccttcaccatcattagcgttgtctctaccaatcccattcccgtcctccctttcaccacgcgcctcgttggcgatatcaatagtatcactcccaaaacgtctcgtgctttcatcaacatcactttgatcccctctgttgtcaacaacatcaccctctacgttcacagccttgcgcttaagaaaccttctttgagctactgattcaagagaggaactcccaagtaatgcccactgttctttgagaagctgagtgagaaaggaaatggcagtgtacctgatgttagtctcacgaattcgctgatagagctcaggatctccaagggccttcttcaaatcactctcccatttcaacaagtcacaagtcaccaaatcgctaccactctccttcaaaatcccaatcctcttcgtccatatcctctcaagcgcatcggtgaacaaaccatccgaagcaaacattggccacataaatctaagcgtacactcagtagccgtccagcaataagcagacttgtgagaatccatgagtagcgaatgttgctgcaagagaagcttctcaagaatctcgagaagatcgagcattccctcatcaatcgtacctcggatcaatgaattggagatgtcacgcaagacggaagatatcttgagctttatgcagtcggaggaatctcctaattttagcgccgaaatcagattaataggggaagccctaggattgtgttgtcgaaggaggaaaaattcagcaacccattgatcaatgacctccattattgaaactttcgcgatcaaagtcgcaacttttttaattctctggtcagcggatgcaatgtcgccggcgaagacgaaaatctccgatcagtgatcaaattcgaacggtttcaggtatattctgttattgggccttaactgggcctaaaagtcaaaagaagataaacggtgaggatgctaaaagagtgacaagtgtcaagagctgagccttatccatagattccccaatcctctttcttactactctgtcgcttggcgcgctctctctccatagttccagttctgaaatctcactttcacagtttgtgtctgtgcgataatg

SEQ ID NO: 1962 - DNA, 3000 bp, Unknown
  misc_feature (1)..( 3000): cDNA_ID_2148369_gDNA_ID_1620473_Annot_ID_158079 3000 nt of promoter + ATG
agacattgtagatgtaggtagttttgaatatattggttatatttctagctaatgaatgcattttgtaacttcatatttacaagagttcaatacaattattccacaagtcctttcgtattcttagtctcatcaacttatcaatatatcatatccttaacacatgctcatgatgaatttggttttacccaaaaaccggtctagttaatctgatccgaaattaatttgatccatccatcaccttaagagaacacatattagaaatcctacactgaaaacagaatgagaccaaggtaatttatcaatggatatggatcaaacccacttaccagcaataggttttgataggaaacccttcaaatttagcatgtaaaactttagatcgaaccactttggattcaaattagatggcacatattctactactttaatatcatgtaaagattcatttgctttcaaatcaaaaccaatgtgtggattgattagttattttattatcacaactttgaattataattactgtcatctatctataacataaactaaaataataatgtacattactatatatgtttattatatagtatatcgcaaatcttgatatggttatggatatatcaagtttaataatgtatgctcaccttaaaacgtatatactcccgacgaataatgaacattagagttttaatttgtataataagatatgcttggtagaaaacaaaaaagggaaatgtgctgaaaaaagggaaatgtaaacatgcatgaatatggtaaaggtggcgtaattaaggagtaaggacccagtaatatagtggatattcgagaaaaacttttctacgtgaacaaaaataacctacgtgtaagttatcctctctataaagccctcatcaagtctctgagtccttcaacgactcataactcatagctatatcttgtcttaaaaagaagaagcaaagagaattagtggagtacgataagcagagaagtatgttaaaggtggtgttgttgatgatgataatgatgttggcgtcacagtccgaggctcagctgaaccgtgacttttacaaggaaagctgtccatcattgttccttgtcgtgagacgagtcgtgaaacgggccgtggccagagagcctcgcatgggtgcttctctccttcgtttgttcttccatgattgttttgtcaatgtaaggcactttttttcaatgcaaaaacgaagcatgctttgtatgttcccatgaattactcctaaaacttagtaaatgctaagcatatgatttgataggggtgtgacggatccttactgttggatgacacaccgtcttttttgggagagaaaacctcaggacccagcaataactctgtgagggggttcgaagtgatcgacaaaatcaagtttaaggttgagaaaatgtgcccgggcatcgtctcatgcgcagacattctagccatcactgctcgggactccgttctcctcgttagcacctctacccttttactctttgtcatgtcttacatagatgcatgtaataattgttgaatggttaagtggcttagtgattcggattcatttattttacctagctagaaccagagttcgaatcttctagtaattaatcaattgtcccttttcaaaacttaaaaagaagggtaaaattgtagtgcaacttgcatctttttccttctgattttcttgtaaatcattgattttctaaatcattctcacatacatctagccaaaatagcataaatctaccattactttacgaattcctaacaagatacttttacattttggtcgattttacagcatatgaacacggaccaatttttgttttttgtttttccctttgttacaaacccttcagccgaccaacatttatctaaatgtttaacacttcttaatatgactaaacagctaggtggaccggggtggagcgtgaaacttggaagaagagactctacgacggcgaacttcgcggccgcgaactccggagtcatccctcctccgatcactacccttagcaacctcataaaccgtttcaaagcacaaggtttgtccacacgtgacatggtcgccctctctggtgctcacaccattggacgagcccaatgtgttacattcagaaaccgaatctacaacgcaagcaatatcgacacctctttcgccatctctaaacggaggaactgtcctgccaccagtggctccggagacaacaagaaagccaatcttgacgtccgctctcccgataggttcgaccacggcttctacaagcaacttctgagcaaaaaaggtttgcttacgtcagaccaagtcctctttaataatggtcctaccgactcgctcgtcatagcttacagccacaatctcaatgccttctaccgcgactttgcaagggcaatgattaagatgggagacatcagccccctcaccggatccaatggtcagatccgccaaaactgtcggaggcccaactgaatgattctcttttatattatcccaagcccattgagctcaataatcacctcttcgtcaactgttttttcatgtgcattccccttcttcgtcaactgttaaaatacatcttcattatataaaaaacaataaacacgtaaaagtttgtgactatgcagttttccattataaattactgtctatattctcttcttatttttttttttttttttttctcttcttactttggctgattgaaagaaataaaacttttaaatttagttgagtagatgatttgttataaactctatgctacgatttttcaaatattagtagataaaatatcattaaaaaaaaaaatggtgagcaaactatcataaaaatatatgatggcaaaatgtgagccgtcggatgaaaagtgaataggcgaatgagaggacaagtgtaaaaagtcataaggtagacaaggacacagaggaacaagtggcctctgctcttctgcctcaattaaaaaattatttttatttttgatgtgcgtggaccgccaatg

SEQ ID NO: 1963 - DNA, 3000 bp, Unknown
  misc_feature (1)..( 3000): cDNA_ID_2148352_gDNA_ID_1620473_Annot_ID_158074 3000 nt of promoter + ATG
gaatttgatcactgatcggagattttcgtcttcgccggcgacattgcatccgctgaccagagaattaaaaaagttgcgactttgatcgcgaaagtttcaataatggaggtcattgatcaatgggttgctgaatttttcctccttcgacaacacaatcctagggcttcccctattaatctgatttcggcgctaaaattaggagattcctccgactgcataaagctcaagatatcttccgtcttgcgtgacatctccaattcattgatccgaggtacgattgatgagggaatgctcgatcttctcgagattcttgagaagcttctcttgcagcaacattcgctactcatggattctcacaagtctgcttattgctggacggctactgagtgtacgcttagatttatgtggccaatgtttgcttcggatggtttgttcaccgatgcgcttgagaggatatggacgaagaggattgggattttgaaggagagtggtagcgatttggtgacttgtgacttgttgaaatgggagagtgatttgaagaaggcccttggagatcctgagctctatcagcgaattcgtgagactaacatcaggtacactgccatttcctttctcactcagcttctcaaagaacagtgggcattacttgggagttcctctcttgaatcagtagctcaaagaaggtttcttaagcgcaaggctgtgaacgtagagggtgatgttgttgacaacagaggggatcaaagtgatgttgatgaaagcacgagacgttttgggagtgatactattgatatcgccaacgaggcgcgtggtgaaagggaggacgggaatgggattggtagagacaacgctaatgatggtgaaggaatggaatgtctggagaatgatgggattgataatgtgaatgcagcagacgaggagcacacagtgagtgcacaagatcaggaacatgagccaagtcttgataagggagacgaaatggctgctcgagagctgaaggaatatttagtagagattcaaggacacatcgacccttccactaggcaaggggaagaacctaacagtgcaattgatcactcagtagatgtcactcctccgcctactcgggtgaataggactggaacaggctgtcaagaccataacgaagcatcggtgagtgttagtcaattttccctcaagatgctttctaaaaatcttgttctttggttcatgaatttgtggtttaattgtgaaaacaggataatgtaaatgagaaaggttcggatagtcaggaaacatggtctagcagagttcggcctcgtcgaccaacccctgtaactctgagtgtatctccattaaagaaaggcggattggcgaaaccacatgtcaggagaccaaagaaattctggaagccagaagaagtggaagctctgagggaaggagtaaaagagtatgcaaacactctttgcctagtcccgtactctattatcaatattcaatagtgatacatcttggacctcattaagattataccactggctcattttgttgttgttgttgtgcaggtatggtaaatcatggaaagatataaagaatggaaaccctacagtatttgcggagaggacagaggtgaacatttccttattaacattcatactcaccatttacttgaacaagatatatgccaagtgtgagtgatgtaaatgttgtaacttggtaggtggatttgaaagataaatggaggaacttagtcggtgggtagaggtaacatcttttgtgaatcttgtgctatatgttttaaaatgctgtagagttatttacctttgtgtattgtgatatatcaactgtggagaacatggtggagaaagggccattcccatgttgtgtggtgaatgataatgatgaatgagcagaatataattatatgcttgtgggaaaaattctggctgcaacctctgtagtcagtcagtgtcaaacttatacggcttttcttgttttagatatattccatccttatcttcatttcctaattcctaccatgcttccctctctccttttccacgtgtcaactaacatctaaaccagaacaaaacagtagtcaaaaaatgcataaccattttgatctatgatattgcctgtcaaacattcggaccctccttagatattgcctgttaacattcagaccctccttagataaaaagcgaagtaatatgatgggagctctcatgcacatactttattggtgaatgcatatttgttacgtgttattagtttattacagaaccgtgaactccttgagggctgcaggaactggccgccaacaaaaacaaaacaattttcaacggtgatgtcactatcactctattctctacaacttcttgtcatgttccccacttctgttctgacttttccccttttctttgtcgttttatttttgttaacctcaatctatttattttggattgcttgtgttcaccaaactaataattggttcaattgaaaattgtgcagtttcctcaagaaacaaaactctttcctgaatatcgcatttcccagtatccacactttcttaactcttatcctctttgcaattgtgtttgtggttcacaaaataaacaagggcatcttttgagcatatttagccatgtgttttcaatgtggtacacgtttgatgatttttttttcatttttgtggtttgagtatcttgtattggcaagtaagatttgtcaaactttcgatttttagatttacaattgggtcaataaaaataaatatatgattttctataatatatgtgatgcaagcaaggttaaggcaaattgtctttattctttttatcccaaatgggtgattgacgccaacgactgttcaacatattttctgctgacgcttctttaatgaagtagcacgaagaagtaaacaggacgacttttggccaccggaaaatttctctgttataaaaacgaaagtctgtgtcctcttaaacatttttgggatcatcaatcggtttttggtcaacc

SEQ ID NO: 1964 - DNA, 3000 bp, Unknown
  misc_feature (1)..( 3000): cDNA_ID_2148381_gDNA_ID_1620473_Annot_ID_158082 3000 nt of promoter + ATG
agacatggcaagcgtacgcttcctttcttttattaacaaaaaaacaatatataaaaaaaaaaaacgaaaagaagacctacgttgacgaagcaatcatggaagaatagtcggaggagggaagcagctatccgacgctctttggccacctctcgctgcaccacccgcctcaccgtagggagcagtgatggacagctgtccgaatagaagtcagtgcgtagttgggcctgtgcctgggatcccaacataacgataaacaacagcacaacgaacgcagctctctgacgactctgctcatagcactccatctttgtgtttttattttatttttgttttacttctgtttttctataggagttacgagggatcaagaagcaatcccgaggctgattgcttttatagaggtttacttccacgtaggtgtttttttatttactgtgccaaaatcctcacgtcacctctacggctctaccagactaccacattattgttcgcgttttccttttctttaagaacatttttgttgtttatcatctatataaaagttaaactctctactctctagtctctagtcctcgtaaagctaagctagttctatcaatagatataacacacgtttttatctgcccatactttattatatgcatgtcaatagccgtatcaacattgctatatacatatatataatatatacgttattaatttaaggtatatgaagcgtacatcgtaaataaaaatggtatctaccgtaatataaagagaagcgacgtccaattttggggcttgtgttatagatcaaattttgatactatatgataagtcgatgactgatgggaacataaaacatctaaattaatatcaatataataccatgatatgtaatagcctaataggtttggctgacgtgtattggttatatgaatccatgataagttgatgatactaatatttaataacataacacattatatgaaataaatgtgttacacttgattttttttttaaaaaatgtgttgcacttttaaatatattcatgcactatctttatataaacgtaaagaattctaaattaagacagacacatctttgaccaaaatattaaagacataataacacattctaaaatatattccagatccttatacagtcttcatgtcagtgagggattccgatcgatctcggtttttgacattggtatcttccaacttcgtttaattatttcccttcaaataatttgtgaacacgaaaggaaatgatcgagagagtgtgggcagagctagtgatgatcgtataattggggaggatgagataggtagaaacagcttacctatcaatgcatgcaaccaccaacgacattctcataaatatcagtctttctcacctttcaatttccactttcatgaagttttatatattttcaaaagaaagcgtacccctaagattagtttgtttatttttcaaataaatcatgttcacaactagtttactcctgcaaattttttgttattgctattatacttaccaaacacatatattatatatacagaaaagaggcttaaacaccaccttaaatgattttatccgttagaatcgctagtaatatttaacctaattaacgattttgtgctctgactttaattaattattgtaagctagtataagttttatccgctacgcacacccacacaaagaagaaaaaaaatactggtcatggaatatggggcaagggcaactatatgacatgctgttcaaattttaattggatgagaactagaagtctagaacgccaaaaccctaaagagtatcgttgatagctgatctacgtattcaaaactaaataaacacgccttagatttccgactaagtcacatgggataattagtgtgtggcttgcataagaagttgaatttcaaaattgggagacaaagttttttttctttcttcttttcgtttattttaaagcgatagtgagaggtagttaacagaacatactattattcgatcgaattgtctatcacccacagtaaccctaatctacaatcatcctcttcaaaaatataagaaaacgtacatatttaattattcacgtggattgttgaaaactgaaccacaaatattgtatttgtttttgttaaatcttgtaattttgctatgtccgctttttaggaataactttttcttttcgtgaacctctctatatagagtttttgttgttgttgttgatgaaagataataattatagttgataccaaaaaagaaagaaagatgataactatacgacagttcttcaagaaaataattctatattgtttgtgaacctttaatatgggttttttttagagttggtatgtagaattgacattttcttttctagcgttggtataatgagtaattttgttttttcggatcataaaagatatttatgaaatttgtaaaccttttataggatagtgtagtaggctcaacagattagattatagagttcttttggtatatagagactctgtaaaccttttatatttgggaatttctcactttgtgaaactttcatcatgaatagtacaaatgatgatatatactactaaattcaaaatgtacataatcgaattgatgttatattttgacatgatttcatatttaaataagaaacagaattagtgactacggaataattcacaccctcatccactcaaattattgatatttgaaaatctgggtctgataaggaacaaactaaaatatagaggaacttttgtgaatatttataaacgcgaccttcctcttagttgggccataaataattgggcctaaattaagcaaatccaatactaatggcccattattggtgggtaatatccgacaaattctctttacctctttctacgacggcgacgactgaatcgccaccgccttcccgctccgactcttgacttccacctgtttactcctttgctagaccgatcagacccatctgaagcttttctgtctagagtagagaaggag

SEQ ID NO: 1965 - DNA, 3000 bp, Unknown
  misc_feature (1)..( 3000): cDNA_ID_2148377_gDNA_ID_1620473_Annot_ID_158081 3000 nt of promoter + ATG
agacgggagaaacataccaagaaggaagcagagtcttcgtttgacagagaagtttggaatctagagctaccgacatagcccccaaaacctacggcggctgcagagccagacggcaacagagaagctgccaagctgttcagaagaagctcaattcagtaccgaaccaacgaagcatagactcaaaaaacaaaagataaagtcggaagaaattaaacgttaagaagagattaaaggaacaaatatgacctgctgctagatggacgtgctttgcttcttgcagcatctcctttgggtttgcccatctccttctctactctagacagaaaagcttcagatgggtctgatcggtctagcaaaggagtaaacaggtggaagtcaagagtcggagcgggaaggcggtggcgattcagtcgtcgccgtcgtagaaagaggtaaagagaatttgtcggatattacccaccaataatgggccattagtattggatttgcttaatttaggcccaattatttatggcccaactaagaggaaggtcgcgtttataaatattcacaaaagttcctctatattttagtttgttccttatcagacccagattttcaaatatcaataatttgagtggatgagggtgtgaattattccgtagtcactaattctgtttcttatttaaatatgaaatcatgtcaaaatataacatcaattcgattatgtacattttgaatttagtagtatatatcatcatttgtactattcatgatgaaagtttcacaaagtgagaaattcccaaatataaaaggtttacagagtctctatataccaaaagaactctataatctaatctgttgagcctactacactatcctataaaaggtttacaaatttcataaatatcttttatgatccgaaaaaacaaaattactcattataccaacgctagaaaagaaaatgtcaattctacataccaactctaaaaaaaacccatattaaaggttcacaaacaatatagaattattttcttgaagaactgtcgtatagttatcatctttctttcttttttggtatcaactataattattatctttcatcaacaacaacaacaaaaactctatatagagaggttcacgaaaagaaaaagttattcctaaaaagcggacatagcaaaattacaagatttaacaaaaacaaatacaatatttgtggttcagttttcaacaatccacgtgaataattaaatatgtacgttttcttatatttttgaagaggatgattgtagattagggttactgtgggtgatagacaattcgatcgaataatagtatgttctgttaactacctctcactatcgctttaaaataaacgaaaagaagaaagaaaaaaaactttgtctcccaattttgaaattcaacttcttatgcaagccacacactaattatcccatgtgacttagtcggaaatctaaggcgtgtttatttagttttgaatacgtagatcagctatcaacgatactctttagggttttggcgttctagacttctagttctcatccaattaaaatttgaacagcatgtcatatagttgcccttgccccatattccatgaccagtattttttttcttctttgtgtgggtgtgcgtagcggataaaacttatactagcttacaataattaattaaagtcagagcacaaaatcgttaattaggttaaatattactagcgattctaacggataaaatcatttaaggtggtgtttaagcctcttttctgtatatataatatatgtgtttggtaagtataatagcaataacaaaaaatttgcaggagtaaactagttgtgaacatgatttatttgaaaaataaacaaactaatcttaggggtacgctttcttttgaaaatatataaaacttcatgaaagtggaaattgaaaggtgagaaagactgatatttatgagaatgtcgttggtggttgcatgcattgataggtaagctgtttctacctatctcatcctccccaattatacgatcatcactagctctgcccacactctctcgatcatttcctttcgtgttcacaaattatttgaagggaaataattaaacgaagttggaagataccaatgtcaaaaaccgagatcgatcggaatccctcactgacatgaagactgtataaggatctggaatatattttagaatgtgttattatgtctttaatattttggtcaaagatgtgtctgtcttaatttagaattctttacgtttatataaagatagtgcatgaatatatttaaaagtgcaacacattttttaaaaaaaaaatcaagtgtaacacatttatttcatataatgtgttatgttattaaatattagtatcatcaacttatcatggattcatataaccaatacacgtcagccaaacctattaggctattacatatcatggtattatattgatattaatttagatgttttatgttcccatcagtcatcgacttatcatatagtatcaaaatttgatctataacacaagccccaaaattggacgtcgcttctctttatattacggtagataccatttttatttacgatgtacgcttcatataccttaaattaataacgtatatattatatatatgtatatagcaatgttgatacggctattgacatgcatataataaagtatgggcagataaaaacgtgtgttatatctattgatagaactagcttagctttacgaggactagagactagagagtagagagtttaacttttatatagatgataaacaacaaaaatgttcttaaagaaaaggaaaacgcgaacaataatgtggtagtctggtagagccgtagaggtgacgtgaggattttggcacagtaaataaaaaaacacctacgtggaagtaaacctctataaaagcaatcagcctcgggattgcttcttgatccctcgtaactcctatagaaaaacagaagtaaaacaaaaataaaataaaaacacaaagatg

SEQ ID NO: 1966 - DNA, 3000 bp, Unknown
  misc_feature (1)..( 3000): cDNA_ID_3065336_gDNA_ID_1620473_Annot_ID_158071 3000 nt of promoter + ATG
tgtgtagctcaagtgcctgaggtacgacccaccatggatgatgttgttagaatgattgaagagatacgagtttcagactctgagaccactcggccatcttcagatgacaatagcaaacccaaggactccaacgtccaagtttaaatcaccccttggatctcattccctttttatctatgtttttgagtttgtatgtcttataaggctttatgttgattgtttgaacaccactcgcctgagtaataccgcagttggaggcgcggtaacatttacatagcaattattattgtaggctcctttttctgtatctcataatatatatgaatatgattcagttttatgcaagctaagtaagtatccaaaagatggatttaaaagagttccagagagacataaatatcagggagaaagagatgaggctgcttgaaggaggaattgatagagttcttgaggttgggagaaaaaagcagagtggtcactgtccggaagaaggaaggtgtgagcaggaggccacagggccaacattacctcttgaagaactggttcgaacaaatggtccttgcctgtcttcacgtacactcttgggattttgtcagtctctggagctcccggaatatccattatgcctatgaatgccatgacaggggccggacgcagaagtgtggttgccagtgtgtaatcctgatcagaatgaataaatgaatgatgatgattctctacaaaaaaaattgaggcagagatgagaacagagttggtaataaaggacacacctccatggggctctcgttgtaaaacttgtcccgaacatactcaggtttcatcatgatgcttgttgggagattttgtggtccatttccgaaagtaaagtcccatatcttctcagtttcctcctctatcaatcctgaacatatcttcattacatttttgagtctttcaggaatcaaggtaccaggtttgaccatggctgctgcgacgtaaaccgccaaggaaactttggaaggaaagaggcacatggcagccgtcatgctccctcctccaacgctgtggctcacaagaatgaccttttgatcgttgggaagttgggagaggaaggcatagagaggctcgtcgtagtcatccaaagaagagacagtgtttggatcagttgggttgataccagcacccttgaggtctatacatgtagccttatgtccattatccctcagtgaattagccagcttgtaccaacaccatcctccatgccctgcaccatgcacaaacacaaaatgatgctcactcatctttaatcctcttctcgtacatcacattccttgcactatcttttgtagttagtgtgatatttctgtatggctgtaatgttttcatgatcatgatcatgttctttaaatgaacgatgtaaacggcagctttgtccaaaactcacaaagattacatctaaaagactgccattaccagtctttgatgtgtactgggtcaactttgaaggcccaaacacatattctatagtgaggcccaaatcaagatagataccgtcttcttctttttttaatttcttaagaaaatatgtaccgtacatgttttttgtttttttgaattgagatttactccttcaactaatgagtccacaccactgacacttcttattttctacgctataagttttttttattgagatttctagttttcaaaaattacataagaagaatagacagtgaaactgaaataaagactcttacatgttgcatctatagatttccttttaaatataaaatatagattttaatatgaaaacttgatagttacaaatctacttaattttaattatatgattctaactagaagatattgagatttgcaagataatattctctatttgtgtgtatgaaataaaacagatttttaattatatttattcaaaaagtctaatagctctaataacatttgttgaacaatgtctgtttggtgaaaaagaaattaaaatcaggtgttgacaacttcatgaaaaagaaatgtaatctaaaatctagtcgcttacacattggcagaataattttctttgtgtttacatcatcttcatatatcttagagatatctctttataaaaagttatagtatatatattttgtttggtcaacatacgtaattttatatcaataattaatgatatagaatgacattttaaatgcattaaatttgaaatgaaatgaaaaagctagagaagtggagcgccacaaattgaaaaggtgatagaaagtgttggcctctcgagactaattaataacgtggattactccaaaacccttaaaagtattacatttaggaaggagaaaagccatttcaagttttcaatgactgtataaatctgatcttttgactgcatgagccttcaagtattcaaatggcaacagaattaaaacgagagagaaatagtcacgacggccattaatcttgtgaatggtcggttttgattagtggagaaggagaggtcaatgactctctataatacgattctctcaccacgtggacacagcggaattagtcccttaattacatattttaattacagagagacaacctaatcacttggccacgttgaaattgctaggtactagttaagacttgttccgcaatatctgtcttaaaggtaagtgtataaattcatttgactatattttattttcacggtttttcttcattctaaaaagtagtttcatcttcttccctcatccatcatcattcatcatcatatcttctacttcttcttcttctcaggttctcttttttgtcctcttttgtgtaaatacgttttgtcatgattctctgtgaacagtaccgatcgtttttttttgggattagcgaaaaataaaaataaccgacgttttttgtattatttgtctgacagacagaatctgtattattttgtcatcttttttcaatagtctcatgattgtctcttgtgtgtttccagctttcccatagggtccattgatttttgcagcc

SEQ ID NO: 1967 - DNA, 3000 bp, Unknown
  misc_feature (1)..( 3000): cDNA_ID_3065340_gDNA_ID_1620473_Annot_ID_158069 3000 nt of promoter + ATG
tgttacgagcacaagaagaggtcaaacgaattcaatccgtgcctttggtgataggtcagttcatggagatggtagatcagaacaacggcatcgtcggatctactactggctccaattactatgtcagaattctcagcacaatcaatagagaactcttaaagccttctgcttccgtcgctcttcaccgtcactccaacgcccttgttgatgttttgcctccggaggctgattctagcatctcccttctcagccaatctgagaagcctgacgtctcctacaatgtaatgtttccttttttccaaatctcgactctgttttctgaattaaagttagggtttttgaaacgatctttggtttcttatgtggtgctttatctttttgtgtaggatattggaggatgcgatattcagaaacaggaaattcgtgaggctgttgaattgcctcttacccaccacgagctttacaaacagattggtattgacccacctcgtggagtcttgctctatggacctcctggtactggaaagactatgttggctaaggctgttgccaatcacacaactgctgccttcattagggttgttggatccgagtttgtgcaaaagtatctcggcgaggtattaaaaatcatagctttattgaaggtttaggtcctattgagcgattctatttggtgactaactggttttttaattgcagggacctcgtatggttcgtgatgtcttccgtcttgccaaggaaaatgctccagctatcatcttcattgatgaggtagatgccatcgctactgctaggtttgatgctcaaacaggagccgatagggaagttcagcgtattctcatggagcttcttaatcaggtgagaacaaataatgaattttagttgtaattcagatcttatgttgtagaataatggattttagttgtgtccttaacttattgtgttgaattcgatgtagatggatggatttgaccagaccgtgaatgtcaaggtcataatggcaacaaacagggcagacactctagatcctgctctcttacgtcctggaagacttgatcgtaagattgagttcccccttcctgatagacgtcaaaagaggcttgttttccaggtaagttaattactacaagcacttaaataactagttaaagagatatgaaaccaaatgttttctcaaaagaaagttttgactgatatcttagtttctgtcttattgattggtttttccttgtgtaggtatgcacctccaaaatgaaccttagcgatgaggttgacttggaagactatgtttcacggcctgataaaattagcgctgctgaggttagtttattttgcttaccattctattcttcccgctatagtttacttttaccatgatatatcctccagtgtttctgggtcaccacctaatgatgttcttcaaaatatgcacttgagcataatcatactgtttcaagcattatgtatgaatgttagctgagtcgtttgttaatcattgtcctgaactgaattgttgagaaatcaattgttggcagtaatatggtttgattttatcatgtacatgggaattgttcctaaaaagattgcatgtaatgatgatagttattaatgacactattttgattttatgttgaacaatgcagatagcagcaatttgccaggaagctggtatgcatgcggtgcgaaagaacagatatgtgatactacctaaggatttcgagaagggctaccgcgcaaatgttaagaagccagacacggactttgagttttacaagtgaagagaaagcagaagtggaaccagattatggctgttgttaaaattccagtgtgttttgagaattattaaggacatggaatcaaatttgcagttaaattaagaactaagttgcatctcctaatttctgtaactcgagttcacatttgtttttagtctatcagctttttacagtttaatgtataagaaaaactggggatggtgtccttagaattgccagagcatggtaataattatgtctcctctgattaaaaagacaacaaaaatagtgatgatattaggagcacgctgcactgctcaatgttcatagaaaacttcagacttcaataatgcctaaatgtgttggatcttgttttggagttggtgatagatgatgaaatgaccagtattactattacatagtatccgcaaatcaagaatgatgcaaatcaagagaaaacagtagcaagagtggttggacaggtaagaactattaccatatctaaatgattactttaaaaataacaacttggatcaagatggtttttgttttcatgtatttgtcattttgctatctcataagaatcttaagcttggtcagtctctgggtctctctacattagcgtttgttgcggtgtttacacaccaatatgatttgatctaaagactccttttgaagactgtcttacccttaacgaatacgcctcttttgtttaacttcaccacactctctctctctttcttcttcttcttcttcttcttcttcttcttcttcttcttcttctccactagtccccacatacattgccttttcttctttcttctctttcaccatttcaagattgtgttatagtccgctcaatgcagtagagtgcagaggtctgagcgctccatctgcataagttcttcttcctctattgctgagttcttcagtgcccacaattttcttacttcgctagcttacctctctactcccaggttctctttctctcttcttcttctttttggtttttgtatttttccttttaactttctgtaattgtctgtctctcattgttgggaattatacttaaaaatcgccattttctccggctaggtgggtaggaaactttcaagactttagatacaggctagtgacgtggtatattagttccaattcgctggctacacgttgtttgttcaacaactccgataaaaatcagacactcaaaactcatctttatttacttagtgacattgtccacatg

SEQ ID NO: 1968 - DNA, 3000 bp, Unknown
  misc_feature (1)..( 3000): cDNA_ID_2148327_gDNA_ID_1620473_Annot_ID_158065 3000 nt of promoter + ATG
acatctgcagcaatcaaaacactcaaaaatcaatccttctaacttgtaaagtagagacaaaatgttggatcgtataaggaacttacctttctctgacaacgaatactagataagatcgtcttcccggttacttgcaggttcagcatctcagctccgcctccgtcgccatgaaagtcacagttaacgcctttcccttttctttcttacgggcttgaagaaacccataacaccttattgggccattactgaagcccaaataacattaaaatcaattaaaaattgagttgagaaagggagagagagagtgatgataataatggatgacccccggcaaaaaagataagatttttacagattctgcctcgatcaacagactctaatcagcagcaaatgtggagcgtcaccggagcattgactgtggcggtgccgcctaccgccgccgcttgccgtacgaaaccctttctcatctcctcttcctttcccaagcagacaaagaaactccatctctcttcgccttctctgtctctaccatcatcacatttctcctcctctttcaaaaccgcagctacctccatcgagcaacagtcttctgttaacaaggtttctcttttctttctctctctctcttttcctcttgaccaatcaaaccaaacagcttacgttttctggatgattgcagggagagagcaccaagtaccatttcctggtagcaaacgctaaattcatgcttgacgaagaggagcacttccaggagcaattgtttgaacgtctccgttacttcggtgagcgtgaattagtgcaagacttctggcttgtcattgagcctaaattccttgacaatttccccaaaattactcaaagacttcgtcgtcctgctgttgctcttgtttccaccaatggcacctggatcacgttagaaccctaatcccaatctctctcttttcaaaattacgttcctcactccctccttatctaacgcatttgtgttttgcaatttgttgttttatggcaggtttatgaagttaagattggatcgtgttctgtatgattcctttgaagctacctctcttgatgaagctttggcctccaatcctaccactcttgagttcgataagcctaaaaattgggtggcgccataccccaagtatgaacctggatggtgggataccttcttgcctaaagtaacccaagaatctgcagtatagaactttgctttttgtcttgtttttgcattctccaatctcagctttgtcttagtgcttcaaagttttgtactactgagctcattatccaagtctatatctttcctagtgtagcttctattactcaaagttgcctgtttgatacgtcactgactcaaggttaagcatagaactagacaacaaaaagcatcctcacatttagctccatcaaagtcttaagggtgaccatatttgttgatttctcacgagaatattggcaagaaccttcagttaaagctctaggtattaagttgtctagtcacaggagggcaatatgcctactcgctgaagaactttgcaaaagatctgaattttttggttttcaaaacgatttgtggactcggaacatgttgttactcgttaggtctagtgactggagttgatcaaagtaagttgcacatgtttctgctgaatcaagtgttctatgttgtacttctggattgctctgtagtctgtatctaagcgtgtcctatcaatcttactgattatacatacttttatttgtgacaaagcagagtcagaaattatctttaactactccatgggaatatactaccaagttacaaatacagattttaacttttactatgggatgagtattgctacacttgcgggagatgcattcatgaaaaactatacactggtagctccacttgtgccattaagttactcttgtgcagctagatttgcaatttctgctagaggcttccacacgaactttctcctgcaggggaattggtaatggtcatgcaaattgcaaacatagatgattagtgtgtatggtaaggaatgatatactcaccagttgccacattcagcaataaccctgacgttaggacgaagagagggaagtaaagcgagaaattgaagctccgattttgagaggacctgagtgaaatggaaatatgagaaagagcatgtgggagaacagatcaaatgagagaaactcaaacctttgcttcgaggacccatacaacaagacccttggcactagggggaagagcagcgagcctgtaatcaacttctggtggataataccatcttgctataggttgtttcccaagatgagcctaaaagaagagaagatacatggttcacacaaaattatattgaaacaagattaaagtagaagatggatgaaagtagacatacagggcaaacagggtagttcttgagaagggtagtctcagggtcaccaaggccacgagcagagatgtcaagaaagtagtagccctgcattttgagacggttaagataacgaccttcgtaaccaccctcatgaggagcgtaaatggcgattgccttgtgttcttccacgtcttgaagccattgtccgatgtccggcttcaccaagtcacctccgatgtagtcagctatgctgctacatttcacaccagtgcttcttcttctcttactcctagtattcaccaaaaaggaaccaactgttttgatcttcttcacttgcgaggcttcaaaacacggtggtgccacacgttgtatacatattgcacggcttcccatttctttactaacaatgacttcttgtggaagtagctcataataaacattgcttgacgacgatgatgatgaaagaatggtggagaaacgacgactcactccacaaagggatagacattaatgggcttaaaatgtattgggctttatttattaggcccattaagcaccgccgaacgtcgtgacattgttagctagctcgccggagcaaaattcagtctgtgaaactttcggagaagaaggg

SEQ ID NO: 1969 - DNA, 3000 bp, Unknown
  misc_feature (1)..( 3000): cDNA_ID_1032690_gDNA_ID_1620473_Annot_ID_158063 3000 nt of promoter + ATG
aggtacaaattatccagcagataaatcatgatggtgaggttaatcgagctcgctatatgcctcaaaaccctttcataattgctaccaagacagttaatgcggaggtctatgttttcgattacagtaagcatccatctaagcctcctcttgatggggcttgtaatcctgatttaaagcttagaggtcacagctctgagggatatggtctctcttggagtaagttcaagcagggtcatttgcttagtggctctgatgatgctcagatctgcttgtgggatattaacgctactcctaaaaacaaatctctggacgctcagcagatttttaaggtaatgctttggatttctattcgtttttagttttgttttgtatcatctagaaaggaaggaattgcacccacttaacggaatcagttacacttatgaaagctcatagatagatattcaggttggtttctgtgttttccttgctgatgattattttctgaacttaaggctcatgaaggggttgtggaagatgttgcatggcatctgagacatgagtacctgtttggatcagttggagatgaccaataccttctcatatgggatctgcgttctccatctgccagtaaaccagtacagtctgtggttgctcattcgatggaggtgagtttgcaatatattagctttagatacagataatacttctggtttttaagcttgctttccttaacactaaaaaccattgaatcatattgcctcgtatgtatttgctaattgttgagttgtttgaaatgccttaggttaactgcttagccttcaatccatttaatgagtgggttgtggcaacaggatcaactgacaagactgttaaattattcgatctacggaagctaagcaccgctcttcacacatttgatagccacaagtaagaatgatacgccataaatattgccgctttgagatggattttgtgttactaagaagtatttacaagttacagcaacatcactaaccttaattatgtgcttgatctccagagaggaggtttttcaagttggttggaacccaaagaacgagactattttagcttcatgttgccttggtagaagacttatggtttgggaccttagcaggtttgggccgtagactttagttctttagtttaatgttcatgtatggtcatggaggagcaatattgatatgtttgagggtgtcttatgataggatcgatgaggaacagacagtggaggacgcagaagacggcccacctgagctgctgtttattcacggtggtcacactagcaaaatttcagatttctcgtggaacccttgtgaagattgggttatttccagtgttgctgaggacaacatactccaaatatggcaaatggctgaaaacatctatcatgatgaggatgacgctccaggggaagaaccatcaaaagcttcttagcttgttatttagtatccaaagcgcactgatcttatgggacagtatttatttatacatctctgctattgtttagttcaagtatttagtgttcattgtgtaaaatgaggcatgagaggatggtagcaagtgggaatttttctttataacatgaaggagttgattctaatctcactaagtagtgtcaaccaaagctataactcttagtttatacccagattgggcgacattagaaagaaattacaaatttgaatcaaagtctctgacataaaatttcaaactgaaagtcacttgtcacaatggtccttattaaagctactggatagcttggtttgatttgatattgataaatgataactagcaatcgaaaagagatctgtattgggaagcctcgtcagccatctcctgaatgctcctatcaacccggtctttatctagatcaagcttctgcttcagttccttctccttctcatcaagctacaagaagataccaccataagatttgtataaaaccaaagctaggaatgtgatcaaaatgcaacaacttacagcatcatagatttcatcattcttctcaaagtcaccacctttacgaggcaagatatgaatgtgtacatggggaacagtctgtcccgcttgagggccatcctaagccattttcatgaaaccaaagttagatcgtttcaattccaatccattaagatttagacgcaagaaacaatgacgaaagaaaggagatgtttagtttacttggatggctaatgtgagagaagacgcattatggaaggtctcaagcttagagccaaccttctgagcagtaagccacaggtcactggtctcatcagctgtaagatcagtaaatcgtggcacaaggcgtctcgggcagacaagaacatgtgctcgtctggttaaagtcatccaatagaactcaatttacaaaacaaaaccgaaaaatgaagaacacacaaaaaaaagaaggatatgacctgcaaaaaatagatgaaaaagaaggtcagaagaaagttgaagaggttcgatgaataattagagaggaatgaggcataccaggaagaagcggacggagattaaccatggcataagagagaggcgttgcgtagaacacttcacggggatcgattttgtacggcccaaatgcgtacgaagaacaagtagacgacatctgcagcaatcaaaacactcaaaaatcaatccttctaacttgtaaagtagagacaaaatgttggatcgtataaggaacttacctttctctgacaacgaatactagataagatcgtcttcccggttacttgcaggttcagcatctcagctccgcctccgtcgccatgaaagtcacagttaacgcctttcccttttctttcttacgggcttgaagaaacccataacaccttattgggccattactgaagcccaaataacattaaaatcaattaaaaattgagttgagaaagggagagagagagtgatgataataatggatgacccccggcaaaaaagataagatttttacagattctgcctcgatcaacagactctaatcagcagcaa

SEQ ID NO: 1970 - DNA, 3000 bp, Unknown
  misc_feature (1)..( 3000): cDNA_ID_2148296_gDNA_ID_1620473_Annot_ID_158054 3000 nt of promoter + ATG
ctccaaggtgcagaatcatctccgttgttatggagtagactttgcaaattaaccatgtctaagtcctcgtagattgcaattctttgctctgtcgctatacagtatccacagagcgggaaaagatttgggtgattgatcctagcgagacgttcaaatgcaatcgagacttcagtatcagtcaatgtggttccacttgggataacttttagagctgctctgaatccaccgggtaagactgctccgtaagtaggaccagacttgccttcccacaacattgtgcctctgtcgaagttgaaagtcgcagcctttaggtctgcaagcgtcattttcattaatggcttgtcgatcattaccacagggatttgcgttgcttgcttgatatcagtggttgagtcgtgttggtctggggagttgggttctgtgttgtttatggctagctttgttgcccaagttcttgattttcttctaactctcaaggctacaagtatgagcagtagtcctataagtaagaacgccatggagattgctaaccccaaaccaatcttaagccctgtattcttcttgttgactttctttccttttgtaataattggctttgcagcgaaggggcagttgtttctaatattaatgaaggatctctggattgtttcttgggagaagttggggttgcaaaaggttagattgttgaaagagaagttaaacctttgcatcatggcgagtttctccaaaagcggccttgggatatctccgtctagcttattcaacgagagatcaagtacttcaatgttcttgacgctcagcataggcacgtggccagtgagattattggaggagagatcaagaaccttcagatgactcagccgcgagatttcacgcggaatgatattagtgagattggtccttgatagattcagataatgtagcgcagaaagcttgccgatttctgggaactcttgtgccctgaatcgattgcacgcgaggttaaggtgtcccagcttgtgagctgaactcaaaccattgaatatatggccgacaaagctattatcggacaagtcaagatgaatcagactagaccagttgtgtttgtggccgggtattaactgcaagatatgcccatcaaatcggttttcactgagatcaactgtttccacgttttcatgcaagactcctatcaatgaaccctgaaacagatttcgtgaaaggttcaagctttttagtagtgggaaagctgaaccaaaaccgacaggcagagactcgttgaggcggttggatgagaggtcgatggagagtagagatcggcaatggacaagttctggagggacgccaaactgaaagtcattgttgtggagcttgagagttgttagattgacaaggttgcttattgcggcagggattttgccagagatgctgttgaaagaaagatcaagggtgtgaagcgacatgaaattgccgatgttgctgggaagaggctcagaaatccggttggaggagagattgagactctcaagcaagctgagactccacaaatccgaggggagagacgtaatcttgtttccactgagatctaaagtttggagcttactcattttgccaatagtgttgtcggggatcgaaccagacaggtccaacccagaagccgaaatatgcaacacattctcactagagtcacagacgaccactcctggccatgaacacaaggaagaaaacgtatgagcttggggagaattgggtaatctcattgcggagaagaagctagagagatgataagcgtcggtgttgggatctaggctcgtcagatgcttgacgaagaaggagaagaacaggagagatccccatagagacaacctcataacttggtggtgtctgggactggagaaagttggatgggaaagctcagaaagaagacagactgtgtgaaaagaagaaaagacataatggaatcacggggcatagaggtgatgatagtttagaatacattgaaatccctttcacgtgcacagcttcaaaaaaaatcagaacttttagtcagaaagctatgaaatttcagaagaagaagataagagttgaatagtttgggggagttccggagttgagagttgagtttttggttgtatcgtatatggacactggagaaagtgggaagagaagagagagtcgttgaaagtcaaaaaaagggatatgtggagattataattaggtaaagtatttcgctagtgagttataagaaaaatatgataaatggaatctgtctcagaccttttgtgaatttttccaaatcccaaagttgtcaatggatttggtgagtggaggagtgggtggttgttgtggtttctcatttcagtagtgttttggttattaatgtaaaaattcacttttttaggggttttcacacttttttgactctgtcacagataccttggaaattgagaatcattcattcctctgattagcccctaaactggcgccttaatgtccgcaaataagagaaaataaaaacaagagccatcaatgtagtttaaaccaactcatcagattcatagctcattttctggataaaaatagccactcactattttaagcaatcttatgctaaaacagagctccaatagctatctgagtttcatcggattcaaagactgaaacttgcaattagagagaatgaagaaacaatgctagcaaaacagagtcgagatatcacaacttgtgcgccgaaaaggaaaagcccattaagaggaattaaatgggccgagagataaatgccggttcgtccgtagatgagaagacacgtgtcaggtcgggtagagagttggcggctgatcgtgggatccacgtcatacaacgcgccagctgaccttttcctctgttcgaagatcaatcaacatcaccttaacagattcataccaaaaaggagcatctttcgctacaaattctgtaatcaaacgaaaactcaaaagttgtcgatttttgaaattcgaagagaggttttaagactttgataaa

SEQ ID NO: 1971 - DNA, 3000 bp, Unknown
  misc_feature (1)..( 3000): cDNA_ID_3065366_gDNA_ID_1620473_Annot_ID_158055 3000 nt of promoter + ATG
gaaaatttgaatgtttagagtgtctgtactcgactatttgtcacgaaaatttgaatatttagactgtttagattttactagccgttacgaaaattagaatgttatagagtatctagattcgattataaaatcttgagtttgtattctttttcttttgtaacgcctaattcattgattgcatcgaaatgagagtcgatacaatcaatgtacattaaaagtatgcaatacatatacacatcaacatacatagttaaacttgaaagtaagccgtgaaaaattgaacttatataatgttttccgatacaatagctttactagttaacaaattattaattatgttaattttatttatataattttttatcccaatatgatgaaactgtcattcttagctaacatctcttggataaaaactacacattacagaaaaaaaaaaccaaaaaaaaaactacacattagtctaaatgatttatggtatattatctttcaccagtttgtttgtttttctgattccattatcgctaatgtggcatttattaatttgtcacactgcaagctctttccatgccttatacgatcacgaacattcataagctgtgggccaactttgagtgcaaaatgggacttcaaaggccctacactacttatagatgaaagtggccatttggtgaggactgtatgactttcgtgtttacccaattttcacattcgtgcttcaaatctatccttgtatgtgtgtgtgcgtcttctctattattccataaaatgcatgaccaaaatcattgatcttttttcccacataacaaaaaaaaaaaaaactaaaacctgacatggaacaacttattccttgagatatgttcataagttcatagaaagcagttcaagtagggtagactattctatagagggacattcaagagttgcattacagcttagagaagtgtacaacatgagtttgttttcttcgcttgcttgtaaaacatctgtttcatccaaacaccaaaacaaaccaatattctcatgtcagaaactatttcatctatctcccattaccctcagaatccactgaagaaacagtagtaagtaatactagggtggaatgttaccttcgatgccaggcttaactctgagctcttctccactaagctgtccagcttttcacctcgggctaggacaccatcaatggttttatgctgtagtataaaacaaaagtcagcataaaacgaccatgtttaagcgaccttggaaacaagaacttaatggagggaactggtatgtattggaatgtaaaaaggaagcaaagcatgcaggtcaacaatcaagaaccagggacggcacttacaaggataatcttggtctcatccaattccctctggattttcaacagcttatcagcttctgccgggtcctgaagatattccaaaaaaaagtaagaataattgacacagcaaatagttcctaaagtcttaaacaagattcatagatacaaaaaagttagtgcttctagaacccgaaatttgtctgaagcttcttttaagtatggccacggctgactagagttttcaaacctccatgtgtcaccataatccttctggtatacatctaatacctgtcaaaaacagaatgccaacgaaagaaaaaatattttccttcaaacaagaccgtaccagaagttagattttgttttgtacctgattgagaagagaaaaggcacttcgaacgggataatggtcgtccatgaatcctacggcgcagaggccatttatgttgtaagcgtgcactttatactctacatatcaacacagcgatgtcaattacaaaattataaacaggacacatatatatgacagatccaagagccaaaaaaaaagaagaagaaccttcgtgtttgacggattggcgctgacctggaggggttcttctggcaacagtacgggcaatgaatacaatgaactcttcgaagttagagcgataaaaagagaattttccgaattgtgagaggtcggaaacgttggccaggataacgggttcgcgtgtttcgggatcgcacttgagaacgagcaaggcagtgatcttcatgacaagggttctgaatcatgaaacagaaccaatgaagttccagtgagtttattttactatgagctaaaaacgtaaaaaaaacaaagtcacagttggtgagagactaattttgttactatacaatcataagacagaaactcgaaaaaaaacatagcttttgaaacaacaaggagagagtagacgagataaagagtgttcgagcagatatgttataagagacagagaagaagctaaagagagaagaagcaagatagagaggtgttaccggggcagagagtagacaagacagatgagacgagatcgacaatacgatgtatagatgcagagaggagagttgaatcgttgttgaattccagagacctttttagttaagggacctttcagggttaggccatatagaaaaaaaaaaattaaaattttatttattaatataacgaaattatttttaatatttgttcgtgttactaatttatatacgtaagtgaaaaatggaggatatattttagtatatatttttttgatacgtcaaggtctcaatgaacgacagaaacgcggtaagagagaaaggagagataaaaataggtgtggatgagttgtttgatccataaatgggatggccaagtttctttcttactattaattaactaacttgtttttcttcattccaattttgaaaccccttctttctttggccccaagcttccgtttttcttcatcttattctttcaaaatctcaaacccataagggaaaaagaagcataaagaggcagaagaggaaggtggtcatatgttcttgctttcgccttgtgagatctctttacttgtctctctcgcctctttcacattttcttaaattttaaagtttctatcttatgatagcttttcttttgtgttacaaacaggatcaatcatacagagatg

SEQ ID NO: 1972 - DNA, 3000 bp, Unknown
  misc_feature (1)..( 3000): cDNA_ID_2148203_gDNA_ID_1620474_Annot_ID_158100 3000 nt of promoter + ATG
gcttctctaaactacgaatgcatacaagtctacttaaacatttgatgatgacactaaaatgagagaatcaattttgtttttcgtttcgtgggacttttactttgaggagagaatggaggcaaatcggggccttctctcatttcttttgccttttccttgttcactttttataattcacacacagctatacttgatatatatgtatgaattttgatatataattctaatataattcataatattagtatacatggaaacgaaaaaatagactgaaagacattatcctaaccttttttttttgaatttaagttcattgatccaatagtttgatgttttataccatatttgcggtttgatttctagaaaatacaaattattagtgaaaaaaaaacttatgaaaatctcgaacgtacgtatgtagagtcctatataatattgttgatcatgaacaaaactattctacagaaaaaagtaacatcatagacccacacaaatcataaaaaaacataattttggaatttcaaacgggaaaattggaaaagtttacttttttgtgtgttaggaataattatggaaaatatgctctgaaataatatggtttatactttattttgtaggaatccaaattattttttctcgaagcaaaaagccaaaatgtatagaaagttagtgtcctttgatggctcatcaaaaatagaaagaaaagtgtgaaagctctttaatagttgcatgtggcatcgaaggcaaaatcaaaagaatcttatgtttgggcctagtgcttcggtcacaagcattaaatttatccctaataataaattacttttaataaattgtttatatcctgaacaatattaatgtcaatttggttattgttaggttattggtataatcataagaagtatgttctatgaaacataaatagtgtgatatatgttctatttctatatttcatttgtcggtagatttatacatgaagttatacggaggagtaatctttgttcataaattggctaataagtaaattatatacgaagaaagtatatgtttagtaaactagacaacacatatgaaatagataccattatcattgatcataacattgttggcatgtgtgatagcaggtttagccttcaaaacatttataacgtgcaaatcagtcatgatctctcttgataaacaactaattaaacattaactacttatatacgacaaagcgcatttatctcaattgcgtataatgtacattatcgaccgaatatcaacaatatatgaacgtctagccaaattgttctaacagtacggtcgcataatatcacataatagattttaacccgcggtataccgcggaacaatttttttttaaaagttagtatacataaaagtttgcaaattgtatctatctataaattaatgttgatcttatttatgatatgtttatgaattattgtctaaatatattgtaattttgtagtaattaaatgctatcaaatatctctgcgatttgatgattataatcgaattgttatagtcatggagaaaagcaatattaaaaatgataattttgtagtaattaaatgatattaaatattttagaagttttattttaataactaattgtgtagttaatgtggagagatttaggcaaggttgttaaatatcaaatatttaattcgaatatttttttctaattatcaaaaacaaacattaaaattcagtggcagccattgtaaataagttccaactacaagatttatttcataaaatggctgcaaaaatgtatatgtagatgctgaaatcacaatgttaccgacaataccctaaccatatgactataaaaactcagctggttacgaccaaaatctgtcttgagatcgagataatgtacaataagccaaaagaggtaaaaatttaactaaatcataataagccaacaaatttaggtttagtttagtaatcaaccccatcattaatatattacagtatatcgatgaacccacatctatcaaataaattaatgagtctaatgatgatataacaacacaaacaattccacaataaacaaatactccatagtccagacttaaacattagaaagaaacatattcaagttgtcccttcgggaacatgtatccgattttttttaaaaaaaaatcgggttaaaaactgtttacatatgtacaccatctgctttagctcctatacgtttacgcagaaaaaacgtttttcttaaaagtcaaaataagaatctaatctaaagtacaattcgagccctttatgtcaaaaaaactttgcttcctttgttggcaatccttattttttattttatccggtggtgatccgtttatactttatataaatttctttcgacttgattattgaaaataactcattcatacttaattaaatttaatcaagacaactagaaaactcaaattataactgaggagtaggcctcacagtgtctgcatgggcaacacgtgtctgtgtagaagaagacaatggccatgattctgtaataagccacacaggctctcactgagcagaaacttcagcttttagcattttaaccttttataacacaaaaccctaaaaaaatacactgggccactctcgtcttcagtgtgctaaaaacccacctataattattttttgtgagatcatttttcttgcaacttgttacacttatctcagttccccgacaaattttgtatgttttacgttccaaattattgtagtttaaattacactgtacatatgttgtttcggaaagaaattcacaaaagaagaaactgggtccacatcattaggtagtatattattatctattacttttgtaataaactaatggaaagtttctgcagccgtttctcattttaattgtgtgtattaacctcaccaattctcgatacaatattataagttataacacttcaacatcgtacaaacattcttagagagagactaagagagcgatagagatctagagagagagagaggatg

SEQ ID NO: 1973 - DNA, 3000 bp, Unknown
  misc_feature (1)..( 3000): cDNA_ID_3065378_gDNA_ID_1620474_Annot_ID_158106 3000 nt of promoter + ATG
ttggtggaagaagctggaatatgtcatagatctgaaaaaacccagaaaccagtgagattcaagttaaactataacgagaatggaattgaaacactgagaaatatttgcatacctggtccttgaaaccacgggagagcatttcatcagcttcatcgagaacaaacatcttgatgttgtcagcacgaagagactgcctcttcaacatgtcaaagacacgccctggagttccaacaacaacatggacaccagcttggaggatgcgctgatcctcacggacactggttccaccaacacaggcgtgaaccttgacaccaaggtaatcaccaagggccctcatgaccttctcaatttgctgagcaagctctctagttggagctagaaccaaagcctgacactggataagggagaagtccagctgctgcaagacaccagagcagaaagttgctgttttcccagtaccagactgagcctgttgaatcacatcaagacccttacagaaggggacgattcctctttgctgaatagcagaaggcttctcaaaacctaagaaaaaacagaagcacgcatgagataatgttctaatctaagacataaatcacaaaagatagctttttcaagttcctacacacataccataagcataaatacccctgagaaggttctcttgaagacccatggcatcaaagctctcatgaacatcatcataggatgtgaagaactcatcttgtccctcaagtctgtatcaatacagtacaattagcagctagagcatgcggagagaacacactcaagaatgaaaaaacagaagtaaaaagactcacacttcattgagtttctggtcaaactgacgtgcatcaaactgtgtgccttctggtgcagatcctgccatgctacataaaaagaacaaaaacaatcagatttcatatcaaaaggaagagagacaacacctattttgatatcgttaataatatgattgcaaaggaggaaatgtgacaagaaagccaaactcgaagtccataaagagaggaaaacaagcattaatatctgcctcagatgatgtgcggagaaaatgtataaaggcacatatggttatctattaaacatagacaccactcaacctatttctccaaattacaaaaaaaaacattcaatcagacaaaaccaagtgagtgttaagacaagaacatctgagctttgaagacgattcatttcattctattgagagactaacctagccgtaacaaaatctacaaacccatcaacaaatctacagatgtgtagatcctaaatttaataatcgtcatcatcagcagctcagaatctaataaagagaacaaaaacgaaagcacttccacagcaaaaaaaacgatcttgaagtaacgaaaaatcaaaacttccaaatcaactcaacaaagttgaaaccaaatctatcggaaaacacaaaaaaacaaatcagaacaatccaaaagtaaagaaacaatcatgaatcgtaaaagttacatcgagataatagatagacaatccgataggatgcgaacctggagcaaagttggtaagcgagagtaaagggcttttttcagggagcttgaatctcccaaactcggatctgaaccgcgttgagagagagagagcaaagagaagagcgaagattgcgagagactggtggaatatccgaaagaggctgagagaaaacgcgttaccttgtttatatactccgtctttagggttttctcctttggaaatcttctccttttctttttcggatttccggttttacccctttattccctttctttttactcttttggctcggacaaggttttccaacacttagctcattgtcttaacttgattttggcaaaaataaataaacaaatatctagtgggaaattaggaacataaattcttcatttattttgtgactagcaaagaaaatattcttcatttattttattttcttttccaaagctttctttctcctgcaacttttattgctttttgacgttacaaagcattttcccgattacaacgaggatattagaagaataaagtgactgataagaacgttttatctgaaaatgtctttacttattaacacatctatctctctatgttgaatgtttaatcatgtaattgttccacaagtgatatgaagaatccttgaaacgaagcaaaacacattgagtaagaagaaggtaactagctagtatgaagaagcagcaagttgctatctatcttcaacaaaaaatgctttgattttagcctcaagagactttcttagaatctgttgccattgaagaaaaagctggagagggcaaaacataatcatgatgcttaggataagcaaaaaatatgtatttagcttgtgtaggtagaggaagagctaggagttttttgtgtgacaggaatcgagggaaaacgatgggccaaagattaggcccattaataagtttgactaatccctgccgttcattagatgcctacgtaatcactaacgcacctgatgatctctgtcttttggtgagacgcaaaagctcagagaataataatagggcccaatataataaagtacaaaccgaaatttgtgaagcttaattagtcggtttaaatacttttatatcggttatggtagaattggtgttggtacgatacaatctggtacatgtaaggcagcattttgccatttctgaaaaacctaaacacaaaactatcttcatcatcatcatcaaatcccagctttcttccaagtgatccttcactctctatactgcgatttaccgttcttctgactcttggtgagttctagatcgaatcctatcttccatccacatatttactgtttcaaaattggattgagtacaagtcaaattcatcgatctcgatctctgatatagttgccgagggaaaaaggagaaaccccctaacaaacattcccaccattttttttgttatttgcagttgcgaattcggatcggctgacgcagctccgattgcacaaca

SEQ ID NO: 1974 - DNA, 3000 bp, Unknown
  misc_feature (1)..( 3000): cDNA_ID_2148231_gDNA_ID_1620474_Annot_ID_158108 3000 nt of promoter + ATG
agcaaaccgcgaaagtggtgcaagctaacataaaatattttgcatccaagaaaatagtcataattttaccttgatatctcgcaatctgtacaatctgttgcggacaaatacagggtaagcctcagttgctgcttcagtttcctgttgcagaagccagtaaatatcttcaagaaaactccaatcccccttttcaatgatcttttctaagggataagcttcatttgcagtcgttgcagcggtattgtaaggaggaatgttgcgtgcaacagtagaactggtgccttcaagagcagctgtgttaacacctaactcacttagtttcccatcaaggaccttctgagtcgcagcatcatctcccatatataaggcacgcttcttcttatcctgcatagagacacacattctcactcagacatataatcctcccaacgaatctcacgacaatcagttctctactagtctggataccaataagacagatactgtaggaaacagtagaattggtgttttcagatgctgtagtaacatacccgagtaacagctttttttgtattataacgatcgcgttctcctgtttttagttcttcaagttctttgacgacagcacttcctgaagcttcttcctcatttgtttcttgagctttaactctaggctccaatctgattatctacaagtaacacaaaaccaaactcaaactctcaaaaatcatttcttttctattcacaaccatacactcaaaacattccaactaattcaaaccaattaatcaccaaaatcaaaacaaggtaacagaatttaaaccttattgtgagcaacaggaagaatcctcaaagttttagcctctctattaaaaacaccaactctataagtattcgtctgcatagcagcttgctcgcctgtgtaattagttccgacgaactcaactcttgcgcctggaggacttacaacaacctgaatcctcttcttagaatcatccttatgcttgtaaacagtaaccttgggagtttcatgaactctcttgcctgtttttggatctactttacaaggatcgtatcctgtagagaaataggcgacgatcggagagattctatcgggtctctcggcgacttgcgtgactttgagagtaactctcttgtcttcttcgttttcatcctctgtttccgttgctatttttttccctttcctttgcttcttttgtagttgttgtggtgtattgaaatcttcttcctcgtttctataatcattcttctcttcgccttccatggctactgaggtttggattcttttagtctatcgaagaagcggcagcgattcagagaagggtttactggaaactcactaaatgcttaaaccctaatttggttatgtttcgggaatttattacataacagacccttgttgtttgtccgagtcgataaagaaatcttcacagtttttttttttgaccccaaacttttaatttgtttagaaagatctacaccgttataacgacgtctacggactacggaatctaaaccctggctttttctcttagctaaaacgacacgtagttcgcctgaaacttagaaaacaaacacacgctgtttgcaaagatcccaatttacattgatctacctccaaagtatctaaactcttctttaaagctttggccacataaccttcttttaagttttttttaactatggattctattatcttctaattttttcatcatttctagaccaagtttctatgctggaacaaatgtaaaattttgatccaagtacaccaaattcttagttcgtttttaatatagatatttcaggttaagtgtatattggactgatatcatcacaactagttttcacttttgacagtggactactatcggatcggttattctttgattagggttctttaacacgttctctctctttttttcgagtccaaaataaagtcttgtcgtccaactagctagcgtaggatttggtgaacttggatacatatatttttattcgtcgtcaaacttacctagcaacaaaacaagtaatgctgtactattttattttattttgataatcacctgatcaccttacccagatacatatttaagctgacgtatcaaatatttgtgtaatattatatgagtaacatttgcaggtatgtatatctaataaaaaatttaagaaaagagtaaatcgtggtgtgtgatgttgatgtacgaccacagttttcttatgccacttacaacttttgtaatagttgaacataaaagagctagcgttgtggatagatagatgaaaattaatctatacaatcgattaattaacattgccaatattcaaccactagatcatgactctgttacttgttagtagcttaatttatcattatgttgaagattttatatgtactaatgtcactgttcactgttgcgcaattaattaatgttctagtttttttctccgcaattaactaatgttcaacttcaacttaattttggtttgttgaatggtatgcaacgactgttctttatccgctatatatctttatctttttataccacaagtcgtataagtcattagatacaatgacaagatgacaaatgtagtactatgaaagaaaagacacgttgaaagaagagtgacacaaatgagagatatgatctcccagagtcaaatttgaggtcttgcgattctcctataaacctcaaaaactctatttagttagaaatatataaaaaataacgacgacgcttcttccctaatgtcgctatcgttgactgacttgatcagaatcatatagttctcaaagagtaggtttttaattcccgtacgtgatcaacaaacaaatggtttcaaattagacttttgctgatcaaaccagaaatttctatctccctttccttttttaaaaagactcgttcttttttttcctttataatctcgacaaagagagaagttacatatataaattttaagaattataactcttttgtaaagcattcatcgcttcaaatc

SEQ ID NO: 1975 - DNA, 3000 bp, Unknown
  misc_feature (1)..( 3000): cDNA_ID_3593911_gDNA_ID_1620474_Annot_ID_158115 3000 nt of promoter + ATG
attgaaactctttagtgagtgatagagatgctgacatgcatagcttgtacgaagcagctaaacaccaacaatggtggatctaagaaacaagaagaggatgaagaagaagaagacagagttattgaaacacccaggtctaagcagattaagtccctgacgtcacaggtagagataaacattcttcctctgtgtcactttcacgaaaaaaaaacacaaatgagaaaaggaccattttttgctcttgttggtttctgtttggaagctaagaacaaatcaatttaagtccgtgactttcagaatgtttttcactgtgtatttaattttgtgaataacatgtgattcttgtatgtgaatcttcagattaaagacatggcagtaaaagcatcaggtgcttacaaaagctgcaaaccgtgttctgggtcgtctaatcagaataagaaccgaagctacgctgattcggatgttgcttcgaattctgggaggtttcgttatgcgtacaagagagcggggagtggaagctcaacaccgaagattttggggaaggaaatggagtcaaggttgaaaggttttttgagtggagaaggaacacctgaatccatgagtggtaggacagagtctacagtgttcatggaggaagaagatgagctcaaggaatgggttgctcaagtggagcctggtgtcctcatcacatttgtatcattgcctgagggagggaatgatatgaagcggattcggttcaggtaatttttaactgttttgtaggatttacactaagtaaaagtttggatattggacttaatcaagatggtacaatatgtttccaatcaggaatattgaagatgatactcaaatgaactaatccatactgttttgaaattgtttaatttgattttggaagtagagatgtgtggttcttggagacaagcaatgtgagagtacagttgatatttaggatattattatgtgagatttctgtgttggaaactgttgctgctttcatttttcttgaatcgattgaagtggtcccaaaccatttcttataattatgagaacttgtacatcctttttgccaagaaaggtctttgagatgtgggttatatttcggtagttgaatccgatggagaacttaaatgaattccccaaggacaattgtgtggggaagtgtttgtgaatttcgtaaagttctttttgtatgtggaacatataatgagagcaagatgatctaactaactttcttcatggcaagaggaacacttcagctccctaggattgatatttctagattctagttttgacaatttactgcagatcccttgagttttgtgaacctaagactgttaacctggtagctctttggttctgtattgtatatggttaagtcagctcctaatttgttgatttcttcaaatttgtattacttgcagccgtgaaatgttcgataaatggcaagctcaaaagtggtgggcggagaatttcgacaaggtcatggaattatacaatgtacagcagttcaatcagcagagcgtcccacttccaactcctcctagatctgaagatggggtatatgcaccctcttcacttctgaacacatgaatctactcatcaaaacctgtctttgatactttgaggtctaactagttttaatttggtataccagagctcgcgaattcagtctaccaagaatggtcctgcaactccacctctgaacaaagaatgctctcgaggaaaaggctacgcttcttctggctcactcgctcaccaaccaacaacccaaacacaaagtcgacaccatgattcatctggtcttgctacaacaccaaaactctctagcataagtgggacaaaaaccgagacatcatctgttgatgagtctgcaagaagtagcttctcaagggaagaagaagaagcagatcattcaggggaggagctatctgtaagtaatgcaagtgacattgaaacagaatgggtggaacaggacgaagcaggtgtttacatcacaatcagagctttaccagatgggactcgcgagcttaggcgtgttcgcttcaggtaaagatacattactttctctgttccttagtaaaaccctttcaaaagcaagcactttaacaacattgtctttgtggttgtagccgagagaagtttggggaaacgaatgcaagattgtggtgggagcagaacagagctcggatacaacaacaatacttgtgatgaccgatgacggtcgaaggctctctagagaagaatctgacacacaccaaaacaaaacacttttcttttatatgttttacttggaaaaaagctacagagtgatggaaataacttgggattcagataatgaatgtgctttttagttggtggttgttagtacatctctttctcttctttctcatctacatctatctataaagaggaggtattagttttactggattttcttggtgttattttcttaaggtaatgtactgtatatagtttaatactaagaaaattcatattattggatttgaaaattacactttgtgcactttattactttttctctaattatattgaccatgattggtgctaataattatggcatgtacttaaatgttctgaataagaaatgtataaagtaaaaaccagttaaattgccagctaacttgtatctccttagaaatttccatttctcacttctcctttgactaatctttctattgagttatattaagggtaaaatagtcaattaggtttatccaattagtgaatttggaaccaattttttcgacgcgtgagaataaatcctaacttcttttttttttttgttctcttaaagccgttccctcttctctgtactcgaaaccctagtagttgctctatccgattttagggtttaagagtcgaatcattagcatctaccttgattacgctgatctcacttggtttcgctactcgatccttgaatttctttgttttttgtgtgtttcggtttattcgatacgtctttgatccgtaatg

SEQ ID NO: 1976 - DNA, 3000 bp, Unknown
  misc_feature (1)..( 3000): cDNA_ID_3065414_gDNA_ID_1620474_Annot_ID_158117 3000 nt of promoter + ATG
agagcaaaaaatggtccttttctcatttgtgtttttttttcgtgaaagtgacacagaggaagaatgtttatctctacctgtgacgtcagggacttaatctgcttagacctgggtgtttcaataactctgtcttcttcttcttcatcctcttcttgtttcttagatccaccattgttggtgtttagctgcttcgtacaagctatgcatgtcagcatctctatcactcactaaagagtttcaatttcgacctgagaatttagaagaatgaaacccaagtcacttcctccaccaaaaataatcaaatctaagaaatgagaacccaaaaaggctcataatttgtacctttttttgcaacagtagttacgcacttcaacttctaccttccaatatataaactcaacactcactaaagtcgattgcttttctctcaaccacagagattcagatgtaaaaccccaccggtgaaatgacggcgaagggaaggaggagaccgttgcggcaggggaaaattagggtaccaggatctgtagatcagacctagaaacgacttcgcattaaagactcttctttttttttaaactctctgggtcggtttacttgtggcttgaaagctcttatcagagagattgagtgagatacactcttaaatctcaacactttatgaaatccaaagccgaatgcagaagcaaaatgcaaaaaagctacgaatttttggggagagatagagagagagaagagctttgatatttgggctttgagatcgtcggacactgtgaaagtttgcgcacaagtgtggtgttgtgttcctcctccttcctaattcctatattaaacaaaaaagctctactcttttctttttcttcagagaaaaaaaaacagtaatggctattttcagattcgtctttaagtttgatacttatggattattatgaccaaaaccaaaaaaaaacaaaaacgtaacacagtttttactaacatagattaaccaattgaatagttctacagctttattgctattttttaatatccgcattttgtcaacttttgatttattatttatattaaattacttagttttgaatcgtcttgtatttcatttgctaacataactagtagtatattcttcaattttactgctttgagagtgaagaaatcggaccaagaaaatttcaaatgttattctcttctttatttcctagttttttttctttattctcttttcccttttcttgcttttttttaaaaaaaagaacaaataaaactattttcatagaaataatgaagccgtgcaaaatatccatggtgtggccacatattgacacgtgcatttttaaatgattttggctgtctaattttgcacccaaataaaggaaaagaaaaaggaaaccaaataactaatccattttgttatctgtcaattttctcaataacgagtatttcataatttaagacagtgactctgggaaatgtgacagaatgttactagttggtaattactcctaatttattcaaacatttagaggcaactagtcgtttaaattattttaaatcaactgcattcaaatatgaatgcaaaaacctaaaaaggaatatttacgagtctatataatgtcagatttggtcacaggagcgccgtgaagcaacgggcgagaattaactacactctgtggagtttcttaccatacactattttacaattcgtagttaatgtttttagttttttttttggcttgctttctctatttttttcactaatacagctgaaacatttttttaaattaggacaaaagaaaacagtttttatagcaatgaatgatcagatccgatactgcaaaatataaattaatttaatttttaccataccacgtgaatgatctgtgttttcttgtttgatattgttctttctctttccattttaatgttagctcgtatcttatagctataactatgacctatccgttacaaataatactttatgatgatctctctttcaccccatgttaaattgaacataatactcgtatagtcttaagatttctgtcttatctttttcaagtgtatgttccaaccaggtatcgtggtctggtggtaaaggaacctcgactgagacgtccgacacccggattcgatttctggtcaccagagaattaacatgcggatttgctctagcgcctcagaccaccagttccagggagccattaagtagatgtttaaaaattcctggtcgcgggcttaaacccagtggactagtcagatcactgtgtggtctggacactaagttgtcaaaaaaaaaaaaaaaaagtgtatgttccattgctaattagagaggtacaactttgaaaagtgtaatgtttcatacatgtaactcttatactttttattggccacaccagtttttttgtatttcatcattttaataatatttcagaattctccaactaatccatgtttaagtaattttggagtatttttctagtgatgcttttctgattatatatttaatttgatcaattatgatcattagtatttatgcctagctttatggtgacaaatagcatattgcaccttagaaactgaaaaaaggtataaagtgattttatcaaaaataaaaacaagtgatgatgagacatgcaaatgaagcatgtaatatttagattcaagcttgttattattaaataatcatttaaactttatagagttgtttttccaactaagcctattaatgctttttcccccaaccttttctgtctccttcaaggcttaagcactttcattataacccattttgaaagtcaagttaacattatccccatcattaagcaaaccatacccttttaaaagttcatttcgaatttgaagtatcctttgcttcaggttacttgcttttacaaaaactctttattcttgctgatttctttccacaaatgaaataaaggtaaattacaatcgaaggcttgatcctttatgttttatgtgtgttaaaagatttagaagttctta

SEQ ID NO: 1977 - DNA, 3000 bp, Unknown
  misc_feature (1)..( 3000): cDNA_ID_3000125_gDNA_ID_1620474_Annot_ID_158121 3000 nt of promoter + ATG
tcctttggttattctccggcgaaatttgtgaattcatttagacgagatcaccaaagccctatctctgtgcttcatggtccggtctcgtgtagttgtagccctccgatgagaatgtctcgtgatcggaatctagatggttcgtttcgtttaggagctagtggattgttcaatggtttcgttaggaaagctcttggatcatgtgttgattacgagttcggatcggattctgttctcgttgatgagctaacgtttcctatggaggttgatacgataaagccatatgctagggatttgctaagacgtgcacaattgagacacaagattttcaatgatgaatctgtgatcaaagctttttatgaagcagagaaagctcatagaggacaagtaagtaggaaaagatacaattctcaatcactagttttagattcttgtttggttttagtgtgactcaacttttcgtttcatgtgtgttttatcagatgagagctagtcgtgatccttaccttcagcattgtgttgagactgctatgttgttggctaatatcggagctaactcaactgttgttgttgctggccttcttcatgataccattgacgattctttcatgagctatgattatattctcagaaacttcggagcaggagttgctgatttggttgaaggggtaagaaatatgtactctcattgattaacttatgtcggagctatttgtttggttgcttggtcacttgtaaaggcagagtttttcagcattcattgacctttgtcttccatgtgtatgtttgttttgtataggtttcgaagcttagccaattgagcaaactcgctagagagaacaatacggcgtgtaaaactgttgaagcagatcgtttgcacacaatgtttcttgcaatggcagatgcaagagctgttcttataaaactggctgatcgattacacaacatgaagacgctttacgctttgtccccagtgaagcagcagaggtttgctaaagagacgttggaaatatttgcacctttggctaatcgtttgggaatctctacctggaaagttcagcttgaaaatctttgtttcaaacatctttacccaaaccagcataatgagatgtcaaccatgctcgaggattcattcgatgaagccatgattacttctgcaatagagaaattggagcaagctcttaagaaagcaggcatttcttatcatgttctttgtggccggcacaagagcttgtatagtatttacagcaagatgttaaagtaagttatatttcctcccttttacagaacaaaagatgtgagtgaaactagaagactaatgttgttgtctattcgattgtaccaggaaaaagctaacagtggatgaaattcatgacattcatgggttacgtttgattgttgacaacgaaggagattgttacaaggccttaggagtagttcatagtttatggtctgaagttcctggaaagctgaaggattacataactcatcccaaattcaacgggtaagttcatatctccatatctcatagtttaagttgtggttggttgtggcttgttaaaaggtaatgaatctgactttggtaatttggattttaggtatcaatctttgcacacggtagtgatggacaatggaacagttccacttgaagtccaaatacgtacacaggagatgcatttgcaagcagaatttgggtttgcagctcattggagatacaaggaaggtggctgcaaatactcttcgtttgtgcttcagatggttgaatgggctcggtgggtcgtaacctggcattgcgaagcaatgagcaaagaccgatcttccataagttcttcagattccatcaaacccccttgcaagtttccgtctcactctgaggactgcccagcttcttacaagcctaacagtagccaggatggaccagtctatgtcattgtaatcgaaaatgataaggtttgttataaacctatcttgtcgagtacaaaagagttgtacacttgattgttatactgaacaaatcggaatatgcagatgtctgtgcaagaatttccagcgagttcaacagtctcggatctgctgagccgggcggggccagggagctcgaggtggtccatgtatggcataccagcaaaggaagaactaaggccaagactgaaccaaatacctgtaagtgacctcaagtggaagctgaagatgggtgatgtggtggagctgactccaacaattcctgatgagtctctgactgaatacagagaagagattcaacgcatgtatgatcgaggactcgcgttttcccgccccggaaccatggtcggatggggaagctgatgggtcctcaaattgttaactagtccatgtatcatgtatgtatgtatatatatagtccccatatgattaatttgttgtacataacaatggctccgttggttcaatgtaagcttaataaaaagaaagcaaaaagttagtattagactatataaatttgtcaaaaaaaataaacgttatttcattaagagttctaaaattttattgagacactgacacagtgtgaaaatgttttgaagtatcaaaccttgtcttgatgaggccggttctttttcgccttctatttacccaaaactattgagacttaaacttcaaactagtagaataaagaggcagatttctctcatcaatgtattaatttgtagttgaattattcaccataccttatctttaatatatgattttggtcaaaaatctataaatatatcttgagtgatgccaaaaaaaagggatcggcctccatgaattggtcattcttctgccttgagcacaatcctcggaattatttttagctaatgcaagagtttgtggttttctatctccctttgctcctctataaaacggactttcgaatcatcagaacaaaacatcaataaacacaaaaacaaaagaagaagagaataaacaaaagaagaaaaaaaaagtattaaaacaaaatcaataaaaagagaataaaaaatg

SEQ ID NO: 1978 - DNA, 3000 bp, Unknown
  misc_feature (1)..( 3000): cDNA_ID_2105586_gDNA_ID_1620474_Annot_ID_158122 3000 nt of promoter + ATG
gggttttacgaatttgacaaaattctttgggttcccaattgtttttgtaaaaacactaaaaagagtgatataaatcattgggttttataaacccaaaatacttagttttcagcccagtccaggagctagagtaatgggctaatgaataagcttactcaaactaagccagagtaatatacacgagcgtgttattttctcggttaagagaaaaccggaacgaggatgcgtgtgtaaggaggctagttgcgtgaaggcaaacgcaacaattccacgtggttaaagacttaaagtcatagctgacataatcctcataatacgtttgcttcttacgcaaatcacattacccaattatttagggaccacatcttcttgtcataaaccgaaactaaccgatctgattccactaaatatctccaagtctgcatataaatccaatattctctaaccaactaaaattgaattatatgaatcttcttccgccgtcgacatacaaaaacgaaaatatcatattaatacactaacacacgtgacgcacgtgatacagaatgtatcagactttgaccagctgactatcaacaaccgtagaagtagatttacggctgtaactgagttcaagccgaagaagactcaaccgtagccgtttgatgtttaaaaagacaccgtgatccccacaagtcatggagttgatgctagggtatggacacgtgatatgagcgtgacacccattttttttctaatggccgccaaattagacgcgtgtcaagttcaattcttctttctaaagtttttctccggaacgcgtcggtgtgtccttatcaacactcccttcctatcttctagactatcgggcatattaacttacaatatatttgaagggttttatgaatccaacatcaatgcatcaaaatgtcactgttgcccttgccttgatatcattaaccatccatctttttttttcctcaataaaccaatcatgtttgactgtgttagttccatttgaaggaattgatttcactatacatgtagttttctttttttctgttgaataatctagtaatcaaccgagtctcaaattgcatatcgattccatgctatttataaatagatttatatttacctttgtagatataaactttatcaccctttattagtatcatcaagctaatactatttgagtagacggcttcgaagagttattaaccaagccagcaatgtgggttcgattcagattcctcttattgatgcaaaaaataaccaatgacgagacctcgcgaaataaacgaaataaaacgatagaaagtaaaaacgaaaagtagtagacaaacataaatctcatggtggaccctttttgtacaatttgctgatattttgttcatgtttaaagtaacaaattccatttgccaaaaagtaaaacaactatgttaaatagtaataaagagattgtttttttggtaaacagtcgccataatccatattgagactagttaaaagtggatcaagtgattcaagttgacgctgatacagatggcatgactcagctgccgttgacactgtgctataagcctatcttcattttaaaaaaaaaaaaaaatcccaagtggataatgaagatactaaaataaatctgattaattcaataacttacaaaaataaaaatggcggtgtcatcatgcattggcgtgaagctagagaaagcatatgtgaataatagtgattacgaatatcttatttgaaacaggaataaaattatagaaagttgtcgttgagttttatatgtattcgtttggttaaagaatgatatgcttattggagtactcattagtgtgaaattctattataaaacctaaacattcaattcatatagaaaacctacatgctaaatatttagatttatcagagtcttattaggatttgagttttactaagttttcaaaatttacatacaaaaatattcgaagaagaaatattagatctaagtatgagacttgtagtttatcacacaagttaggttaaagtacaattaacttaaaatgtctttaatcagcacacaaaagccatttagtgactagtactccataaactatgcttttaaatattttatagccaaattggagttgagatatcgatgtcatctgataggatatattcttaatcattttagtgtgtcatcatttttttaatgacacaagtctctttaatcacacaacgaattagctttgattattcttttagcattaatctatatgtgttttgagtttggaggacaagttgatttaaccacaaatttagatataatatcacggaagatttcataaatcttggctcgtggataaagcattagaaaaattagattatatattctatacccaatacaaagattttaataattatttacgaacagcaatggataacgacataacaagattagactgtaataaacccacttaactcagtaattaattaccgattacgtaaaagggtatttcggtaatagtagtattgatcggtttagttttggtcggccgaacttaaacagacgaataagaacagaggaaaaagagagagagtagtagtttctaatttcgaagagaaaaatcaaagattaattttcgtccttaaagcaaagcgtctaactttcttcttctccttcttcctcctcacacaccctcttgtctccattagactcgtttctacgatttttccccttcttcaatttctttccaaactcgtataaattgtacatactttaggctttgttctgttcttcctctgtattaaagttccttgtacaactcaaaatccatctgggtttcgtgttagaatttgtgggttttgtgttaatctgtttgtttcaatagaaaaacggtgactttaaattcccgggaaatttgacgatttttgggagctaattctgggaattggataattttaattctttgatttctgagagagaaaaaactgaactttaggattataaagcagaaccaacgagctccaatg

SEQ ID NO: 1979 - DNA, 3000 bp, Unknown
  misc_feature (1)..( 3000): cDNA_ID_3065410_gDNA_ID_1620474_Annot_ID_158118 3000 nt of promoter + ATG
gtgtgtgtttttactaattatgggtcgttgggtctgatcaggaattcaaactcaatccaaaggctaagagtttcaaaccattgcagtcagctgctgcaccacctcaatctccaatcgcagatgcctcattctactaccctggtcctagtcatgttcctgttcagcagatgcctggaatgccgcctgttaattacggagtaagttccgtttgttatatattatataaacccaaccgagttatgttttcaaaactcaccatgtgaaaattggcagctcccgccatatcctggcaaccaaccacagatgatgtatcatcctcaagcctattatcatccaaatggacaacctcaggtttgacagtaacacacaagccctattgaattactattcccacacacatacacaaaaaaaaaaaaaaaacatcaaaagtctaatggtgattggaattggaattgtgatgtagtacccacagcagcaaatgatacctggtcagcagcagcagcaaatgatacctggtcagcagcatcctaggccagtttattacatgcatcctcctccttacccgcaggttattatttttgctaatagtagattccctctttttgttctttttttatttttcttttacatagtcgaagagttaaaacttttggatgctgaaatctcatctctgtatgtgtgtgttttgcaggacatgccatatcataataaaggacgagagtaataactactactacccgatggtgatgatgttttttttttttgtgaaggaagtgtacgaacccctctctggttttatccactctcccttacccaatcactgaaaccattttcttctcttttttagattcgcctactgattttggtatttcgtgttgaaaacaaaaagaaagaaaaaaagaaagaaaaaaaacgatctatctgaagtctgtagtactgagtgcactctctccttttttttggctgtatcagagatataaaatttagagtgtaggttgctctcatgcgtcttttacttcgtcgtctgcatatttttttgtgtgtgttgtgctaaatttctgggtgattttgttatctaaaatccaaaaaggatgcggtttagatgaaaagaatagaagagtaacaacgatttcaaagcaggcagaactagtcatttttggtgttgttgtagggcatgcttttttcaataagtcgttaaacgttactataagtagttgtctcgcgattattatcatgatgatcgatatgactcggtgtatatgatttggtgggcaacacattcatgttttaagattccacaagaaaaaaataaaatggaatcaaacctagttttaccagtcgcatatattattaggttaggtgactgcattgagttgtttattttttacttttttacgagtctctctcaacatttattgtttttgctttaaagtggagattttaaccgtggcttgagcttgacacttacgaatgatgttgggtcaccaatcttcatctagaatttaccttataatcacttagttcaattgcgaatcatgttttcgatgtattttcaacaacttttcacgaaaccaactaacatattttacggtcatccgctatgatagaaaaaccgatgaatttgctaagtttgtttctttcttttcagtatggataccgaaatgagacaagaaaacaacgaatattcaactacaataccttacttgtaattgtaatgctctttaagaatctatcaaaactcatcgttatgcaattactgatttatttcatgcgagaaaaaccaaaagtccggtcaaacaaaaaggcaagtgtgtccttatgttgtgacgacgtggtttcatcatccaaacaccggacgtgaatatcacgcgcgcgtggatttcggaacagcgatgtggcggctgtgaatacaaagatatcaagcaaggtacacagaatgtgtgtctctgtttgtttctttaatgggacattttcacttcatcagaatctgatctcaccgtaagcctttatacatagttgtacccactttttctgttttaatcttaaagtttactattttttctagttgataaaatggagtactcattatttgttactagtagtaattaataaggacagaaaaaaaaaaaggaagaagacaagagtggttcacaatcataatgtaaacaacgaataataataattaatgtccaggtaaaaaggtagtgttcatggtgaattagtggtggcaaaaaagttggtactactgggagaaaaaaaaaaaaaggttaggtgaagctttttagccatagccaataatactactcaattttgcagagacagtgaaatgctgaaattgataaagagagaaaaaaagaagaagaaagaagccatgttttgaggaaggagacatgcatcatctcatccttttatgatttttttctacatcttcaccaaatccatagattctctctccctctgattttttggtaaatttggtcgctatatttgactacttgtactctgctttgagaagaaaaataaaaccatttttgggtgataggtgagaaaaaaatctaaatactttttttgtttcttcttttttagttatgttctgttttctcgcttgttgtttggatcaatactgttccaaggttggttttattttcccttctcaagttagtggaattgcatgtttgtgctttctctgttttttttatatctaatttgtaatcaaatccgttaattctcaaagtctgaatctttactttctattttagtatggtaataattggatctgctctatggtttctttctcttagatctgttgtttgttgctttttctttgtggatcaagaatggtttttgattccttccaagtgaataatgcaatatcaatatatcatgactggtttttttacttgattggaattacaggtgactgaataaacatctcttgtctcttgatggatctactatggtctggagattagttcgtttattgaactaatgttttagaca

SEQ ID NO: 1980 - DNA, 3000 bp, Unknown
  misc_feature (1)..( 3000): cDNA_ID_2148250_gDNA_ID_1620474_Annot_ID_158116 3000 nt of promoter + ATG
gctagctacacgaaacagatcgttgtgtagagtaccaatcacctacgggcaagtgcatggtacaactatatttgggccttaatgggctcaacatgggctataaactgagtttgagaaactttataggcctcaacttttgaatgtcaagcttttatgttttctttttctgtcttttctttcttttctttgatcgatcattttaccttagccattaagaacttctaaatcttttaacacacataaaacataaaggatcaagccttcgattgtaatttacctttatttcatttgtggaaagaaatcagcaagaataaagagtttttgtaaaagcaagtaacctgaagcaaaggatacttcaaattcgaaatgaacttttaaaagggtatggtttgcttaatgatggggataatgttaacttgactttcaaaatgggttataatgaaagtgcttaagccttgaaggagacagaaaaggttgggggaaaaagcattaataggcttagttggaaaaacaactctataaagtttaaatgattatttaataataacaagcttgaatctaaatattacatgcttcatttgcatgtctcatcatcacttgtttttatttttgataaaatcactttataccttttttcagtttctaaggtgcaatatgctatttgtcaccataaagctaggcataaatactaatgatcataattgatcaaattaaatatataatcagaaaagcatcactagaaaaatactccaaaattacttaaacatggattagttggagaattctgaaatattattaaaatgatgaaatacaaaaaaactggtgtggccaataaaaagtataagagttacatgtatgaaacattacacttttcaaagttgtacctctctaattagcaatggaacatacactttttttttttttttttgacaacttagtgtccagaccacacagtgatctgactagtccactgggtttaagcccgcgaccaggaatttttaaacatctacttaatggctccctggaactggtggtctgaggcgctagagcaaatccgcatgttaattctctggtgaccagaaatcgaatccgggtgtcggacgtctcagtcgaggttcctttaccaccagaccacgatacctggttggaacatacacttgaaaaagataagacagaaatcttaagactatacgagtattatgttcaatttaacatggggtgaaagagagatcatcataaagtattatttgtaacggataggtcatagttatagctataagatacgagctaacattaaaatggaaagagaaagaacaatatcaaacaagaaaacacagatcattcacgtggtatggtaaaaattaaattaatttatattttgcagtatcggatctgatcattcattgctataaaaactgttttcttttgtcctaatttaaaaaaatgtttcagctgtattagtgaaaaaaatagagaaagcaagccaaaaaaaaaactaaaaacattaactacgaattgtaaaatagtgtatggtaagaaactccacagagtgtagttaattctcgcccgttgcttcacggcgctcctgtgaccaaatctgacattatatagactcgtaaatattcctttttaggtttttgcattcatatttgaatgcagttgatttaaaataatttaaacgactagttgcctctaaatgtttgaataaattaggagtaattaccaactagtaacattctgtcacatttcccagagtcactgtcttaaattatgaaatactcgttattgagaaaattgacagataacaaaatggattagttatttggtttcctttttcttttcctttatttgggtgcaaaattagacagccaaaatcatttaaaaatgcacgtgtcaatatgtggccacaccatggatattttgcacggcttcattatttctatgaaaatagttttatttgttcttttttttaaaaaaaagcaagaaaagggaaaagagaataaagaaaaaaaactaggaaataaagaagagaataacatttgaaattttcttggtccgatttcttcactctcaaagcagtaaaattgaagaatatactactagttatgttagcaaatgaaatacaagacgattcaaaactaagtaatttaatataaataataaatcaaaagttgacaaaatgcggatattaaaaaatagcaataaagctgtagaactattcaattggttaatctatgttagtaaaaactgtgttacgtttttgtttttttttggttttggtcataataatccataagtatcaaacttaaagacgaatctgaaaatagccattactgtttttttttctctgaagaaaaagaaaagagtagagcttttttgtttaatataggaattaggaaggaggaggaacacaacaccacacttgtgcgcaaactttcacagtgtccgacgatctcaaagcccaaatatcaaagctcttctctctctctatctctccccaaaaattcgtagcttttttgcattttgcttctgcattcggctttggatttcataaagtgttgagatttaagagtgtatctcactcaatctctctgataagagctttcaagccacaagtaaaccgacccagagagtttaaaaaaaaagaagagtctttaatgcgaagtcgtttctaggtctgatctacagatcctggtaccctaattttcccctgccgcaacggtctcctccttcccttcgccgtcatttcaccggtggggttttacatctgaatctctgtggttgagagaaaagcaatcgactttagtgagtgttgagtttatatattggaaggtagaagttgaagtgcgtaactactgttgcaaaaaaaggtacaaattatgagcctttttgggttctcatttcttagatttgattatttttggtggaggaagtgacttgggtttcattcttctaaattctcaggtcgaaattgaaactctttagtgagtgatagagatg

SEQ ID NO: 1981 - DNA, 3000 bp, Unknown
  misc_feature (1)..( 3000): cDNA_ID_2148235_gDNA_ID_1620474_Annot_ID_158109 3000 nt of promoter + ATG
tttttttttttgccaatagttattcttaccatgatcttagtccaaatcgctcgtataacacagtaataaataaatacaaaaaaaaagaacaaagaaaacaaactagaatgcggtgcacactagaatgaaacattacaaaaaacgattgtgagcatctcgttaatgggagagattaatatatccggaacaaagcaataaatattttctcaaaaaaaagaagatataatcatctcaaaaaaaaaacaagataattcttttgacgtagaatatatagtaaataaaaaaacgtggaatatagcaatgtttcatatatatattcgtaaatcgttgatttttatgtgattggatggatgatgaagcaaaagtattatattcccttatataaaacgaagaatatcgtaaagaaccctcgaggcctaaaagatggttagggtatagactataggctatagtattaacatgtcaattgtaaatgtcatgaaactgaaaaaagaaatagggaaaagtgagtcaaagggagaaaaggaggtaggtctcttgccctataatatctgcatttacccacccatcatctcctataatataacccatttataactctccattttcttctttttttggtaaaagtttgaattaactcttcattttcattttaattaattcgctaaaaacataataaaaacaagaagagaatagatgatgatgatacagatgagtgactaaaatggaaatttatgcactaaaatggaaatatcccttggtccaaaggtctttccaccttcttcttcatagcttaatcaccatgattatgatcatatatatctttgaccaaccaacaagagtggagctctaactaatatgtgtaggtaccatcttacatatctccatatacgcatgcatatcattttcgaaccaatttagaaggtgatgtatataatcaaaagtatttaggatgatggtttatcgcgtgaacaccattttgtttaagtacgtggtcatcgcaaggtaaccatctttattttcttgggttgatcttcactagctatatattaaccaattacatatgtattattttgtactgaagaaaggatataatttgtaatcgccaaatgattgaattagtatttgctaattacaaaaatttgtagaaatcgcgataattatcaacttttttactatatcccatcattctactattacgcaatgttatcaattgtactagtttgtttcatccactatgtaaaatcattcaaaccctaaagtcgatgctcatcagctcatgtatatgtatgtatcatgtatatgtacataagatataaaacctttatagatgtgcatgtaaaagaatggtagatagtagtagtaggtgtgtaaggagaaagatctagggggcttcaaaaaaaggagagaaaaggacagagcatgtgaaaagagacagagaaacaaacagaggagtgaacagtcttactcttttttttttctatgcacttaatgaacccaaccctctctgtatatttctgattcttcacatgtcttcctcttcttttttattccgaaaacttttcttcagtaaaaaccaatgccgaaaaaaatacataataaaaacgacaaaatatctaacattttttatataaaaaggacaaaagtactttcacttcacttgcaaccaaacaaacctagtccccttctttatccaatggtctctcccctgctctctatttctcatctaaacacccttttctttctttcttatttaccattttgccaacttatgtaaaagatgttaagaagaaaatgtgaaaatttagtaaaaatctctcttttgtattgtcgtcagaaactgtaaaataatcttactctttttcaagtcagcatataagtttggtttcttctcccgagtcagagattcgtgcagtgatgatacaagaagcttattccgaattcttttcataaatactcgtatttccttcttctttttttttttcttttttttaacatctatctgttcttcttgcatctatctgattttcctctgtcttttagacagtaataacagagctcactaaatgtaataaataaaaaaatgagctcaataaaaaggtaaatggcactcatttttaggccatcaagtgttgggatacagctgaaattaaaaaggcgtcagctcaaaggaaaaaataaataaaaaagattcccaaaaatcaatgcacttttatagaaaaaaatacacataatttcaaaaaatacttaaattttgaaaaataagatgaagaaaggattgagaagagaggaaagagtagtcagagagacaggagcatcaagtgctgcagaagaagcaacaggaacactgggcctgagtctcttcagatttgccagtctttataggaccacactcttcttcttcatcccccttacatacattttatctatttttacattttacaatattggatattttaatgttgttttgattttacactacatggcaaaactccttaaaagctcttgtcctgatgtgattcttttttcttttcaacactgtctaaatatctctctcttctttgtgatcactctttgatttattaactttctgattaccattccccccaaaataaaccctactagagtgtgactaattgtatagtaatctctattgtgtaataatcttttatctttcctcaatacaaaaaagtagggtatatatataaaagagggagtggcctcgtgtagagaaagaacctagctagtgttcatgcaatttgcatctgaggaatatatgcttagaaagagagagagagagagagagagagagagagagagagagagagatatcaaaccagaggaaaagagtgacagagaaagtggtcatctttgtctgtctctgtccgaaactcaggagccctaatctctgaatccatcaagaaagctctttctcttccttcttttatgcttctgaatttgctacatatataaactatctgaagaaagctagagaataag

SEQ ID NO: 1982 - DNA, 3000 bp, Unknown
  misc_feature (1)..( 3000): cDNA_ID_2148215_gDNA_ID_1620474_Annot_ID_158103 3000 nt of promoter + ATG
ttctgatgaatggaccatctcgtacatagattctttatttactagactgatctctctctctctctctctcgtgttcttatctgttttcttctgattttctgattcgaatatttactttcatgtactgagacatgtcagaaaatatattcattaattaatgagctgtaaaatcccaaaatattcaaatttcttaaaagagaaacttgctcataggttaatcagtttgctttttgatcaaaagaaaaaggcaaaacttcatagattggtaagaaaattactacttcacttgtcccataagcaacacccttcctatatcttattaggcattaggccttaaaccccacaagcttcttctttcttctccttcttcttctttttctcttcttcaagcctcgatatacatcattgcagccaccatcatgagagtgaaagaaacaggaaagggttttgtggttatattaatggtgatgataccaatagtgagctgggttgatgcaacaagcaggcctattgcttccagtcacgtttctttttatccaggtttaatttcttatttcttcagagtctaatatattagaccattactatgtctgtatctatatatattgaaagggagacgtgtagatttgtaagtatgaacaaaaagacttctctgtttagtttctgtttgcaaagaaggttaggttcaatttcttacttgtttatactaattttatgagcaaatcaatgacttgtaatagtggctattttagactctaaaccgtggtcccaaatatttgcatgattaacggttaaacccaaacaaactatggttttagaaattactgttatagattagtcagtaaaaagaatcatagaaaatggaatacatgttcttattaatgtctaaattctttttcgttttcccaataataatttatattgggcctgcagagataataaagccgcaggctgcagaagaaaactctaggagacgcattttgaaccccaatgagaataaagaagagatagtgaaaagaagaagaagaataggatcaaagccaccaagttgtgagaaaaaatgctatggatgtgagccatgtgaagcaatccaattccctaccatttcttcaatccctcacctatctcctcattatgctaattaccaacctgagggttggagatgccattgtcctcctccttaactaatcattctctctttttgtattccttacttagacacagtaacatattatatgttcacaacatgtatctgtttttaaactattatcatcactcatatcagtaatgtagacttgtagtaaactataacgtcaaagattttttatcaaactcaagtaattttttcacagtgaaatagttttttttttctttttcttttgggtaaggtttggtatactagaaggggcgggccatttgtttgtagccataagggcgagtaatatttattttattgggccgggcctgacttttttgcgcttttactctcccggctcgtgtacttgtgtacggaatagtacataatataatatgttgttatattatttcataaaaattgtggaaaataaatttccaacaatttgtattccacaaatgttatcactcatctatatatacatttttgcatccactttgtaaaataatcctcaagttggatttatttacagtggctgccattggcatttaataattattttttataattagaaagtaaatcttcgaattaaatatttgacatttaactatcttcccaaaatctcttcacattaactacacaattagttactaaaataaaacttccaaaatatttaatatcatctaaacactacaaaattatcatttttgatattgcttttttcatgactataacaattcgattataagcatcaaaccgtagaaatatttgatagcagttaattactacaaaattacaaaatatttatacaatgatttataaacatatcataaataaaatcaacattaataaaataaataggtttttttacgggacgggtttgacaggatgttacttaataacaattgtaaactttaaaataaaaatattttatatatagatacaatttgcaaacttttttatatattaaaaaattaattgtcccgcggtgtaccgcaggttaaaatctagtggttctgaattttgatgaaaaaaataaaattaaaaatcgctataaattgttgtgtgatctttaatagtgatagtctgatagatagattgttagtaattataaacttgtgtgatagacaaagacaaagaaaatgaaagaaagtaacaaaaccattaaaacattgtggcagttaacaagaaaaaaacttggtgccaactaataataataccatttgttagtcaatacaaatcagtaattaaatagtttaatttctgatttggttttaagttttaactaaaaacacactaataatgagaaagaaaatcgctaataattaattaaaaggaatataaaaataggagtcagctgaaggagtagacagagagaacggaaattgctgcgttgggtttgagagttgcagtcggagagagtgtggaagacagacaaagagagagagaaagaaagagatccagagatattattttcccttttgatctttcttgtccaaagggaagacacagagagagaaaaagcgagcccttttctccttcttcctcaaattctcatctattcgaattttgcattcattagctttctttgtctgattgatctccgtcggaatcggtgttctttatgaacgaccctcccgattctaggtttttctcgctttctcccccttttttgttgattgggattttcgtcacattctagggattttaccttgtcttgtgccgcaagtttttgggttttctggggaatgttggtgattttgatgccaccaatctttcaaggagtctttgaatcaccggagctgatctcacatcgttgtcgaaaggatatctttctgtttcttgagctgaaactttgagagatt

SEQ ID NO: 1983 - DNA, 3000 bp, Unknown
  misc_feature (1)..( 3000): cDNA_ID_3409273_gDNA_ID_1620474_Annot_ID_158105 3000 nt of promoter + ATG
caaagacgagaaaggaaactgaacagcagggacttacattgccagtaccacattttgaaattctctctacagaggaataattcaggcgggccttgaagatatctgaagaccaaataaaaatagaaaaataaatgcttaagcgagaagcataatatatactcaaaacataccaactttcaattaattaaagttggaacgttgttatgttcttcatgttgaaaacgatgtgaaagtcaaacttggactattcatcccagagtactgtgtggtgcttgttaccgtatcaaataaaagaaaccaccacacatttctacataaaatgaacttaaggatagcaatgaagaggacactaagaaagctgactggattaccttctcttccaacgagagaggggtgggtactgttggagaaacagcggactgccacagcatggtcacgccgcagtaaagcggaaacatgtttcaactggtcagataacacaacaatcgtcaaaatagtgtttacaaagagcaacatacaattactctgctgtaaaagtagagtcttcttgtactaataaaatgaatagctaataccacaattgaatcataaagcgaagctactacattaatcacaattcagattacaaggaggttactaaagctctcaatagcaaaatgcagaattgcccatgatcaaattaaaaataccaaattcatgattagattaagtcaaacccggaaaacgaacctcagttcagaaaaaaatgattggcagagcaaaacacataagaacgaatgcataaactcagttttacaagatcaaaaatggtagtcaaaccacagaaaaaaatgaaaaatagagaaagagaaacctttttggaatgattgatgatacgagaagccattgttgtgcaatcggagctgcgtcagccgatccgaattcgcaactgcaaataacaaaaaaaatggtgggaatgtttgttagggggtttctcctttttccctcggcaactatatcagagatcgagatcgatgaatttgacttgtactcaatccaattttgaaacagtaaatatgtggatggaagataggattcgatctagaactcaccaagagtcagaagaacggtaaatcgcagtatagagagtgaaggatcacttggaagaaagctgggatttgatgatgatgatgaagatagttttgtgtttaggtttttcagaaatggcaaaatgctgccttacatgtaccagattgtatcgtaccaacaccaattctaccataaccgatataaaagtatttaaaccgactaattaagcttcacaaatttcggtttgtactttattatattgggccctattattattctctgagcttttgcgtctcaccaaaagacagagatcatcaggtgcgttagtgattacgtaggcatctaatgaacggcagggattagtcaaacttattaatgggcctaatctttggcccatcgttttccctcgattcctgtcacacaaaaaactcctagctcttcctctacctacacaagctaaatacatattttttgcttatcctaagcatcatgattatgttttgccctctccagctttttcttcaatggcaacagattctaagaaagtctcttgaggctaaaatcaaagcattttttgttgaagatagatagcaacttgctgcttcttcatactagctagttaccttcttcttactcaatgtgttttgcttcgtttcaaggattcttcatatcacttgtggaacaattacatgattaaacattcaacatagagagatagatgtgttaataagtaaagacattttcagataaaacgttcttatcagtcactttattcttctaatatcctcgttgtaatcgggaaaatgctttgtaacgtcaaaaagcaataaaagttgcaggagaaagaaagctttggaaaagaaaataaaataaatgaagaatattttctttgctagtcacaaaataaatgaagaatttatgttcctaatttcccactagatatttgtttatttatttttgccaaaatcaagttaagacaatgagctaagtgttggaaaaccttgtccgagccaaaagagtaaaaagaaagggaataaaggggtaaaaccggaaatccgaaaaagaaaaggagaagatttccaaaggagaaaaccctaaagacggagtatataaacaaggtaacgcgttttctctcagcctctttcggatattccaccagtctctcgcaatcttcgctcttctctttgctctctctctctcaacgcggttcagatccgagtttgggagattcaagctccctgaaaaaagccctttactctcgcttaccaactttgctccaggttcgcatcctatcggattgtctatctattatctcgatgtaacttttacgattcatgattgtttctttacttttggattgttctgatttgtttttttgtgttttccgatagatttggtttcaactttgttgagttgatttggaagttttgatttttcgttacttcaagatcgttttttttgctgtggaagtgctttcgtttttgttctctttattagattctgagctgctgatgatgacgattattaaatttaggatctacacatctgtagatttgttgatgggtttgtagattttgttacggctaggttagtctctcaatagaatgaaatgaatcgtcttcaaagctcagatgttcttgtcttaacactcacttggttttgtctgattgaatgtttttttttgtaatttggagaaataggttgagtggtgtctatgtttaatagataaccatatgtgcctttatacattttctccgcacatcatctgaggcagatattaatgcttgttttcctctctttatggacttcgagtttggctttcttgtcacatttcctcctttgcaatcatattattaacgatatcaaaataggtgttgtctctcttccttttgatatgaaatctgattgtttttgttctttttatgtagcatg

SEQ ID NO: 1984 - DNA, 3000 bp, Unknown
  misc_feature (1)..( 3000): cDNA_ID_2148671_gDNA_ID_1620475_Annot_ID_158136 3000 nt of promoter + ATG
agtgaggatagtgttgagtttagttacctgtacagtatttgatccaaggagaatgaattcagcggcatcatagccagtttcaactcctccaatacccgaaagcgagcgatcctcactaaactcagatttcatcattttggcaatgttcataacttttgccagtgcaattgggcgaacggccttataagagtatccccctggagtggagtaactgcaaaacactatcaacgttagctattcttgtaatgccattacaagatttgccaaaacgtttgacattataaaagtgctatctagctaacccttcaacgcatggctcaggacgcaacgtcttcatatcaattcccattacactcatgattgtattgatcgctgcaattccttcacatccggattttagtgacaccctagcaggctattcaaaagaaaaagcaaaacggacatggtcaaagcagagcaaaacagagtaacaataactcagctttaagtagggagcttttcaataaacttgcatcaaagtttttttttcattttctacaaggataggctttatacaaaatggttgaaaaaccaggaagcaaaaaggctgagagaattagatgtcacacctcagttatgtcagtaatattaggagtcatcttagcccatacaggaactgtagctttagcattaatccatccgcaaacctcgtcgagaagcgcacaatcttgtccaacagcggcacccattctgcgctctggcataccatgaggacacgagaagttgatttctaaagcatcctacacaacaatcatccagaactgtctcttcaacaatgtatactaatatcagacaaagtgaaagagaatctaaccacaaggaagaataagaatctgtgttttagggaaaactcacaacaccagtttgctcaacacggtcgataagctcttcccaagcagttttgttatattcctccatgactgaagcaatcagaatccgatcaggatactcttttttcaaccgctcaaactctttgagcatggtttcaagaggtctgtcactgatgagttctatgttctgccacccaattacatctgttttggctgagccattggatccggttcgtagccgagcatatctaggtgtcacgttgataactttggatgcatctaaagatacctaaatcatccaatcacagattcagacgaaactcaatatcatcatcatcatacacaaacacaaccaaatcctatgttccaacatagtcaacgcaaaacagactcaatcatcatctactctaaaattgaaaaagtcaaatctcaagagcttacggttttggcgatgacggccccccaaccttcatcaaaggctctcttcatgacggtgtagttggtacccggtggacccgacccgatcacgaaaggattgggcattttcaggccatttacagtgacactgagatcaggctccgattcggcggcggaagagatcttaagtccaactctagtcggcggtagaaaactccggcgagaggatggatcgaagtcagctgataaggtggttttagaggagagtccagagaagcgattcaaggcgaaactcatggaagccataattagagagatcaatctggaaaattggcagaagtgatcaaatcttgagacgtgaaactcaagaattatgagagagagaagacgacacgcaacaaagtgtgacgatttcgaaatatgtgagagttggtgatcaaatcgaagaacaaaggaaagaacttaagaagatagagatgtaagagaagagtgtgttgtaataattggtcggttcttcaacttcatgccacgtgaaaataattgacgtttttagttaaagttcataattagttaataatacattaatcacccaaataataatagacccatcttccctaatccataatatttaaaaatatattagtttagttttaatcaatgtatttaacagttattttcttctctatcttatctccttgagttatttttaatttttttttgtccaacggagtggatataacttaagattctctgtctctatcaactaatgcttgatttaccaacaaatttcggaaaatggatagttttagaattactcaatttatatgtcgactacgtggaaattgcgaacacgtaacgtaacggatccaccgtgaggttaaggttgttttctagtgtatacgattcttgagcccaagtggggtaaagagcccatgcgtcacaaaacaaacaaaacgtttcataaataatacgtgtaagtgggaatggacacaacatcagttggtggctctcaacgtttctcttccttcgttagtttgactctactttttctcgttagtttgcgtaaagtaggcttctaagattagttaaaaaaagttaaaaagttaaaaagttaaaaacctagagaccattctagattggtaaataactaaatatgatgtaaagttttagaccaaaatggcaaaatactatatacctaatcatccagtaatttctaaaaagtttttgattgaataagaaaacagaagagaaaagtatttggtttagactttagagttttaaggactgcaaggattttactatcgaactttctagttcaggtaattagatagtgatattattgtgttcgatatttcaatgacgctacaaaaagaataattcgtctttttttttttaaaatatcgttattgtacaaactacaaacgaaacgaagaacacacaacataaacacggcctcaaataatttccatggtctcaaaatatttaaacgaaaaatataattttctgagtcctttcatttattattataaataatcaaatccgactctcattatttctcaggaaaactaaaccaaagtctgtttaccagtaatatcaatcgatcgccattctcgacatttctctctctcaagctagtctaaagtttcttcttatctccttcctccgaccaaaacttcgacttctctcttattttcaccctcagagagtaaccatg

SEQ ID NO: 1985 - DNA, 3000 bp, Unknown
  misc_feature (1)..( 3000): cDNA_ID_2148461_gDNA_ID_1620475_Annot_ID_158147 3000 nt of promoter + ATG
ttttagaagctattcaatgtccgctctgcctccaaacactgcaccagttactggacccataaaaacacagagctctaaaccatcatttgatattgaagattgggacagttactcaggccaaacggtacgaaacggtcagaagtctgggactgaagagctcttgtcttttcggggtgtcgcattggagcgggataggttttctgttcgttgtggactcgaaggcatctgcatccctggtagaaggtggaggaggaaactcgagatcattcaacctattgagataaactcttttgcagctgactgcaatacagatgatcttctctgcgttcagataaaggtttgtctctgcatctctgttaatttttggtgttattgtggtcaattttttttctgggatgcatcctaacttaccttttttactggcagaatgtggctcctacccatgctccagatattgtaatatacatagacgccataacaattgtttttgaagaagcagggaaaaatgcttccccttcttcagtaccaatagcatgcattgaagctggaaacgagcacagtttgccaaatttaactctcaggttagctttttttcttaaattcctcgtaattattttattttgtattgaaattctcccatcaatcttcttgataaaaattgatagatttagatatcagcattttgctttagtccagtaagtctcagaagtcttcagtgatgtccaatacaaaataacccataatattaggtaatcttgggtagtgaccaagaaaccatagaacaagttattgaatctaacaagtctctgagagtaactattctcaacaagcaccgtggtttggaggctaaaacagctagaataccctttcaggaacattatagactgcagttacccacccttaggttttcttgcaatctttcaggaaaggtgaggagcactcattcatcgtaaagcctgcgttttctgttgggagtaatctgaagccctctgctgcacgaaataaactcaaatcatcgagtttgtctcttccaactgtaaattttgaaagaaaagggagcggtttaagtggtgatcagtatgcggttatggtgtcatgtcggtgcaactacacaggtagatccacattaccgtggtttgtagccatgtttttttcttttgtccattcatatctatagctgtttcatcaatgctgttttatgttggactcagaatcaagactgtttttcaaacaacggacaaaatggagaccacgagtttcgagagacctgatgatctctgttgcgtctgaaatgtcaggagagccttgtggtccccatgggagagcctctcaactacccgttcaggtcattctctctctttatctctctctgacattccctagataataaatgggacaatgcatgaactaatggaaggagttcgcatctgcaagtgacagtgactgctagtgtttacccaaatgactgaaggtttaattagatgttgttgctaaattgtggttgcaaaagttgctaaaaactatgcaactctggcttcgtatatatgaataagaaaccatgcaacagttacaaagccacctatttgcaatgtggtcatattcttcaaaattagccaatttctaaatctgcaaataccaatcccaatggcatcttttattctacctcatactttttctctactggtttcagattttaactcttcaggcatcgaatttgacttcagaagatctatctttgaccgttctcgctcctgcatccttcacatcacctccaactgtagtgtccctaaactctacgcctacgacccctataagcccattcctaggattctctgatttcaccgagagagtacaaaacgagaaacgcaacactacagtgcgtaaacagcaatcgttacccccaattccactggagacaaggacagagaacaacacaaatggtgaatcttccaatccttcagatgttgttccaaagagcggcttaggttgcacacatctctggctacaaagtcgagttcccttagggtaaacatctgataataatatccaatgagcttctggtatgggtttaccattataaattgataacgatattcctaaatgcatcagatgcgttccttcgaaatctacggcgacaatcaagctagagctactccctttgactgatggcataatcactctggatactcttcagatccatgcaaaggagaaaggttagctaaaaaaatctctagtctctcagcaaagagactataaacactttgctgcgtcttctttctttccgtgaaaacatcagtggttccatatgaagaatgcaaatctcgaagctttaatatgttttggagtgaatcataatcataaaatgttagatgctcgtgtttaatgactgaaacaccaatgaacttgtgtgtgtgacaggtcgtagatacattccagagcagtcactgaagataaacgcaacttcaagcatttcctctgggattttctagtcttttacccaatgccacttttgcctttttctttagagccaagaagagtcatcaaacacagagcagttctatcttcagcatctccatagagactcatccaaagattgtgtgttgaaaaatcgattttggtttccatgtttcgaaggtttgaagaaaagttgttgtaataccccacttgtgctgaaccatgtgtttgcgttctttagcttgctttttgtaattgattgattctgaaattcgcatagagacagaagacgcaaccattgttatcgaatttacatttgttatttgcttataaaatcagataattaaccaaaacttttcttcaacaaatccaagtatggctaacaaatgaaggacaaaaagttaggtgcaccggagcttaatggtgcacccgaatgcaggggataacagctctacaaatctgaagccattttcacggtgaccccaaagtcgtcgtggaggcaaaaaccctttacctccgggatcaaaatcttggggagagacgaag

SEQ ID NO: 1986 - DNA, 3000 bp, Unknown
  misc_feature (1)..( 3000): cDNA_ID_2148473_gDNA_ID_1620475_Annot_ID_158150 3000 nt of promoter + ATG
gagactcacacgtcggaaacggcaaaggttagaccggtgagaggatgaggagctttgggaggagcaggttgcggagggggaagaagcatgagtttatcgataaaagcgccgaaatcttcacggacggtcttcttcagctttttggtaagcataagaatcccagcgagacctaaacctagaagaacccagagattcgcagcttgagacgccatcggtgacgtttttgttctagctgctgctgctgctgcttaagataagagagatagaccctaaggagaaggacgccaaagagtttttgtttagtgtgttgcgttccctttgagtttttattctttttccttcttcctttttttaacatcactcgagggtttattttattttcgttttgtcaacagttttttattcacgttgtaaaacaaaaaattaattttattaattgtttcttgtttttacagtttattttattaattcaattggtataaaatatggatacacataacaaacattttgccgtattttcggtttcttgtgtgtgtccacttgttcgataattttgcttcgtcgttaggaatcttctcctcttatgttatgaggatgatttgtggttaattgttttactttcagaaatactagtggaaaattaaccacgaatgtggcacactcctggccagaatcatattgtgtttgcctcaaaatctgatttggtcaaattattgtccaaagactgactagtataaagacgtattgatgaaataatttgaagcaaaaactcaatatgatagaacaacgtttagcattttaaataaaaactctaatcaagtgaacaactccattttacaccaaaagctgtgcatgtgtgccattctatatgcttatcttttactattgccattgtaattaatctccttcataattctccttatcaatcattattatttctcaaataattactttgacaatgactacattcaacatgttatattttccacaaacaatgattccgattcgacgaacaaaatacaaaaatttaagtctaaatacaaataaaagacacacacatgaaccgacgtattcatcctccaccaccgctgcatataccggttaaagataccggaaatctacaaagggacgtggctaccggcgttccttctccggtaaccacttcagctgaagccggaggaagaacccttccgtcagcgaacaatgcccgctcccccatcaccggctgctgatcttggtaccgtgccaccaccgcatcctctagctctgcctcggcggagttgtaaacggcttcatctccaaacctccgttccacctctagatactccccgagcgatgaccgctttgaatctcctgttccacggtggattccatttccggcggcgtcgtcatcgtcatctcggcaaaaccgccaccatttacggcggcgatgcggctcaggctcagccgaatttgaaggaggacgctttctctggtggttgcgtcttgcattggagctagaagctcgtgagattgcgacggaaggtgacacgtggcggcgtgaagaggctctaaatggcatcggcatagttgcagtgaaactaaatcccataagcgttccaagtgtgatgcttctgtcatggaagaacgatcctgttgactaaatcctcacatcaccaataaaaaaaccaaatcaagttctaacaagtacatatatatgtttctgggcagttctgaaaacataacctttggaactttaaactagttttctaattaaaggttgatactttatagcataaagctttatgggtagcttagaaaacacatgaagagcttgatctttaattagattatctattaagtataagattgcaggaactgacctcagtatcaagatcggaggaagagacggaggagatagttggagaagatgggacatgaggatcttgcatctctgtaatcgctggtttcaaagggtttgaagatgtgggagattgtgtcactgaattaaaacgaacgacgtcggattagggagtttcttgatgagaggaaaaggaaagtgtttttgtggatggataggtgaagaagaagaaagtgacaaatgatttgctttttgaaatgattgtgcttctttaagctaaagtcctcttggccatctgttacactatttctttccatgtctcagagagctttgatatttttgataaatttgatttaattgtttctagttatgggaataatcaaaatcctttacagagacattttttttgtaaactttgggtaaaagctgagacatgttggatggtagcaaattaaaatttacgaaaagaggataaattacaacaaagtaagcttttataggtactattgattttttcataggatacctgaaaaagggtagagaaactacatctaaattcacgcgaatactctgttacgatcatgtatagagtttttttttggggtcaaactgaatatgtttagagtatattttatttattttcttgttatctgatgatatctttgtctttctcttattgtcaaaagcatataatccgacttatcaaattttttattttataactgactaatcaaatatttttttacttaaaatattattgataattagaaaattagatccaaattctacatttgttcttttctctaatctctatagttttggattttagttggtaacttttgaattcctgaaagtaaatttggtaacttttgggtagtaatttgattttcaaaaagtttagaaatgcattaaagtgtaaaaaacgaaaaacaaaaacccccaagataaatagttttttgtttggggggtaaaaatgataaatagtttgggatgtggatgacgtcaacattgatcagttacgagattacgattttataactcttttaaccaaagctaatcacttcaccctctgttttgtttctccccaatcaaaaatctcaatcccaatcacttcgcttctaatcttaaagcctttaatttagtcttcgagccctctaatg

SEQ ID NO: 1987 - DNA, 3000 bp, Unknown
  misc_feature (1)..( 3000): cDNA_ID_3065443_gDNA_ID_1620475_Annot_ID_158152 3000 nt of promoter + ATG
ttcccttcaaataagaaaaacaaagacgataatcagaggattaggatttggagacaaaacagagatcatcattgaaaggaggaagaagagaacaaaccgttcttgtcgggaacagacaaagaggtgatggtggtgccgtagtttgagatcttgacctgcatggtgccattgttgagctcgaagatctctggagtgtttttgctctgatccgccattagagggctcgaagactaaattaaaggctttaagattagaagcgaagtgattgggattgagatttttgattggggagaaacaaaacagagggtgaagtgattagctttggttaaaagagttataaaatcgtaatctcgtaactgatcaatgttgacgtcatccacatcccaaactatttatcatttttaccccccaaacaaaaaactatttatcttgggggtttttgtttttcgttttttacactttaatgcatttctaaactttttgaaaatcaaattactacccaaaagttaccaaatttactttcaggaattcaaaagttaccaactaaaatccaaaactatagagattagagaaaagaacaaatgtagaatttggatctaattttctaattatcaataatattttaagtaaaaaaatatttgattagtcagttataaaataaaaaatttgataagtcggattatatgcttttgacaataagagaaagacaaagatatcatcagataacaagaaaataaataaaatatactctaaacatattcagtttgaccccaaaaaaaaactctatacatgatcgtaacagagtattcgcgtgaatttagatgtagtttctctaccctttttcaggtatcctatgaaaaaatcaatagtacctataaaagcttactttgttgtaatttatcctcttttcgtaaattttaatttgctaccatccaacatgtctcagcttttacccaaagtttacaaaaaaaatgtctctgtaaaggattttgattattcccataactagaaacaattaaatcaaatttatcaaaaatatcaaagctctctgagacatggaaagaaatagtgtaacagatggccaagaggactttagcttaaagaagcacaatcatttcaaaaagcaaatcatttgtcactttcttcttcttcacctatccatccacaaaaacactttccttttcctctcatcaagaaactccctaatccgacgtcgttcgttttaattcagtgacacaatctcccacatcttcaaaccctttgaaaccagcgattacagagatgcaagatcctcatgtcccatcttctccaactatctcctccgtctcttcctccgatcttgatactgaggtcagttcctgcaatcttatacttaatagataatctaattaaagatcaagctcttcatgtgttttctaagctacccataaagctttatgctataaagtatcaacctttaattagaaaactagtttaaagttccaaaggttatgttttcagaactgcccagaaacatatatatgtacttgttagaacttgatttggtttttttattggtgatgtgaggatttagtcaacaggatcgttcttccatgacagaagcatcacacttggaacgcttatgggatttagtttcactgcaactatgccgatgccatttagagcctcttcacgccgccacgtgtcaccttccgtcgcaatctcacgagcttctagctccaatgcaagacgcaaccaccagagaaagcgtcctccttcaaattcggctgagcctgagccgcatcgccgccgtaaatggtggcggttttgccgagatgacgatgacgacgccgccggaaatggaatccaccgtggaacaggagattcaaagcggtcatcgctcggggagtatctagaggtggaacggaggtttggagatgaagccgtttacaactccgccgaggcagagctagaggatgcggtggtggcacggtaccaagatcagcagccggtgatgggggagcgggcattgttcgctgacggaagggttcttcctccggcttcagctgaagtggttaccggagaaggaacgccggtagccacgtccctttgtagatttccggtatctttaaccggtatatgcagcggtggtggaggatgaatacgtcggttcatgtgtgtgtcttttatttgtatttagacttaaatttttgtattttgttcgtcgaatcggaatcattgtttgtggaaaatataacatgttgaatgtagtcattgtcaaagtaattatttgagaaataataatgattgataaggagaattatgaaggagattaattacaatggcaatagtaaaagataagcatatagaatggcacacatgcacagcttttggtgtaaaatggagttgttcacttgattagagtttttatttaaaatgctaaacgttgttctatcatattgagtttttgcttcaaattatttcatcaatacgtctttatactagtcagtctttggacaataatttgaccaaatcagattttgaggcaaacacaatatgattctggccaggagtgtgccacattcgtggttaattttccactagtatttctgaaagtaaaacaattaaccacaaatcatcctcataacataagaggagaagattcctaacgacgaagcaaaattatcgaacaagtggacacacacaagaaaccgaaaatacggcaaaatgtttgttatgtgtatccatattttataccaattgaattaataaaataaactgtaaaaacaagaaacaattaataaaattaattttttgttttacaacgtgaataaaaaactgttgacaaaacgaaaataaaataaaccctcgagtgatgttaaaaaaaggaagaaggaaaaagaataaaaactcaaagggaacgcaacacactaaacaaaaactctttggcgtccttctccttagggtctatctctcttatcttaagcagcagcagcagcagctagaacaaaaacgtcaccg

SEQ ID NO: 1988 - DNA, 3000 bp, Unknown
  misc_feature (1)..( 3000): cDNA_ID_2148477_gDNA_ID_1620475_Annot_ID_158151 3000 nt of promoter + ATG
aagggaggacgaagagattacagagatggatggttgatattttttggggcccataggcttttgcttctttagtggcgcgtgtttctcaccgcccaaaagacatgcgtgtagacataattgccatcagaattactcaaatacactaattgctctttttttccaagttcatgtgaacaatgggagattcattcgctgcacaattcacaatttcacaaatgggccaaatgtttagaagatatgaaaaaataaagtaactttaatataatgtaaacagtttggttttattattctcccccaaagagataaaattaaaatcactctttttccagcccagtgaatcaaatgaaccggccctttattcccatcatctaacacctaaaacgtccatctataaactcaagctgaaaactcaaacagcatcgtgtgattgtacttctcaccagccttaaccacaacagacgggaaattcgactggttaatcgcgttcgggaatccctgcgtctcaaggcacacacccgcatgtttcccgtaaaccgcattccctttcccaaccactccattcacatagttcccggtataaaactgcattcccggcacattggtccacaagttcagtacccttgagctagcagcatcactgagcttcgctgcgtgtttcagcccctccttctcttgatcaggacagtccaacacgtagttatgatcgtatccgataccaacctctccaatagactcgcctatccgcttctcctcagtgaaatcgaaaggagttccctttacaggcaagatctctcctgtaggaactgtgtattcgtcaaccggcgtgatatgagacccccatatctgaatcttatggtctagaatgtttcctgagtcatgacctgctaagttccagtatgtatgttgagctaagttgatgggagtatctttgttctctggaacagcttccatgtcaagtctcattgtcgtggctgacgtgagagtgtatgtcgccgtgacagaaaccgcaccagggtaacctgtggaggggaaccgcaaaacattatatagctaatctaatcccacagaaatcaaatgctagagaaaggatatgtcattaccttcttctccatcggcactgtgatatttgaaagtgatgaaaggtttttcgccgtctctcttgtgccctgcaacttcccatatcttcttatcgaaacccttgttaccacctgtacagatagagtaacattttacggtccaaatcctatttagttcacagaaagttatagagaaagtatacagagaagagaattgtttatacagaccgtggagactattaggaggcttgttgataggcaaagtgtagttaactccattgagactgaattttccctccttgatccgatttgccacacgaccaacaatgcacccaaagtatggtgcaagccctttctgtaacaatcatattcatagataaaacacacatattcattaacattgttacaaagtccatcttattttgatagttcatcacaaagtcattcaacaaggtacatgaatgaccatatacatttcttaaattatgattcagactctattcatgagatccagaggcagtgattagagtttcgatcagattgattgaatctatgtcgagatcagttcaaggattaggtgaattcgagagaaattaccacatatggatccaccgagtcgaatccgagaactacatcccccagtttcccttcaaataagaaaaacaaagacgataatcagaggattaggatttggagacaaaacagagatcatcattgaaaggaggaagaagagaacaaaccgttcttgtcgggaacagacaaagaggtgatggtggtgccgtagtttgagatcttgacctgcatggtgccattgttgagctcgaagatctctggagtgtttttgctctgatccgccattagagggctcgaagactaaattaaaggctttaagattagaagcgaagtgattgggattgagatttttgattggggagaaacaaaacagagggtgaagtgattagctttggttaaaagagttataaaatcgtaatctcgtaactgatcaatgttgacgtcatccacatcccaaactatttatcatttttaccccccaaacaaaaaactatttatcttgggggtttttgtttttcgttttttacactttaatgcatttctaaactttttgaaaatcaaattactacccaaaagttaccaaatttactttcaggaattcaaaagttaccaactaaaatccaaaactatagagattagagaaaagaacaaatgtagaatttggatctaattttctaattatcaataatattttaagtaaaaaaatatttgattagtcagttataaaataaaaaatttgataagtcggattatatgcttttgacaataagagaaagacaaagatatcatcagataacaagaaaataaataaaatatactctaaacatattcagtttgaccccaaaaaaaaactctatacatgatcgtaacagagtattcgcgtgaatttagatgtagtttctctaccctttttcaggtatcctatgaaaaaatcaatagtacctataaaagcttactttgttgtaatttatcctcttttcgtaaattttaatttgctaccatccaacatgtctcagcttttacccaaagtttacaaaaaaaatgtctctgtaaaggattttgattattcccataactagaaacaattaaatcaaatttatcaaaaatatcaaagctctctgagacatggaaagaaatagtgtaacagatggccaagaggactttagcttaaagaagcacaatcatttcaaaaagcaaatcatttgtcactttcttcttcttcacctatccatccacaaaaacactttccttttcctctcatcaagaaactccctaatccgacgtcgttcgttttaattcagtgacacaatctcccacatcttcaaaccctttgaaaccagcgattacagag

SEQ ID NO: 1989 - DNA, 3000 bp, Unknown
  misc_feature (1)..( 3000): cDNA_ID_3065439_gDNA_ID_1620475_Annot_ID_158154 3000 nt of promoter + ATG
agcctatttacgaagaggaaccgcaagagaaatgttaggcgattgcaagggagccatagaaggtaagctttaaagaacataatctgattgttttttcgccttgtagaatctggcagaatataacataaactctgcagatttcagatacgcacttgtgctggaaccaaacaacaaacgagcgtctctctcagcagagagactgagaaaattccagtgagcttcttttgtccgtacctcaccgatcattgagaaaacgtttgttccttagaatttgtccaagagtataggccaattttgtcaacacttgtcttttgcgtctgatatttaggcattttatctagagataccttttgcaagtccgccgagaatggaaaattataatatccgatgtttattttaaacgttctctaaaattggatatcaaaaagtaatgttaatcttaaacaccggataccggcattcccggtcgacttctagtcagcgtagcgtcaaaaataaggtcatgtctttaactatcttgtctttatcattttcttttctcgcacgttatctcctccccacgactcaaaaaaaataaacagaaaaaaagaggagtagaaaccaaagagacctgccctaatatttagcgatgatagtttgaacggaacgaaatctgacgaaagaaactaaagagacctttgaattatcttcacgggtgagttggttcgtttaaccttttttctttatctcggttgtgcttttccccgagaattaaacgtgtgttggttgcagcgttaacaaaaaaaaagggttgtagaaagtgagtaaggaagaaataatcaggaacattaataaaggaaatgacaacggcgtgtccggcgaggacaagctcactaatggacgatctcttgggcctccttagaatccgtatcaaacgtggcgtcaatttagccgtccgtgacatcagtagcagcgatccttacgtcgtcgtcaagatgggcaaacaggttaatccattcatcattttacaacttcacatgcaatttcattacatcaaaaacattctcaaattatcatattaaatcttacagaaattgaagactcgtgtcattaacaaagatgttaatccagaatggaatgaagatttgactctctccgtcacagactccaatcttaccgtcctcttggtactttttacttactaaaacatacattaatttccttatcataagatgtttatattgataaaactataatgttatatgtagacggtgtatgatcacgacatgtttagcaaagacgacaagatgggcgatgctgagttcgagataaagccctatattgaggctttgaggatgcaactcgatggacttcctagtggaaccattgtgaccacggttaagccaagtcgtcgtaactgtctagccgaggagtcacgtgtcacctgggtcgacggcaagctcgtccaggatctcgttctcagattgcgacatgtggaatgcggagaggtcgaggctcagcttcaatggattgacctccctggctccaagggtctatgaatcttttttcttttcttatttaccgttactttgagttgttttctttcaaattgaactaaaccaagtaacagcatggaaaaaaacaagtaatttcaatcttgaaggatatagtgaactagaaacacgtattaatccatggaaatataaggattaagaacgttgagggaagttttgttcccatatggtgatcgagtccaagtcgagtcgtggtggtggatatgtaaatgtggtgtattgttgatgtgtatgtatatttgggctagctatgccttaaataaggcatttacacgaacaactaatacagatattttatttatttaattatcgttccatatacttatgaatggtagattgttttaacacatgtgatgtactaatgtttataggtaaaaagtgaaaaaaagaccagcatattaccatttaccatcgacatcgataggccttttttaaaccattgacattggaggttttatgtgtacgttactgaagcacaacttatgtaatttttgtgaacaagatttacttgtacattagcgctaattaaggtcataaagaataatgatgaagaaagaataaaatatcgaagggaaaaagccagaagccacaaaagggatggtaggtgaagagaatccagatgtacactaatgagtgaagcaccatggttttataacgacaaaacacgtgagccataattgtcctttactatgagtggcacggcgactttacaataatgtgtcaaacgaccgtgacaagagtgaagtgtagtactagtatgtgatatttttctctatttaataaagtaaaagattcgactgtagtatgatagtattgagatatattctaaattatgtataaagtttgatagatcccaagggacccaaatctcgttccccaatgagcgatctagagattcctcttccaccaactccccaaagtagtcaacatttttttaccaaaacaacgatttatttgtagaataaaatctgtcaacatatatattgcatataaatgcaattgcaaatgtagttaaaaatatatataaaccataacttaaaatgagtgacagcacaacattaactaaaatacgcttattattattaccggttttgaccaaaacaaaaaaaatggagatatttgtttaattaccgactgatttgattttacagtctgtaaaaaaggccgaagtcgaaggtaacgccaccgttttccacctataaaaaagggcgcgcaggcaacatcacactctcacactcttttcgctctcagatctgaaaccttatctgaattacatttccccgattcgacgttgtgcgaattgatgcagcagagaggacgatccgtcaaccgcagatcacgaagcttctctagatccagactcgccgtcgaaggccactgaattactctctcccctctcttggcagatcttcttcttcgttttttcccgacaaacgacatttccgaa

SEQ ID NO: 1990 - DNA, 3000 bp, Unknown
  misc_feature (1)..( 3000): cDNA_ID_2148485_gDNA_ID_1620475_Annot_ID_158153 3000 nt of promoter + ATG
tcctcctatcagtatctaaaatttcaactgtctactggttggttcggtttcaattgttttcagagtatagttttgattacttgcatctttgcaggcatcgacacagttggcggggtaagagtgcctgctggatactgtggcgttcttggattcaaatcttcttatggggctatttcaaacaccggaatcataccagtatcttcaagtcttgactctgttggtatggatatataaatctttgaattatactgtttgtggtggaatgatttggatcttatataggctaggtttcaattgttgtataatcacattgcaagatttagatgcctttgttcgtatgactaatttatatttaggaccattaaatgagcattacgttgattctgatcaatagattttggcttcaggatggtttgcccgcgatccaaacaccctacgtcgtgttggccatgtactcttgcaacttccatttgccactcaacggaatccaaggcaaatcatactagctgatgactgttttcagctgttaaagatccctgtggatcggattacccaggtggtgaccaaatcagctgaaaagctttttggaagtatgccctttactctccctgaagatcctccagtctctgttagaaattctgattataatagcattatcttgttttatatttaggacaattgctaaagcatcagaacttggagacctattttgaaactaaagttcctagcttgaaagagttcgctaggacaaaagccattgctaacacgaaggtctcaacatcgagactactggcgaatgtgatgcagctccttcaaaggtgtgcctattgtttattcacctacagaggatgaaaatatcttagttttgaacactctataacaatattggcattgtaggcacgagttccttcaaaatcatggggattggatcaacacagtgaagccagccattgatcctgtgattttatcacaagtgtgtgagaacccagaactaaccaatgaagagactgagaacctgaatgctatcagaaacgagactcgagtggctattggttcacttctcaaggtattcctgctcttccatgacatgtccacaacttgagcgagttagtttatatgtctcttgactaatctctaatggttcccaactctgtaacgttatgtatcaaggatgatggcattctggtaattccaacattgccagctgttcctccaaaacttggtagcaaggagataacatctgaagactatcaaaaccgagcttcaagtctgcttagcattgctagcatatcaggatgttgtcaggttaaatctctctctttctctctctcacctgccatgctagtaaagttcccctcacacatgttaaaagcaaccactgaccagtcagtgttagcaaaaccaatccacagtatatgtgtcttacatttatcgtgctgatgattcaggtgactgtgccactcggacatcatgagaaatgccctatttcagtttctttcataggaagacacggtggtgaccgctttttactagatacagtgcagacaatgtatccatctttgcaagagtactcgagtattgttaccgatcccaaatcttctaaaaaggctatcaccaaagaagagtcagccgagattgccaaagagaaggtcaattaatatccattgcatgtctcattttcttaatggcattatcatccataatctaatgtggttattatatctttgtgtcccgtgattatgtaaaccagggtaaccaagcgttcaaagagaaactatggcagaaagctattggtctatactcagaagctataaagctaagtgacaacaatgctacctattacagtaacagagctgctgcatatcttgaacttggagggtaaatgtttctcagatccttaaaaatactttttagtgagcaaatctttctatgtggcattgccttgacaaatcatttacatacagctttcttcaagccgaagaagactgtaccaaagccatcaccctcgacaagaaggtaactttcattaaaacacagaaacaggtttctcttgaaaaaaaaacactctttactttgtaagaacacacaacacaaagatcgtttttgatttctttcagaatgttaaagcctatttacgaagaggaaccgcaagagaaatgttaggcgattgcaagggagccatagaaggtaagctttaaagaacataatctgattgttttttcgccttgtagaatctggcagaatataacataaactctgcagatttcagatacgcacttgtgctggaaccaaacaacaaacgagcgtctctctcagcagagagactgagaaaattccagtgagcttcttttgtccgtacctcaccgatcattgagaaaacgtttgttccttagaatttgtccaagagtataggccaattttgtcaacacttgtcttttgcgtctgatatttaggcattttatctagagataccttttgcaagtccgccgagaatggaaaattataatatccgatgtttattttaaacgttctctaaaattggatatcaaaaagtaatgttaatcttaaacaccggataccggcattcccggtcgacttctagtcagcgtagcgtcaaaaataaggtcatgtctttaactatcttgtctttatcattttcttttctcgcacgttatctcctccccacgactcaaaaaaaataaacagaaaaaaagaggagtagaaaccaaagagacctgccctaatatttagcgatgatagtttgaacggaacgaaatctgacgaaagaaactaaagagacctttgaattatcttcacgggtgagttggttcgtttaaccttttttctttatctcggttgtgcttttccccgagaattaaacgtgtgttggttgcagcgttaacaaaaaaaaagggttgtagaaagtgagtaaggaagaaataatcaggaacattaataaaggaaatgacaacggcgtgtccggcgaggacaagctcacta

SEQ ID NO: 1991 - DNA, 3000 bp, Unknown
  misc_feature (1)..( 3000): cDNA_ID_3065447_gDNA_ID_1620475_Annot_ID_158148 3000 nt of promoter + ATG
gtaattctttcatataagtgatctggcgacactcttattgattgtaaatgcatgctgagtactggctaccatgcccatgtcttggttgagatttctcttattccattacctgatttcctatctttttctcttccaaatggttgctgaagctgagacatttaatattaattggttgcttttcactgagcagacccctaaagctttattcattacttgttaccgcagttcaaaacactggagtatcaacagcaacggttgaacatggaaccaataaagctaaatatagaccatcctcttgataagaatctcaatgctttagaatttagacgggttagttgcaagggtgtctttgacgagcaaaggtctatctatttgggtccacggtctaggtccatatcgggaattactgaaaatggattctttgtcatcacacctctaatgccaatccccggtgacctggataggtgagggtaatgatcctttctccttgcttttaagtctctctagtaccctttacctatacaattgtgaaaattactctttttctgtcagctgcatcgaagtaaaactagggatataataggccattgggttacctacctttctgttttcaattattgttgtgaaattattatagctctttctcgggatataataggccattggttttctaatcctctctaaacacttgaccatacttgtcttatactattgccatattctgattggctgcgattaaaatactaaaatctcgtggttaataacttttatactgtaactaactagtgagtagttcgagattttattagacagaatggtctgcggcagtgtcacttaagccttaaatggtcttggctttgtcatagtttttggctgccggttttagctgtagctgttaactgtttgtactttctgaagtcagattgttcttttcctttgtccactagcatgcaatcgcctattctggtgaatcgtggatgggttcctcgaagttggagagagaagtcacaagaatccgcagaggctgagttcattgcaaaccagtcaacaaaagctaaatcaccgtccaatgaaccaaagtcctggtggaaattttggtctaagacgccagtgattaccaaggttggtcttgttcagaaactttttcctttgtcataaggttggcttctcatatatttggtttagctcgaaactgtaattttatgggatacatctgaatagaaatgtcggatctatgcagagacagattaaattcagctatctgcaaagtttcacttctttgtttattgtctttaacaaatctcttgcatacattgtgactcgtgaaaactgaaatcttgtaggaacatatatctgcggttaagcctgtagaagtagttggcgtaatcaggggaggggagaacccgagcatatttgttccatccaatgatccaagtaccgggcagtggttctatgtagatgttcctgcgatggctcgagccgttggccttcctgaaaacacaatctacgtagaggacgtccatgaacatgtagatcggagtagaccgtatcctgttccgaaggacatcaacaccttgatccgtagtaaagtcatgccacaggaccatctgaactactcaataacatggtaaactccatacagatacatgaggtgttcttggcattgtctggtcttaactgttatggtcaatgagtgacattatgtttgtgtctgtttattgatgaacaggtattctctctcggcggctgtcactttcatggcatacaagagactgaaggcaaagcctgtccgcagataagcactcgctgatcaaaatcaaatcgtattctttttgtcacttgtctgctgaagtaataattgcagtggataattggttttaggttataaactttcataagaaaaagggacacaattaaatccttaatgttgtggtaacttaatagaaatttgtagttttctttttctacgatggaaggaaagttcgaaatggaagccatttgtaggtaaagaaggttgcaacgaatgcttgtaatcaccattgttctttctggtagactttcagcagaatttgtcggtgtgaattatgtattacctagaaaaagtcaatttacggttcaagagagtttgtttgagtatatggtatatattttgaaacctttttgaaatttatatccgagactcgaaagacagcataaactatgaactgctatcaagtaaagaaagaaaaagagacatgaactcaaaacctcattttacaaaaaaaatagtgttaagtcatcttattcagctaaaatctcattattccactgcttttcaccaaaaaaaaaaatctcattattccactgccgacaggatctttgccgcctttgacacctttgttgcagagttttaatttattcatcgatctggtgtacctttaatattttacacgaaaggtcaaagactagctttctcttacaaattaaacaatagtcaaccattgtaaacgaaagtagcacataaagtgaaggaattaaaatgaaacgaaataatctgagtgaggtggaaatatccaatttcaaatgtgtctttgaagtctctatggataatttgtcaaaacgatagtatttgataaaagaaatggaatgaaatgaaattagtagttatcagtaaatctttttcttacttaattcatcaaatgtttttcatgtgagtgtgttttaaaattacgtaatcaatgattacaaagtaagtaataatctaaagcaaattgtatatatatagtaattagtataataagattagatttaacgcatgaattaggccaggtgttaatatcagtcttgtcccagattgttcgccagagagaatagaatcatcctcgctgtttcctatttaccatttgtttccaccaatcatcatcttctcgcatcagagccaatccatggcgctttctttctttagctccgtgtaatttctctattctgacaagtcaaatccctaaaaactcctcgattctc

SEQ ID NO: 1992 - DNA, 3000 bp, Unknown
  misc_feature (1)..( 3000): cDNA_ID_3065451_gDNA_ID_1620475_Annot_ID_158146 3000 nt of promoter + ATG
ttagatgacagatcagatcagttgaataagaagagttaagagagcagagatactttaagtggtagtttgctacgctatcggttggatataacaggatgaaccaagtaaaaaaaacagaggccatgttgagaaactaacaattgtcgagacacaaattaaaaactgaaaatgggaaaagataaaacagtaaataaacgacaaatacaagttgatagagggtggtgcagcttgcttgatttgtacagagcttggaacaatctacgtctatagactcgccaagatccacttttttgaagtatcccttctttccaatgataaaagctatgttgcgagtagggcgaggtatatacctgtctttatcaagtaccacagcgaccttcttcttctcgtcaacgaagaaactcccacctctaaccagaaactgaaaaccaagaccggtgattggtttcatatcaacctttaagaacaacttgttccacgataccgcattgggctcaatcctgctactaatccatatcttcaccgtataaccaccacattgttgaaatagcaccgcaagatgcttttctctaacactagaaagagtcacaggcagaggcagacgcggtccaaatctctctgttttagaatcaaaacatagtaagaaatcagggatatctcccacttggaaacaataatatttttgccagaactaaagctaactgatttgtccattaacctaattgatttacggccttataatgatgtaaatgggctcaacatttggcccaacaaaagagcagtttcctaatttcatctgattttggcagcaaactgatcgtaacttggattctgtctgtgattaagtaggtagtcattcataaatctggagcttcgaaaatctctctggtttaggtaattactgtcgcatataatgatttattgctctaaatccaacttttgaaattttccaattacgaccaattctctataaatttctcagcaaaaatcacggcgggaatatgaggcggctaccaccgtggatgctcggtggcgcgtcaaccggtgaagcagctgcacgcaatggttcacaacccgaagctcccaaaacaaaggctgaaaaacgaccaaaaagagtccaaaaaaccaaagagaaagacttaaatctcaagtcagatgaacctaaacgagttcccaggaagattagggaagaagctaagcgtagcccggaggtgattcaatcagtgactgttcctgaagatgatgatctcacagttgatgacttattaagctttgctaatgaggtaatgtaatacttcagttccacagtttttactattaaggatttgtgaatttacttaacaatgaatctcagtatgtccaacgtgatgaggaaggaacaagaaaggagcgtgaaagaagcttgtcagtgtctgaaactacgctagttctcgatgaaaccaatatgactacatcatctcaaggaggaaccaaagattcaacagcagaagacatgttacaattgctaatgggtcctttttacaagaaacgttagaattgaagcacaactgagttttcaagtgcttcaacatttcttttttacttttgttactgttttgaattctgttccagagatccaacatctttataaagctttgtgtttttttctccaggaccaaaaatattatagaatgtaggagctactgagttcataagcccatagaaagagcaaacgaaagcattgtgctcgtgaaaattagatttccttgattttggcagctaaaaggaccgaaagcaccactttttcaagcgcatcagtgacgtgctgccttaactaactcaatcacaaacctaaagataaaaacttcaaagagcttaagaatcaaagacactgactaacttgaatattcccacagttacgatggctattattggttaagagtggggatgggtgtatatatagtgacggccacatgtagaaaaccctagttgatcacggactaatgggctgagtttgttatttcctttattgggcttgtaagaataaatcacttggtcttagtagtttgtaagttagtggttacctccactaaatgaatatctttgtaattgttggctaactttaatgaatgtgaagcatgcttaagaaaacaaggcaaaatgtaaaatgagaagaagagaatcaataaagacatttaccctcctaatcaatctttcataaactgtatatgaattttttttagggggttttctgaccccaacataatttaaagtaaaataaatttgatcatatgaaagtttaaggaataattaaacaggttgtatcgccggaggtgtttccgtttacctctctcacacctatttctcttcttctatctgacattcgaaagctctctctctctatctctcttttttaccgcgcttgctacacattgtggcagacatcaactcctacctaaatctggtagcagcccattttcagatcgaattgaccccaaggagatcacatcaggtataagaatctcaagttagctcgtatcgtcttctttagctttcactgcgtttcccgttgcttaaacatgttcaatttcgatttattcgagtgtgatctggatcggcttcgttatcattttcgtttttttcccttctctgagtttggatccagtcaagtgatttagatgcgataaagctgggattgttgagagagaagatcaattctggttaatattgactatatttggctcttctgtgatttgcagtttttgggggttttgaggaatgaatttcttgcttcgatctgcttcttccgctactcatcggcctccggtgatcgaaccaccagctacgccgcctcaacctccccctgaaacagcgaagcccggagttactttggaagggctgattgctgaagagcatttcccacaatatccatcagtagatgaagatctcgatcgtgtgggtgatggatctggagaccttgatggtaatggagagtcaaatgctaagtctggtggctctggt

SEQ ID NO: 1993 - DNA, 3000 bp, Unknown
  misc_feature (1)..( 3000): cDNA_ID_2106027_gDNA_ID_1620475_Annot_ID_158138 3000 nt of promoter + ATG
ctacaccgtcatgaagagagcctttgatgaaggttggggggccgtcatcgccaaaaccgtaagctcttgagatttgactttttcaattttagagtagatgatgattgagtctgttttgcgttgactatgttggaacataggatttggttgtgtttgtgtatgatgatgatgatattgagtttcgtctgaatctgtgattggatgatttaggtatctttagatgcatccaaagttatcaacgtgacacctagatatgctcggctacgaaccggatccaatggctcagccaaaacagatgtaattgggtggcagaacatagaactcatcagtgacagacctcttgaaaccatgctcaaagagtttgagcggttgaaaaaagagtatcctgatcggattctgattgcttcagtcatggaggaatataacaaaactgcttgggaagagcttatcgaccgtgttgagcaaactggtgttgtgagttttccctaaaacacagattcttattcttccttgtggttagattctctttcactttgtctgatattagtatacattgttgaagagacagttctggatgattgttgtgtaggatgctttagaaatcaacttctcgtgtcctcatggtatgccagagcgcagaatgggtgccgctgttggacaagattgtgcgcttctcgacgaggtttgcggatggattaatgctaaagctacagttcctgtatgggctaagatgactcctaatattactgacataactgaggtgtgacatctaattctctcagcctttttgcttcctggtttttcaaccattttgtataaagcctatccttgtagaaaatgaaaaaaaaactttgatgcaagtttattgaaaagctccctacttaaagctgagttattgttactctgttttgctctgctttgaccatgtccgttttgctttttcttttgaatagcctgctagggtgtcactaaaatccggatgtgaaggaattgcagcgatcaatacaatcatgagtgtaatgggaattgatatgaagacgttgcgtcctgagccatgcgttgaagggttagctagatagcacttttataatgtcaaacgttttggcaaatcttgtaatggcattacaagaatagctaacgttgatagtgttttgcagttactccactccagggggatactcttataaggccgttcgcccaattgcactggcaaaagttatgaacattgccaaaatgatgaaatctgagtttagtgaggatcgctcgctttcgggtattggaggagttgaaactggctatgatgccgctgaattcattctccttggatcaaatactgtacaggtaactaaactcaacactatcctcactcttttgttttagactttatgccttgagagaaacttagttttactgctttttgttggaaggtatgcaccggtgtgatgatgcacggctatggtcatgtgaaaaccctttgcgctgagctgaaagatttcatgaaacaacacaacttctctacaatagaagagttcagagggtatgaacaactttccttttagacttttatatcattcttttcgcttgcttggttgcttgctgagcaagttcttcgtgttgtttgttggcttaggcattcgctgcagtactttacaacacacacagatttagttaagagacagaaagaagcagttgagcagagaaaagctgagaagagaggcttgaaatctgataaagattggaccggggatgggttcgtgaaggagactgagagtatggtttctaactaagttagtagcctgatgaagttatgaccacccaaatatttcaataaaggttcagcaacttcattcacaactcacatgcaaattacgaaggctctttctttcaaatgtttaaaatcaacttcttaaatctcacttgaaaagaaataactaaattttatgtttcttaattttcttctcgttgtgtattattcatcttgtatccatccatagcaaccatttctttgttacttcaagttggcttaaattttggccaataataataccatagaccttctccatgaagcaagatgttgcggtagtaaccttttattaaggtgtgatttggctaaagaaacttggtcttatatcattaaaattagatattgaacaaaatcaagtatgagctgatagaaccaagattagtaggaagctaatcaaacaactctggatacatttactaggaaaatatggtcatgcttatttttatacgcatcatttgaatccgaagaggggaaaaaggcaacaaaacgggcttaatgagaaattgactatggaagaaatatcaaaaagccaaaagtggccacgactttctgcatcgcaatgatacctatattagaagctacttaaaaattttaacacaaaaaagaaaaacatttagtttcctcctaccttacctacctacgtttacgtgatcatcaacaattctatttttactaatttactcattaatatatcttctaaagtatacataaacaaacaaactgtacgaagaaattgaaatataaatatcaaggaaattggtagcagttgttgagttatttcaatgatgctgtgaagtggaaacatttattacgtaacgcatatccgttttgtatataaactcttatttttcggctgtatatataatctttttagagattttccgtgagaaatagattaaatattgttgccataataacctgtaatctcaggagaatcctaacggaaaagagaatattagacgatagtattatatggagtattaattacttattaacaattctaggagataatatcagcacacaacaataaaagaaattactaatttactggaatcatgtattcaccgtaattatttaaggagaggaaaaaaaaaatacaagctctttctctataaacacacactctcaggagagaagttgtattgatcgtcttctctttccctaaacacactgattattttctctccgacgccgcc

SEQ ID NO: 1994 - DNA, 3000 bp, Unknown
  misc_feature (1)..( 3000): cDNA_ID_2148433_gDNA_ID_1620475_Annot_ID_158139 3000 nt of promoter + ATG
ggttctattacagatacaaagcttcaaatttgctaatgataatcttctcttttgacagaggatcactgagatctctggtgtaattgtcagcttcgacccgaaaccagtcccggttagtttcttacttgccctccaatacttttatattcaataaccatatgtctaatgttgttgtaacattcttgaattggtttagggtgactggaatggagctggagctcactgcaactacagcactaagacaatgagaaacgatggaggattagaagtgatcaagaaagcgatagggaagcttcagctgaaacacaaagaacacattgctgcttacggtgaaggaaacgagcgtcgtctcactggaaagcacgaaaccgcagacatcaacacattctcttggggagtcgcgaaccgtggagcgtcagtgagagtgggacgtgacacagagaaggaaggtaaagggtacttcgaagacagaaggccagcttctaacatggatccttacgttgtcacctccatgatcgctgagacgaccatactcggttgatgacacatttcatgatttgatttctctccaatttggttttttttttttcccttttgattgcacttttcgataataaaaaaataattcttattatgggcgtattgttgtgacattttgtgttttgtttcgaataattaaataagcgcttcttaaggtgaaaataaataataattagtgatttttaatctttgatatgatagcaacgaagttaaggcgggtgtttcggacgttgaattgggataagatttgtgcaattaataattaggaattatataattattgtgtaagataatctcgaatattcattacaataatatacacatgtgacctacttacttaggaacaagaaaataaatagaagataaaattccgaagacgaaggggtggtggaatattaggtgagaacagcgtaatggtcgtcacgtgctctgttttcctagtctcatgcattgaagttcgcaaactatagcttttggtaggaaaagtcaaaattaactttgtgatatttattgtcatgagtggggaaattcgtgactctctttcccactcagaatttacttcatagattaagcataaaagagggtgacgaaaagtagtataaatattttcctaagttttggcaaagtcatacaaattcacaagtacatttttagtacttcagtgcatagtgtcacactttaattgttgctgccatttgtacacgtttcttttaaagtagattaatgtggaaaatcatgacaacctacccacttgatttcgcttttaaataaagaaattgaaaagatataaagccatgatcgttgttgtcgactaacacgaaaaagaaaagcttacgattggtgatctatggaatatacaaatttaaagaatacatggaatgttattattagtagttcaactaataccttagttttataatgcagattccgatttacattttccaaacggaaaaaagcaattgttaggaaactttactttttaatgaacggaatattaggtttaaatgatagataaattaattgaacatggactctttgcatttcaacatgcaaaaacttctagctatttaaatcaatcttcgtttttttcttcttatttggacaaaatataaccgaataatatatatataattaaaattcttgtaaatctttataaatttatttaatttttttgtaaattctttaaaataatcttaaaattataatgagtcttgttttattccgttagagctaaataaacattctcaaaattacacactcaaaattacttttcccctccaatagcggcgaaaaacatcagcaatatcgtcacgacggacgaagaagccaacgatacgcttgtagcctcaaccgtgatgaaatagtggcggtttatcgtcaacatacggctcaatatccaacatcctattagataacattgttaataatgttttgcatcgtttaaaagaaattcttcaattagcaaaaaggaaatctataatacaaaatgacaaatttaaatattgaaaattaacttaaaatatgttattgtctatgcatatttcactaaagttaaatctaagataatagatttatggtgattatgaatataatttaggaattatactcttttttttttgggcaaataatttagtgattagacaatatccaaatagattagattaagaaaagaagtgagtacaattgtaaattgaagtttaacttgtgaacagtttgtaccaaaaaaaatttaaaaattaatcttaataaatcactattaattaataatttttctggtctcgaattaggtttttgtagtattaaaattcgataaaaaaaataaaaaaaataataatttatttgaaaatcttatatagactatatagtccaatctagaatcttaaattaataacttatcaatatatatatatatatatatatatatccatatatataatatacaatacataccttttatttaaatataaatataaacttatcaaaaagttacaatgtcaaaaatacgacgtagccatgaaattgtatttttatatattgataaggttataaacttattaattttatgatatattcacattttataagatatatatattattcagtatatatatattgattttattaataagtttataaataggtgcactctcatgggccatggctacattgtatttcagagacagtacctttttctatgtaaagtattcaataaaataatttgtggaaaaaataataaaaaaatcatataatttgtggataaaataaaataacgaacttattgggtctttagctttaagcttctcggcccatagtattaatacccaccagccttaaatgatatcgttttgaaaacaacccttgaagattctatctagcccaatgttcgccgtgtaagaagatgaccactgagcaaaaaccacgttaaaaccctccgcctctgaaattccggagggggatgaa

SEQ ID NO: 1995 - DNA, 3000 bp, Unknown
  misc_feature (1)..( 3000): cDNA_ID_2148441_gDNA_ID_1620475_Annot_ID_158141 3000 nt of promoter + ATG
ttaaatacaacaaaataattgttgcggaaatttagttccacaactaaacattattaagctaaatctaaatcctcatgtgattatgtcatcactctaatattattttttttaatccaatttttaattattttttctgtcattgtacttttattaatatttttcgcgaattattaaagaatgttgcttgttgcttaaactatacttgtattaattaaggtaattattggtaccaaaaagaaaatattactttaatgtacatattactaaaatcactcgttgacatcgtttttgtgtatttataagatgcatgtggtccgggggaggaaattacgccatttcgtgcgtcactttcttcttaatttagtaaaaactaatactatactaaatttactaatgttttaaaacatatctaattatctcacaaatataataataaagttttcatttttttatgaaaatgaatatttaaaattcaaatctatagaaaaaatggaaaggagtcaatgatcacaacaacttgacgatctctaaacaaaaaaaaaattgacgatcatctcccacgataacatcgttatttcgagtctgggggatatgcagcacacgtcattttctccagcctagaatttagatattaatatcacattattaagaaaatactacactgcagtttattatatacacaacattccatatagataatagatcagatcagatcaaaagtggacctacaaagcgaagattatatcaaaagatgccataaacgcatctctcacgctatgatccacataaaacatccgaaatttaattctgtttttacatccgacatttaattcttgttttctgtttttacatcatttaattctggttaccacgacattttttttgttttaatggtattagactctatatagacatacaaaactcaaaacaaaagattcaatgatcaccccctaccaaaaaaagaacagattaaatgatcacgagttggcttaacaacgaaaacttttctccaaccaaaaccaaacttaactattctaaatcaaactcaacagcaacagcaacgtctgtttacaacaacaacttaaataattttgtattaaaatcgaatgagagtaaataatggcaaagagaaaatcaaatgacatatgtatatgcatgatatatagcgcagcatttaactatatttagactgacttgagtagttgcaatatttggctctcttttttttgagtttggtgctttagtggatcctttgatggctcatcctgcttctcgtcgacgtcgagccagatccagagaagagcctccctacttaatgatctggtcatttctcacctgttaatacttacattttagtttttattttgatatagacttatttgctagtaattatggacatccagaagcaattagtctttcgtgggctcttgacatcgtatgccgacttgtttgcctaatttcgacccttgtttacggcgccttcaccgtttacgcctccgcaataatttacgatggaggtgtacgtataaagctgagaagattcaggggccaaaatgtatctccacgtcttggaatttcatggaagttagagagggctgtgcatggtggagaagaacaaggggagtttagggaaagacgaagaagaagtttccccaatctgtctagaagatgtcaccataggttttggttatgttaggctaagagattacatgcacaaattccaccgtgattgcattgctaaatagcttttgaagagtgcacgttatcctatatgtcgtgcttttgcaaaattataaacaattacctttgccttcgattatctatatagagctgctaattattgttttagactttttcgtggaattgagctacgacataatttgtttttttccgagttctgacaatccaatatcgcagcgatggaagtcttttgatagtaatgacaaaaacaccatgttgatcaaaaatcacatgcaagaatacaatagtacactcatgatgcataccattatagtaatttatttcgtcataaaaaaatttggattcaatctattcgataattgaaaagcagaaagtaatgttattaattgagatatagacgtaacgtgaacacatcatttaatatttagctagcaaaattactgaaaaataaataaaaaatagttacaaaactgttgatctgaaaataaagagaagtagatcgaactcatcttgaaccatctttatctcttgtgacttgtatgatcgttttgcctgactcttctcccttgacatgtccattactaatataaaagtccgactaatatgggcccaaaatgtaataaggaatggcccaaatctaatagtcataataagtttgtatcgcaatgagccaatgaggatttgttgttttgccatggaccgcataaagttggatgcatgcactgtgttagtggaaacttttcggattcacataagctagatcacatcttgtagttgtagatcatcagcacttaaacaatattttcatttatttattttgcgagaaaacaaaagatcgttttctttgttatctaaaattacgaaaataacatttttgttaagtaatggaatagagatattgattaataatgtgttgttatttgtggatttatatgaaaaaattgagttgttttgttaagaaatgattgaataaaattaattttagtttaagtcaaaaaagtcaaaatttagtcttaacaaagaattgactgttttccatttcaagtaaattaaatgacaaaggcactgaatctaggctttcccactaacagttacgctttcgtcttcctcgtcgcttcctcaaaatccttaacctcgaaaactctgaagatcttccagagagtctcagcgagtgagagagaaagctatttgttctctcgtgaagtccgagtgttggaaattgacaactggatttatggttggatttggtgtgtaagtgtgtaagcgattaggttttgaatcagcggaatcgaaaaaatg

SEQ ID NO: 1996 - DNA, 3000 bp, Unknown
  misc_feature (1)..( 3000): cDNA_ID_2148429_gDNA_ID_1620475_Annot_ID_158137 3000 nt of promoter + ATG
acatggctctcaacatcccaaaggaacgacccgaaagtaactgcctccaagacgagcctcttcattccaccgaagctgatctttatctgttcgtccttcgatgaatcgactgtgccctccggtgttattacaatctcaggcttaccaaacaatgcctctgtgtgcttctcgatgattccaactgcttctcttgatcttatagtggcgtatctctgcagcgtctccgcatcaaatgacatcacatatgaccttaatcgggatggtttaatctcgctgccgaagcccttagcactaactccgcccgcaaatgcaccaacctctgggtgagacgatacagccgcctgatatgttgccgtcccctcggcttgctcaacgcttgttttactttcatccgacccacccggaagaatcttcatcgtcttctcaagctgaaacctttggtccaccctcttcaagaaatatccatacatcacagaagcagcgtaaacttggccaactctgagcttgcttatctgtgcaacagagttcagatcacccattctgcttccaagaatcaaggcaagatggttgtgaatcatctcgtacatctcgggcgagtgaagccgctcgagtttctccactttggtcggccaagtatcaacccgaccagacggatctgaagatgggcttactgaaggtacaagtgatacgttagcttccatgaacttttgaaccaccaatgcatacaaaatctcttccaatgttcttcttctctcgttttccttcaactccgcaattctcctaaacaccaacaaaacattactcattcagaatcaaactcatgtacaacttccaatctatcgtatatacaaacagataatgagtaatccttaaattttagttatcatttatctagacacagagaaaagttcacatcacgtctccttcacttaatatgtcaagcaagttttagtcttttagatcgaagatctatacctgtagagaacgatgtcggttccaggtacagacgctgaatctttgttctgtccctgagagtcccgatcagtttgaagctgctcaagctgctgttcaacagctgcaggcacaagatgaggatggctcaccaaaatctgagacagaaactgaccagcaggcgattgcagctggagcggagcgatcggtttgggggaagaaccagatgaagcatcattagacgctgaagaagctctaaccacaaaacttctccgagttttagcagtcgttgttaagctctgtaatgatcttgaggatctagcagacgcgttttgctgcaagtacataattttttttttagtttttgctgattacgaggaacttcctggtaaaatctgattgaacataaccggagcagaatatttggagaatgattcgattttgaattttgatcataaaagtaggttaattgaatcaagtacaagagatttgggacatacccttaaacgaagttgaagtcttgaagaaccagaacgcgtgaatccagggccactggcggtaaggaacatagatccagaaccgttgtcggaagttctcgatggtacgatgggagatcgaaccaaactcgaggtcaaggcatccatggttactctctgagggtgaaaataagagagaagtcgaagttttggtcggaggaaggagataagaagaaactttagactagcttgagagagagaaatgtcgagaatggcgatcgattgatattactggtaaacagactttggtttagttttcctgagaaataatgagagtcggatttgattatttataataataaatgaaaggactcagaaaattatatttttcgtttaaatattttgagaccatggaaattatttgaggccgtgtttatgttgtgtgttcttcgtttcgtttgtagtttgtacaataacgatattttaaaaaaaaaaagacgaattattctttttgtagcgtcattgaaatatcgaacacaataatatcactatctaattacctgaactagaaagttcgatagtaaaatccttgcagtccttaaaactctaaagtctaaaccaaatacttttctcttctgttttcttattcaatcaaaaactttttagaaattactggatgattaggtatatagtattttgccattttggtctaaaactttacatcatatttagttatttaccaatctagaatggtctctaggtttttaactttttaactttttaactttttttaactaatcttagaagcctactttacgcaaactaacgagaaaaagtagagtcaaactaacgaaggaagagaaacgttgagagccaccaactgatgttgtgtccattcccacttacacgtattatttatgaaacgttttgtttgttttgtgacgcatgggctctttaccccacttgggctcaagaatcgtatacactagaaaacaaccttaacctcacggtggatccgttacgttacgtgttcgcaatttccacgtagtcgacatataaattgagtaattctaaaactatccattttccgaaatttgttggtaaatcaagcattagttgatagagacagagaatcttaagttatatccactccgttggacaaaaaaaaattaaaaataactcaaggagataagatagagaagaaaataactgttaaatacattgattaaaactaaactaatatatttttaaatattatggattagggaagatgggtctattattatttgggtgattaatgtattattaactaattatgaactttaactaaaaacgtcaattattttcacgtggcatgaagttgaagaaccgaccaattattacaacacactcttctcttacatctctatcttcttaagttctttcctttgttcttcgatttgatcaccaactctcacatatttcgaaatcgtcacactttgttgcgtgtcgtcttctctctctcataattcttgagtttcacgtctcaagatttgatcacttctgccaattttccagattgatctctctaatt

SEQ ID NO: 1997 - DNA, 3000 bp, Unknown
  misc_feature (1)..( 3000): cDNA_ID_3065483_gDNA_ID_1620476_Annot_ID_158172 3000 nt of promoter + ATG
aacaaataagaaagaagataataacagaaccagatatagtcataacagaaaattggaataaaaacgtaaaccaaaaaatcattttgaagtaagattcaacaaaaatagagacaaacacattacagtacagaatgcataaattcacaaatataacagggacgcattgatgtaatagaaactccttgtaccatgtttttgggggatgaggtaggttgacttaaaattttatgaagagaagcattgcctagaatgatttgctttaatcgcgctgttaagtcgttttcattgctgcagcaagaaaatacattctttcaagaaaaattcagcagtagaaaatataattgacatgagaaagataaacaaaacgatagctaacctttgaataccaccaatcataacagacggtcggatggataaaggtggcacaagcatgcacgttatgataagattctcaggtctataggcaatataaagaagttcgcagtcctgttatcgatttccgaaagaaaaaggaaaaataataagaatcagcatgactgaattattagtaaataagaaaatccttttataccaatgcacatgttctgagagcaagagaacataacgcaggaagctatgtagaaaaagatgtgcattatagataaaaactcaaatataccttgtcactcattcttttaaaaagcccgagcaccaagttaggatcaagaacataggtaagaggatttattgctgcagtagactgctttgtgtgggatattgcagatttacattcatcaatctctccaccatggattttagatcggtcatgactgatgcctataccaaactgcgctgcaatcttttttaccatccctgaaattatcaatagattaaccattaccacgatatcaaaacgaattgggtgggaagaagaatataacataagttcagattaaccaataacaacagaggttaaaggattttggcattagatattagaattcccaaaaaccccaattttctgcttgtgctacttaagaaacttattagaatgttctacgagctaaattttgcacctaagatgaaacgcatgaggaatgagaaaaaaaatcaaggttataaattattaacttcaaaaaagcatcatcgaatctaaatagtttaagccaaaaaacagttcaaaattataccattcaggtagccacattttttgcacgttataattctctggctcgccatcgtactgcacttcttgacaacggcttttgccaattctgtcttcttcaatggctccattctgggattccgcatcttcctcaagtgatcttcatacaatttctcatctaaaagcatgttggaacagcgctgtgggaagaaaaaaacaatatttgtgaagtactattgatgctacaaagacatcaatataaccagccagtttttttttttgaaaggcatcttcccaagaaatattttttatgctgtatttttctccactttctccattcaacaaatgtaaaagggtcaacaaacagaacatagaacagaaactagagagacataatctgctaactctgttaccttacaaatgcacttcaaaatatcaaggataaaattaaagtatccaacgttgtaaactgggaggtcaagcttcagatatccatagtgtcccggacaattttggaagtttccttcacaggttgtgcatatagactttttgtttggaggaccctgcaaaatcataatgaacaaaccatttagtacttatcttcttacaatgaaaaaaatatcttggagtatagaatgtttagaatcacatatactgatgcaaataactgcaggaggcaaaaacatgacatacaatacttgccatggttattggcataagagaagttaaaccaaaagatagtaggtgtatataagaaaatcggataccattcgaggatccaacaagccgttttcatagggtttaaaactgtggtcgtataaaccgatgttccagacttgaacttcagcggctttcatgacctcaagatcagaaagcacagagaagtttatgctttttctgcagagataatagtagtgtcaaaaatcccaccaggaaaaacaacaaaaactgacaaacaagttttgctccacaatatcaaaatctcaaaaactataaaatcaaatcagagattcatgaacaacgccctaaggcacacaatatccattgtatcaagaaaatctacagacagacataaactaagactcttgaaagcatttagcagagaatatgtcatctagttgacaaaagagttcagacacccaaatccaaatttcagagcttggaacaaataaattatacattagcaaaaagaaacaaattttatgcacaatgagtatgatccagctgctaaaaggagcgtacttgagaaaaattatatcaatagaaccaatggtttaacttgagcagaaaaaactgaaagaacatacattttaagaggaccaacatcttcgatgtagggcttcttagtgaattcaatttccatcttcgtctccatctctacaaacaaaagctacaaaaaaaattacccagaaaaaaaaaaacgacttaagttttgaatcggcgtaagagaaacaaaaaaaacacagtaaaatcgagaccgatcgaagaatcaacttacggtgaaaaagacgacggtgaaggaaggtgggtttagggtttaagaagaagcagcagagctaagtaacaggcgggagatagagatggatgatccaaggagagagcaaaaacaaagaaaaaaaaacaaaaaacctagccttggtaatcgaactcgtgaccttaggctggttgacgtagaacactttgccacggagctatatattcttaacattaattaggtcacgagatattttatataactataatctcttgagtttttttatatttaatatcctttaaaaacaaaaggaaaacagggaagggctttgtttgtctgtttgggcttttttttatttttgggctttgttggcccatctatg

SEQ ID NO: 1998 - DNA, 3000 bp, Unknown
  misc_feature (1)..( 3000): cDNA_ID_2105356_gDNA_ID_1620476_Annot_ID_158175 3000 nt of promoter + ATG
taaaagaaagaatcacttagaaaatctgaggaacaaaaagattgtttcgcaaagtggcattgtctctctaacatgagattctcttcaatggcctttaatttggattcactggatatagctgttttagtaatttttcttttcatttatcttgataataaattctataaagattattgccatgagtattagtacgtaaaacttgtgtaagtgtcgtatttcttcagatataatattgtacttgctattttttttttcattttttgttgtcacattgtacttgctatatagtatttatgttctacaaacattcatttactctgaattttgattcgtttattaataattattcaaaattgttttttttccttcgaatctaatttgtgtattatataattttataataatacaaaaaatgacgcatagaagttagagcgcataaatatatatccttcggcgagttcttttcagtgttattctttcgactctctatctctcactctttctcgctctagttttctcggagatagtctctctctatctaattacattttccgggaaaaagtttctcgggaaaatccaaagaaaaaaagtctcacgaaagatttatcttcgttgattcgctgcgatgagtaatcgtttcttatgctgtttaggaggcggaggctcaagtaaagtaatgcaagatccatcggaactaccgcaacaacaacaaccatcggattcgtcggattcatcggatacaccgggacaacaaagtgaaggtgacgacgaagctgacgacgaaggtgaatttgggataatgcgtatctcaataatttttatggaaatgacgatcgtcaatttctcgttttttgatttcttgtttcacaagaaactctggttttagagaagtacaagcaaatctgtttgaagagtttacttcttttggaattacaagtagttttgatctggtttttatcgtcacattgctgcgagtgaaagtagtagagttcttcatgtttgtatatttgtgaaattgatttagggttcttgttcttcgtttatctttctttctttagatcttgtgaagttgatttagggttcttgttcgtggttatctttatttctttcttaacttttagtaattcatttacagatccgagttctatagttaaatttcgatggaatgatgtcgtagagggaaccgataacttcgcgataacacatttgatcggccaaggaacctacggcaaagtctatcgctgcaagttcccagaaggtcacaaggtataaacccaaaagtcttgttctttttagttaacatccgaaactcaattactaaatttagcaactttggtgtaattaggttggagctgcaaagattcatagtaatggtatcacagatggtcttagtgagaccgtagcagagactacaacgttatatgcagctgatcacccaaatgtgattaaacttgtcggcaaatattatgggatggaaaaaagtgtcctagtctacgaattcatgcctaatggctctcttgaccaccatctctttggtaatcaaaactctgttttagttctataccaattccagttatgttaactctttctctttctgtagctcacgcgaggcaggttcagggtcttactctgccaactagggttttggattggaacacgaggttgagaattgctgttggtgtagccgaaggtcttgtttatgtacaccaggggctttatgcgattcacagagatatcaaagtcgaaaacattttacttgacaaggattttgtgccgaagctgactgattttggatttgcgactaagatcgtttacaatagtgatggtgttgagaggctgagggagttcaatacgcgtggaactcaaggatacatagcaccggaagcagatgagttcgcgttggtttcgactaagtccgatatctatagctatggagttcttctgttagtgcttttaactggaaggaaagcctatgatctggcgagacctgttgcgaaagagaaactcactgattgggtaagactcaaactttgtatctaagttttgtttttatacgtttcgtgctctgtaagtaatgtattaatttagggtctcacgaaagtattttttttttgcagttaatgccagtatggactagattggagtatgcgcctatgatagttgatgttgcgctcggtaataagtattcaattgaaggtttaaacagactacttcaaactgcgaggatgtgtataaacccacaggcacttgaacggcctgccatggattttgtggaaacgatggttcgtgaagctgcagctttcccggtcccaaaggagcccctggtgaaagagaggatttcgacttcgaaataagaagtctaatcaggcggtttgatgtaggcttttttttggtgtttggtttttcagaaacatattttttgtaacggttggttttgttaatgcttctatgatttgagacaagcaacatcaaggtgtgaacgttttgagacaatgccatctgtgcaatagttgttaatcaacgactgagatcttttgtcttcatttctctgttactaaactttcttaaaataggagagaagatgagggagaggaaaaaacagaacagaaaagttcttacctttggaattttcttagatcctacgtctttcaaaaacaatctttctggtttcccgatgcattggcttggattcgagttccacgagaagccaccaaatcaaataggatcagatggatgattcttcaactttacaagacatcttgtgaaagatctttgactcttgatcatattataaacgaacaagaagctttaccttgttaggttatctttagatccacgtctctttaattgttttaagtagactattagcgttaacattcaaaaattcatgttgtttttgatcccatttgatataggagtcatttgttggtattgaatctatttgtaactacctgcgttgatataatggaggaagcatcaacatcgacaccagcaccaatg

SEQ ID NO: 1999 - DNA, 3000 bp, Unknown
  misc_feature (1)..( 3000): cDNA_ID_2148396_gDNA_ID_1620476_Annot_ID_158178 3000 nt of promoter + ATG
ggttatttttcgttaatgtgaaaaagtttctgctagaaccattagcaggaagatccgtttgtgatatctagagatttctgatggctatgagacatttgtatctatcttgataagattgttatctgagtataagctgtatgctcttcgtgattttcctgctaatggttctagcagaaactttgggcttgtgacaaggcagccatacaatggaatggaagggaagctgcttccttaactgagcaaggtgcgattttatctttagtgcaccaaatatgatttacttttctttcataaggtgttgatgaagtttgcaatgtgtattcgtttacagctctcgatttaggtttgttttgttttcagaaataagaacacaagaagaaatgtattagccaatttcgtttttcaaattgtgtaaactcttcttcataagaactccaactttacaaaacaaaatagtagtttatgacgaaacacttttcttaccagagttatgtaactacattgaacaccggaacaattaaactattgtaagctggtttgaaaaataaacacagagttataatcagcaacgaagcctaaatgagtccaagatgtttgcaatgttgcttccgtgagatctacgcaagagacggataaaaggcatgagcttctgcaccaaaccccaaaacagatccatcctagacatcttggtgaatctcagagccttgaccaccacgaaattcccaaactcattcctcgccagcctcatcaacctgtctccatcgcaacccaaaagctccacaaccaccacaaccattgactcctccacctccaaaagcttctccacgatgtagcttccatacttcttaaacgatagctcaatgcactgaccataaagattaacggcgatgttgtgaatgcaacgcgagtcatacagtgtaagcacatgttggaccacaaagttccctgaagcatcgttgcttagccggagagcgttggatgcgaccaattctagtagctgatctctgtagtaaggatcgtcagcgtcggttatgatatcattgagcgcgatgcagccgtgctggtcacacgctaggtcgagagcgtggtagagaatgcgctcgtacaatgcctttttcatcaccttgtcgaaaacgaccatggctcgtatcgtcacgtaggatgcgtatttgtcggtcgtgatgtggaggaagcggcgcaagatagcggcacagaagaaggcgtccacgtcatctgatttgccgaggagcttctgcacgcgtctcgagccgaacttggttgtgacgatcgacatgaagtaatcggagtcagacgtaagcaacgaggccatcctctgaagctctgttttgtctgaatttgagatcatctctttaaagtaagacacaccatcgccgtcagtcattaggttgaacagagctgcgtgcaagggcgtggcggaggcgcgtggggcgaatccaggaggaggaatggaaccggagattcctttagggtttggtaaagcattgaacatggtcgacattgaaaagggattatcagcgactgccattgataaatctcttgatgatctacagaaatttctctagaaaagggtttaatcagtttgtgtgatttgggagaagtatgagagacttgtgaatgagagatctgtggtgatgcgtagagtatttatagaaaagttagggcttttgtttttctagttacaattacacaactcggattactactaggaaaaggaaaaggaaacttatttggtggagtttcctttttgttttgtcaattttccttttttctttgcattttcgtaactgtcatgattttaatctatctttttttggtgtgtgaagataataataatctatctgaaacaaatggaaatatgtaatttgttttgttgtaaatcgacaataatttaacatgtcgataatctctaaagtctaaaccaacccctcgcagtccaagcttttgattttgtccacgtcactaatctcagcatgcgtaaatttatctggtcctacttgacacgtaggttagttctgccacgtcatcaaactccaaaataatatcttctctgacctttttgttctaccacctcccaaaaaatcccagtcttctcttcctctgattctctatcaagttttttaaattttctttctttttattctattttagtagcaatttggttctgtaaagttgttggtaaaagaaaaatagatacgaatcaaaacatttttgaatgattaggtgattaaatgctaagcaaatcagattaagcaaaaatctgttcttttttggttgtaatttggtttttcaagtcagatatggtgagagattctggtggtggtggtgttcatcaatggattatgtgaaaaaggtttgcttttgtttgtcttgtcgcttttacaatctgctgctgtttgaattttgtgcttatttcattaagtattatagcttagagccttagagtttgattttgtatctggttctgtagagtttataagaaatttgagaaagtaggagatctttacaatcatctaatgaataaaagaaactgtgttcaaagtttgttaactacttaccaagtactgtgataattttccattggaacattgatagcttttgattttagaaacaacaagtttcagattgttttctaaagctgagtgtgtgctactattgaaatttgatttggcttgtttagtttttctttggacaagtttgatgatttatccaaattcagttttttattttttggttctggtgtgagactgtgatcttcttacggaatgttgcttttttttttgtttctcgtttcttattgggctgaggttttggtgaagggattagaataagtttggggaaagaagaaatgtgcaagtgttatgtcagtgtagaggggaagtttctgcagaatcttagctgttacttgatgctgcttctattctatcttgttcatggaggctggtcttgacactttcatgagatattagtattctaaaaatg

SEQ ID NO: 2000 - DNA, 1316 bp, Unknown
  misc_feature (1)..( 1316): cDNA_ID_3065471_gDNA_ID_1620476_Annot_ID_158182 3000 nt of promoter + ATG
ctttacacactctccatttaacatctttggttatggattcttatgtgaataaattaataaggaatatctcaatctgttttatgatgtttgtttcttgatgcagcacataccggctcatgtcataagggactatgacttaaccttcccggagcgtataacagtcgtggacgaaatgggagcattggagaaagcaatcaagattcaaaagaatggttgcatctttgtcaagggatttggtagtttcatcagaaggaacaaaatgaagatgactgacaaaatgatatgcgagcttaagaggactggaggtaatctggttcacaccatcaaggtcaagattatcagcggatgatctcttcactaagcttttgtgagtcttatgtgtcttagctgtgagtggtttttattatgttactaatggtaaaatgtctatcttaggatttggtttataactaaggatttgggcgtgagagatgttttcatgttgaattaagactttctatatagagttcatgtctcattaaatctctctgttttctcttgcaacaaactcttgagttatgccgtctagacaaatcttgttgctttgttgcctgcagtaagtagggcaacgtcctccaacggattcatacaaatagtacttacattgttcggacaaaggtcgtcctttgtgttggagtaatctcaaaagacattatagtaaaatgacaaatgggtttgggtttgtgttttgttgttggcaccacttttgtatacaaacttacaaatcaaaataagaaagagaaccaaacaatatgttgcaaatagatttggaggaaatcactaggccttccactgactactataaaaccccatctcgaatgggaccaaaataatttaggtccattggttttcgcgggccttggttctttcacgaatcttcttttaaaacgaagtcgttctaagtagtcttttacggttttaccatttgaagcaacaagtatagaaacagagagaaacctctgttttcaagtttttgctacaaaagtcgaaagccactcaacggaaaccgtactatctgagaaatctggggtttgaagaactgtactcatcttaaaattagggttccaaatctcagctctacattgaagtaaatgtagttagtaaagttttttttttccatttgaaacaataagcgttcaagtctctgcttttagctacaaaaggaaaaaaacactaaatcaaacaataagatcggagaacgcatattaaccttcagttaaatcaaacaattagggtttcacagagatctagacaaagagcagacagaagtgaagatg

SEQ ID NO: 2001 - DNA, 3000 bp, Unknown
  misc_feature (1)..( 3000): cDNA_ID_2148406_gDNA_ID_1620476_Annot_ID_158181 3000 nt of promoter + ATG
aatatcgttccgtatagacgctttaatgtgcaagtatgtaactctaacaacctaattttcactttgacatttaggcaaaagtaaaattaaggttgtacttggtaaaatcttgataaagagattgaaagaaaggaatgtgggcatgaaaatgaaaaaaaaaaactagataaattgtgaaactgttaaattccctaaatttaaggaaagtaagaatggacatgggccgtccgatcagatatgtgacctaagatggctgagagagtagttgaatggctggggttcaatctctgttgtacacgtggctttatactactcgttaaaatccatgatcttcgagatttttctgacactcttaagttttggcaaccggctaaaaccagtcggaatgttcatttgacctaccccactcaataaacatttccaaagaaaaaagagattcgtatggacacaaagaatagatatttttaggtcattttcattttttcgcccgtaacctgtgttaagaacataatacgttgttacgtacattttatttctatttttaataaacaataatttcctttgattgtaaaagaatccccctttattggcttttgttctttcctatgtcttcttgtactcaaaatatattttgttttagactttcgaaattatccattttggaaacctatccatttctttgttgatctctttgtatcacattgctctcaagctatgtagtagtcttagagatttagacaatactaatgaatacaagataccataagatttgatacaatatgtttgtgttatcaacgtttgatcggatatgtgttttttttctacttatagctattcattcaatgaaaatctaaaagaaaattgagacacagttgatgcagagataattttctctagccttgatagatttttacaatgtgatattgtaggaactaggaaacacatgcttcatttttatttaggccatgaatgtttgtagtttttaaaatggtttttggattttggattttggtttttggtttttagtttttgattttcttggtttttgtttttggtgtagattttagtttcttaaaaaacttgaatggtaatttgtttagattttggtttttatgttaatggatagtattttttttacaaaacaaatctaaaaataaaataaaaaatgtgatcgattgtttttgagagagaaactcccaaaacatagattttggttttctttgaaaaattgttaaaacactcaaaaactagatttcctatattttaggaaaacttgttttctcaaaatcttgaatggctacaaaatagattttagaaaaaattaaaaccaaaaactagtttaaaaaccacactcattcaaggccttactaaaacttggctacaaacaaggcgaagataacatacatcattcaatttcaatagtaattaatgtgtcaaaaccttagaaattaaaacaaaatttcatcactatgtccagtaagaaaaactaaagctatcaaacctgatgttagtgatttttttccccatcatctttaactattttccatacacattcgtttttgtaataataacaacttcttaaaatgatataacttttgttactttatgcatgtaattgttgattatagctagcttctacacctttttctaacatgtgacacatttttttttacatgtgacacatttgttacgttggttggatacttgttatccatataaatcaataaaaagtcatattattctatctcactcttttaagtctttacagatttttgtttgtgaggaggacgtagctgcaaatataggacccgccattaaatgaaaacaaatgctttgtcttcaaagctatgaatatgtgacttcaaagtgttttttggtttttatgtgtcttcaaagttgtgaatataatagtgtagattcgcttttctttaccaatctttgtttgcagattaataataagatatactatataggatacaaaaacgaatttcgtttgattcattctataaatttgaattactaaatcactttagttgagtttgttcaaggataaaaagtgaaaccccaattaaatttgatgattttcagatgtgtttacaaaatgtttcgaagaacacgcttcaaattgatttaaccaagatgaacacatccattaaatcctcattccatgaacaaaatgcacctcattgtccctaggccttaacagatctatttagtactaatactgtatttaataacttatcttggtaaagaaatcacagaaaagcttaacacatacagtttaaaccgtaaatttatcatagtaaaactgtaaaagcactaatcataaatttaaaccaagctaataaaacaaaaacaagtagcacgtttttacttcaaaccggaaacaggcaaaaccggtatcaaattgccgagaaagatggaaggaataaataaatgttaaaatgttcctttgttgccactaacccacaggcttacgtcccatcatcattccccgttctctttttattttctctaatcgccgacgattatctctttcgtccggcgatagctattttgtctcttcaaatccccatagaccaatactcaactcttcatctccatgtctcctcaatctcatttctctccttagtgattgagctttttccttctttctctttggttattattccttctcctcctccgtcgtgtttttgattgatttcagaatctaaatctccgtttgatttctccatactcgtgctgattttcacctatgtaatgtgatttatgagctctgtttatttcaaatcgacggcgatcgttgaatttattgatcaatgtgtaagtaagagcttgaagaaatagtttttgttgttgttgtgaaagctcagagttttgtttgcttttttgttgacttttttgagattgatgctggatctcaatctcgacgtcgactcgaccgagtctactcagaacgaacgagattcgattactgttaaaggggtttctttgaatcag

SEQ ID NO: 2002 - DNA, 2734 bp, Unknown
  misc_feature (1)..( 2734): cDNA_ID_2148385_gDNA_ID_1620476_Annot_ID_158173 3000 nt of promoter + ATG
taatgtcttagtaagaaattggattatccttgacaccatttattagctgttcagggtccaacaactggtcaaaacacaaaagaccataatcacagagcttctctaacacttgctttgattttcataaactaataatactatctctggctcatgtttcaaacaaaaacctaccctcgtcttctctatatattccctagggatcaaaatatgcaagagaaagtagacgcaagtttcagtgaagcacctgccaaaccagattgtacaccagttaaccacatgactctttcaaaaattcatggggatgccggtttccacagagttcaaatttttccatgctgtgcgctccttagtcttcctcagcctgcatcaggatttacaagactctaataagctcagagtatggtgaacttacaaatagccttcttatcaataagtatgaatcatgcacagccacttgtcgggtttgaaaatggcttcacttttttggatggaaacaaaagtataagactgatcagtattccacaaaacctcgtaactccaccaacatcgttacctaaaagttgatatcctaatttcagtcctagtcttggtcaatagtttttctattcctctggtttcacactactttttatatctttggcgttctcgagaacttcacatgggataatgtctgtgcaatcaaaatgtttctgttagttcatgaaatagaccaaggaaccaacacattaacagagaaaatcgcatttaagatatacataccggacgatcgaggatcatatgtactcgcacaagttgagttgaacaggacgtggaaatccttcttccttgatacaggaaacgtccaatacgttcaagcaccagactttcaagtgcctacacaaatattgagcttacatataacatttctagtttattccgcaacttcggcgagtagattagagtgaatggtaacgcttcaagcactccaaaactttgcattcaatcatattcaaaatgtagtaaaggataaaaaaaagggttgcatcactctaccaaaacaacaaaaacttcaatgcaaataccataaaactttaacaagagagttccaaatatgaaatccttctcaatcttaattgtcaccaagtaacatcttcaactacacatacccaaaaatttgaaagatttcttagtttcaactacaaaaatttctcaaaccttcagctaaaaccccgaattaaccaacttcaatcatcaatctccttcagtttcctctttttcttgctcttcctctcctctgaacccatctcttcatcactctttctctttttcttactcttcctctcctctgaaacgatctcttcatcactcttcctcttcttcttcttctccttttttctctctccactcctttgctcgtcttccaacttctccttctccttctcatcaacaacatcttcgtctttgttcttctttttctcctttatctctgcgctcttttgctcgtcttctaacttctccttctcatcaacaacatcttcgtcgttgttcttcttgctcttcttcttctttcgctcctttctatctgcgctcttttgctcgtcttctaacttctccttcaccttctcatcaacaacatcttcgtctttgttgttcttcttcttcttcttctccttctttctctcccttcgctcttcgctcctttgctctgcttccaacttctcgttcaccttctcatcaacaacatctgcgtctttgctcttcttcatctttttctcatcacgttccctaccataaactgattccacactcacagcttcactattccggtaacgaatcttccgaccgtcgaattcgtcaatgacattccgctcactctttgcatcggagctttgcttcgtctccgttgatttagtctccctatcggagcttggcttcgtctcctttgatttaatctccctgtggaaactctttaattcagtgaaggcagcggaggctcgccggaggtacgcactaacgtcttgagaggcgccattatcagaggaagcgaatccagagagaagcttagccgcctttgagagggagattggttcagcactaacaactcttccggtgacagtcttcatcggaagaagctcgaaaggtcgtcgcgcctctctaactacacaaattagggcaatttcccctaaaagctgacaactttcgaaataagtagaaaacacaactacgaaagtaccccttgcttgtttttttttttctcacaagtgaacatatcatagatgggccaacaaagcccaaaaataaaaaaaagcccaaacagacaaacaaagcccttccctgttttccttttgtttttaaaggatattaaatataaaaaaactcaagagattatagttatataaaatatctcgtgacctaattaatgttaagaatatatagctccgtggcaaagtgttctacgtcaaccagcctaaggtcacgagttcgattaccaaggctaggttttttgtttttttttctttgtttttgctctctccttggatcatccatctctatctcccgcctgttacttagctctgctgcttcttcttaaaccctaaacccaccttccttcaccgtcgtctttttcaccgtaagttgattcttcgatcggtctcgattttactgtgttttttttgtttctcttacgccgattcaaaacttaagtcgtttttttttttctgggtaattttttttgtagcttttgtttgtagagatg

SEQ ID NO: 2003 - DNA, 3000 bp, Unknown
  misc_feature (1)..( 3000): cDNA_ID_2148389_gDNA_ID_1620476_Annot_ID_158174 3000 nt of promoter + ATG
gaaataaattttattgattgaaagaaaatcttatagcctcttgtcacattgctttaccatagacgtttaatgctttgggccactattgccttcccactcacaacatctacaacatctttttttgttatgttttttttccatatcatttagaaaattttcgaaaattgacattatgtagtcggtggtagaacaagtttgagcttcatattgaatatgtacgtaaattttattgaaaacttaccaatatagacgacaaacggacaaaattttttagttgattctcaagatccaagagataaaatccaagtgaatatgctttgatcaaacgcataattctaatgtacatgaacagatgatcctacttgggaagtacattaaaaataaaacattaatttttgtaagtaattacataggtatgccattaaaaataaaattttaaagagtaaattaatttatctctttaaggattaaaaagtcaaatattaatttaattaattaaatttaattaaaaaacgaaatacattattaattttcaaaaataataaccaatcaaaatcaacatattaagatttgctatctaaattttagttagtttaatttaattagaaaaacgaaatacattattaatttccaaaaaagtaatctattgaaatcaacaaattagattttatatctaaattattatattaagtttttattaattattatagttcacttctcactatgattctatttttgcgaaaaaataatatcatcactataaaaaaataattagagttttttcgcatatgccataatttgaatttttaaaaaacgaatataaactgttcaatacatgaaaaaatattataaagagtgaaaaatagatttaagaaaactttctactgagtaacgggtcataatttgaaatatttatattcaatttcatacatattatattgaaaatttataatcttatatactataataattaataatatattagatttttttatgtgtatgatgtgattcaatttttaatacaagctggaaaatcttagaattgacgggtttagatcgatattaatacaagatggtatactacaggtgaaacccttaaattaacaatcaaactacaagtgtataatcttaaacactaaacaatatagataatatcaacaaaacatatacaactcacagtttattatacatttaaaatcaaataaaataatatcatatatttttaaatcatctttacaataaaagtttttagtttaactaaaatataagcctacatgcggtatactgcatgttcatatctagattataggacttattggatctaaagacgggtcatcaaagatttcctaaacttaagcaaaatatacttaatactcaaatatctatctgttaccaaagtataaacaaataagttcgtaaaacaatttaatattttatatacaaaatcaattaatcttaatcacataaaaattagcacaaaaaagtattcaacaattaaaaaattatcaaatctctgtgttatataagttttgatactatattcgaataaagtgtaatataccttttcaatttgtattctttaactaatttaagctaactaatatatttgctaatcttatacctatcaaaaccgactatcgtttcttatctctatagtatttttgcaagacttttttggtggatttgggtaaaagtgcattcgggtcacatggtacatttctctattaaataaatatggtgtactcctatattattagctaaaatgtttagattatagttcagagtcatatcattaataaaattaatattaattaaataaatagctttttggcaagacggatttggagtgacgggtttttgaatcaacattaataaaaaataaatataattaatccaccgtttcaatacgggttaaatctttaatttattattttgtaagactactaatattaaacatatcaaatcatcctaatttagaaaagattatataaaaccaaaaatgttatatggtatgtataatgttactatatatgaaattaaactataaaatataaatgtattagagaatgatacaatttgcaaaacttttatatataaaaaataattcttaaattttaaaaattactactttaaaaaaaaatcacgggacggataaagaaattatagaacatgttttatttaggaattgggttatatggtggatgtatttgaatcaatatttataaaattttaaaatattattaatatgctgttttaataggggttacaacttcagttttttaacaattgtctcatggattcgtgttatagcgttacttaataacaattattaactgtaaaatataaatattttataaaaataaaatttgtaaattttaatatatattactttaaaaaaataaatcgtcccgcggtataccgcgggttaaaatctaatttatatatatttgtccatcagctttcaaatccatgtgtaccccactcaaatggaaatacttttaaaccggttcttgctcgggctagaccggactgatccgatcaacaaaaaatcaaaccggaaggaccaataagtctaatttctttgtgaaagtttagagaacctatggaggcaaaggcaatgatcaatctatctgtaaaggatatataaaaaaacaagtcttcatttttctctcactgtccattgcaattgtagttttatattcacagatccaaagtcctttcattttcttggattctgattctcccacagtttcatttcttcttgtgtggggaaatctgcatctttgtccactctcttttattttcccaagaaaggaaacaaattcccacaatttcttgtcttctcttaaagttcttcttaagttgaagcttcttgtctgtttttgagatttccagtaagaagaaacttcgctaattttcccgcggaaattctcttacaatcataaagttttctttttttttgctctcgagaaagttttgagaatttttacttcttcaatg

SEQ ID NO: 2004 - DNA, 3000 bp, Unknown
  misc_feature (1)..( 3000): cDNA_ID_3065548_gDNA_ID_1620477_Annot_ID_158187 3000 nt of promoter + ATG
gtaaagcattttggatgtttgatacatctcttgggacgctccgggaaattgaaagaagcttacagattggtaaaagaaatgcatgtgaaaccgaacgatacagtattgggagctttgcttggtgcatgtaaggttcatatggatacagaaatggctgaacaagtgatgaagatcatcgagactgctggaagcatcactaacagttacagcgagaaccatcttgcatcgatatcgaacttgtatgcacacaccgaaagatggcaaacagctgaagcgttgagagtagaaatggagaaaagaggtcttgagaaatccccagggcttagctcactagttttgacctgagtctataccacttagctttatttgaagaagtaaaatacttagtgattatgaaattgcctttataaacagtgtttatacaaaaaatcctaaaatgggatttgatgattgttatctgcttgatattgcaaagtgcagacatattcccattagtggttggagaaaaggcaaaaaaatatggtcatctcaagattcgaacttgttggtacccatttcaacctatacaaattacataccactggaccaaacgcaaacttattaaaagtttcatttctgcttctacctctagttggtatctttttcacggctttgttcatgtggtctccattctagttgtgttctactcttaggtgctatgtccttatataaaatctatgtgttcacaagcgatcatcttggtgtcagtcctgtcaaaattgttgataattttgtggtccacagataaaactaggaataccttactatctagctatatcttaagattttatgatcacaggaataccttactatctagctatatctaggcatatatttcttactagaaccatatttgttaaagaataaatattctttgtttttatatatcatttgttgattttttttaaaaaaaatttaccacatgatccgttagattgatattcactaaataagatgttggagaaaaaattatttctactgaaaagtaaaacaatctatacatttaaattagggtcaatttaacttttaggcacaatttggtaagaatattttttttttgtttgacctataaatagaatagactcgacaatcgatattgtttcgacgacaaaggttttgcactataaacatcaaattcactttggaatgtgtcgttcaacctatcattcctcccattctaggaggtggtatcaacatcgtgattcctccgaatgtagatatagacctgagtgtaactacggtggacaaagaaaacgcgtattgggatttcaacttggtttgataagaccgggaaaaacctttgtcaaagttgttatagaagttggaaaagaagtcattctaaacatacgcacaacgccaaaagacgcacgcttcccgaagacttacaaaaataagccacctacttcgtatcttgtgcttcaaccaaagagatctcaacattatccggatttttggaagataaattggtcaagtactcgtcaccaccccacactggccgcagagacagttctaggtcaagagatactgaagcaacaaatcctcaataggctgaggtatcttacatttaatgctgatggagagttagttggtttgtaataacaaatgttgctctttctcctttaagaaacttaacgtatgtgttgttatcagagtttgtgcttttcaatcagagcaacaaatataaatgtggttccaaggttatacatcgtgattcctccgaatgtagatatagacctgagtgtaactacggtggacaaagaaaacgtgtattgtgacatgtctggtatatgtattgagttagattgatattcattaaataagatgttggagaaaaattatttctactaaaaagtaaaacaatctatacatttaaattagggtcaatttaacttttaggcgcaatttggtaagaataatttttctttgtttgacctataaatagaatagactcgacaatagatattgttccgacgacaaaggttttgcaccataaacatcgaattcagtttggaatgtgtcgctcaacctatcattcctcccattctaggaggtggtatcaacatcgtgattcctccgaatgtagatatagacctgagtgtaactaccgtggacaaagaaaacgcgtagtggtgataatggtgaaatcgtgggaggtgaaagtctttttagttagggtttgttcttgtaaatcgtaaaatgtatgtggaatatgaatttcttatattaattttagagttgcttattgtgatcggtctggtctatgtattgaggtagagtcattatgtgcacttgtcatcatttaaatagtttgattgatgttaacttgtgtgttttgacctgagtatgtacaacttaaaaaaatgatcaaaataaacatgattaagcgagttctatgcttttttatacacaaatatcgataccatgtatattcaaatcaagaaaatattcaaactaactatttgaactacaaatttttagtggaaaaaaatatattgacctaaacggatggatgctggtacaaactaaaataatttattatgacgatgatgttagagtttgttaaacaaaatagttatattgaaggaatgggttttgatcccaataaacaattttaaaaaagaagaaggggcgttccgagaattgaactcgggacctctcgcaccctaagcgagaatcataccactagaccaaacgccctttttgttaaattgttacaacagtaactttatatattatctattgtttatttccctccagatattaggtagttcacgctccccgcgaaccctaacgagaccactttactgtcttttgcgcgcctaaaattccccgtgtcggctttcttcttcttcttcttcttcttcttcttcacttttggatctacattgaaatcgcctctagagaaatcaaacccggcgaattggactatcgttgtcggagtttgtcagtggatgaattgcc

SEQ ID NO: 2005 - DNA, 3000 bp, Unknown
  misc_feature (1)..( 3000): cDNA_ID_2047091_gDNA_ID_1620477_Annot_ID_158210 3000 nt of promoter + ATG
attaaggaaggaagaccatggaattaaaatatattaaagcgactaacacaaatttaaatcataaactaacaaaagaaatatgtctgtcattttgttaagtttttataataaagaaaatatattgacgtatatgtaattttaaaatgggccatgcagcatgatatgcattactaagcgaagaaacaaaaatagaggccgaaacgcggaaaagagctgacaaatcgtaaagagtgtcttccacatgggattaggtcaatttcaccataattttcatggcacttcagagcctattgcatgtggtggatacatataagaaaaataagtttatagttttaaaactaaaattgatttagtcaaaaacgcttaataaaaatttcttgtcaacacataaaaaataaatgctataatagattgtgtttttggatagtatggaaaatccaacaaaacaaaatttagatgatatacgattgttttttatatctgttggcaataaattgagatgtataattgaaggattaggtacctttttctgaagaattcgccataatatatacatgcataatgtcataaaacatggagaaaaatgcccataaaaatgtagattgatgatttatgctatttcagtccgcgttttagtccatatttgggccttgcgagtaatttctgcttttattttcgagaactctgtctctgtgtatagactatagagccaagatgggctttataataaaaagtagatatgtagagggactttttggagtaatcgataattatgaattataattacaaattaacaaaccagaaagtagcttgcatatgcttcacattttagatttccttcagttatcatggtaaatacttaagatgctacttgtccattccataaatgttccatgtcctcgtccatatcttacttagcaaagagtccaaaatgtgggatttttctgtcctttaaaaacttaactctgttttttatataccagaagtgggagaccaaggcaacaattggtaactaagtttcaacttttttgagtttttctctcctgactgaatggctttttaaactttataaactcgttctaatttgtcttttccgtttaaggctttttcgtacgttttgcaaatagctaaacttttgaaaggaaaaagtaacctcgcgtttttctcatttatattgcacagaatatagatacaagttgcagctattactgataaaacgtagctacttttttggttgggtttatttgagccaaataacttcattaaaagctgtagtaccaagtttgggtctatcatttacactgctattgtctttgctatatgactcgaatctgatacattcgatttctaaagattatatctaatttttaagcgaattaaacttttgcaagcttggttttgatctctactattctattgactagagaagatgtcatagttgggtgtagaataaggtattgaactgacttgcttttattgattcattaactatggtatttatacacaatgatctctatcaagagataaacataaatccctaaaatataggttagaaactctatcatcaaagatattgtactaatcctaatcggattacacatatctccaatagagttgatatctattaacggcaaaaggagctaagctgccatgatgacccatgaagtatatgcctgcatgctaatacgcagaaaaacattgaatgtgaaagtggcaattattcgaacactcaaatttttttatcttcctaaaatcgtgctcgtgaagatttttcaaaacaaccgatataaccattggtgtttagttgtttacctttctttttattgcatacgatagcccattcttaggaattaaaccatgggggcaactggcaagcatttataatcattgatgttactttaattttcatttaatatgaatattaaacgtagtagctatatcattgggttggaattaatgactgagaaagaatgaatgaaagagagaaacgtgtactcgcagtagaccatataaccattggtgaacaattttatttggaatcgtatccataaatatcatttttatactagtacgcttgcttttacgactactataccttgtgtgggcggaccaacaatttaagaagggggtgtgggtgtaactggcccggtaaaccataattttgttttggccatgtacaaaatgagtttttggcatacggtgttttgttgtatttgaagatcccactcaatatcatttttttttccccaatttgattaatcatttgctttcttgaaagattattttccttataaggataagaataaacagtttcctttttcatggaacaaatttttcatgtttcaaagatattttcattttgtctgaagtatcaaaacagttttacattattatttgtctttttctgttcaaaaaatttaagcaaattagtatataataaataaacagatttgtgtatagtattgaaacctatatccatgagcaaatgtgtggtatataaattagataacaattcttttttgacatcatataaattaaataacattgaatttgaaattaatcacatttttaaaatgtgattgtacgttatttattctttaaaattatgaatactaattaaccaatatatgtcatcgaaataactcaaaatattgtaaagaaaactatttgcattttacatatagatatcttgtaaagttaattacgatatccatagaaatgttatacaatctttgactaaaaacgaaagaaagaattctaataattaataacctttggtgtttttaatgagagacgtggactctctcggtagaaataatacaatgattaacatacaaatttgtaactatcattagccgtcactcgccaccctcgataggacctatatacacttatacacaacactagccacacacatcctcaagcgataacaccacaaacaaaacaacaaaccaaaaaaaaaaaaaagagagagagagagagcaaatctccatcatcatc

SEQ ID NO: 2006 - DNA, 3000 bp, Unknown
  misc_feature (1)..( 3000): cDNA_ID_3065519_gDNA_ID_1620477_Annot_ID_158207 3000 nt of promoter + ATG
tttgataactcattacattttgtaagaaagctgaaatttttaaattgagggactgtacatagaaggagtatggagtcagcaatgtttatcgtgagaaaacaagccagatttttgtatattcttaaaaatgaaaagatttttctatattgatgtataaccgaattcaccatgcatggagataaaaagggtggggcatatgtggtactaatatatcattcaagatttttcttatcgtcgcattattattgtggccttattattttcatcatggaatgacatgtgacacattcaaagttggcatagattccccaaaacaatcatacttttggtctgttttggttttctatctcatgttgatgatgaaatgactcagattctattttattatacagtataactttatctaaaatgccattttacgacatatttttgttttcgaatagtttaaagtgttttgttagtatgtaagtttggtttgttgtagatttctgtctagagtacggatctctactgatcacagccattttgatgtgatttacaaacaaatattttttgagtcatatatcaaatcatacatcttgacataatttgtatatatgattgaattcaggttggatacttgctcaaataatcaaaattttgttctcattttactacgtcgtgaagattcatgagttttcaactccaatcgattggattgaccaatatcttttatatagtattacattattttctatcatatgactaatatgaaattcccaacagacacctttttttttttgggcaaaatcctaacaagcatatcatatatttttctcacaaagaaaatataagaatctttagtatatcctttagagttaacataacaaattcgattctataatacgactacgtgttgaattggctatggttgggctatgagactagtgggattgtcccacataagcttaataatgcacattcatgtttatattaactaaatcttgattagaatcacttacccttttccaaaagttttgagaaaatatatcttttggggaagactgaacactaaataatctcaattacttcaccaacccaacaaaactagaatccgataccaatttactaaagagtacaatggttataaatcaataagaacattgaaaaaacagttcatgaaaagtatccattattcagtgtcagtgtagttcacttagttgaacaaatattgtttttactctacttttattctttttttttagttttggcaaactattctacatttatttggtcttttctttttccagtgtactaaaacaagtttccattgtttttatctgattggtgtgcaagaagatgaacccactctatttgtttattctaactttaaacacagactcttggtttctagaatataactcaccatgaaaactatagaaacaaatgtcctattttaatatgattttaacttataacaattagtattgacgtggatacattaattatatagtagggccgatgctaacgttcatgaatagagaatcccagtataatggtgaaactataatcatgacgtccacaaagaaagattgcaacttgtagtggtcggggaaccttaaacctcaactttaccttaaccattggaggaaaaattctataatgaactttaactttaatgtatttgctgctttcttgacttatattgctaacatcatttcaagtagagggatcaattcattaacatgtacagctttttaatcagtggatctctctaagtaaatatcttcctccatttcatggatttttttacatgtcatattcaccttgattacagtcactttcgaatattacttataacggaaataatatgttttttttttgctttacacatctctggttgaatacgcaattcgtaatttcctatgtgacacctgaaatcttgtatctttcttaaaagttatagactagcttcttgtggatctaacaaatccttttagctaaaaataatccattaaacctagttccaaatgattcaacattttggtatactaaattactaagtgtatgtcctagggatgttgtgaacaaaaaccagtctgatttaaacatactcttggtgatatatatatatagtcataattttcttaatcaagtacaaattggttcatgattttttgatccaccaaaacatttctaatgaaacgaaatactcattaaagaacaacactcacactaatgattgaacattaatatgaaccatgtgatattgaagtgaaagcactaactttaatgcttaacaagtcatcccaaaatattagagaccatgcatatttgtaccagtgagagttcagattaatcttgaaccttgtgtgtataactcagtaaaaactgtccacgtggtagatcaataaacaaccacaatctggcacacatgatataaagacaaagatttttgatatgtctccaattaatgtaaaatcttaacaataaaaaacaattctatagtatggatggtaagagatttgttgaaggagaagaggacgtgggaaaaatacaaagaagctaaaaaaaaactcattgcaaccacaaacaaaatggtataaagagacaaaagagagtaatggacatggggaattacaaagaagcagaaaaccttgcaaccacatgaaataaacaaatgtctttgtcataagataatgaaatcacactgttgtctcaatgtttgtttagatctatctgatcatatatcgctgaaacaaccacacaaaaagcaaagccacattttatataaagacccatcatatatcaatcaatccccatctctcttcacatgcccatttgaatcgtatctcctctcatttcttcttttgttttgttggagttagataaaatcaaaggtctaataaaagtgtcaaaacccttatcgctataacctccactaccatcttaaacttctccttataactcacgcttctctgctttcttctctcagagtctaactgctcaaataagaaaatg

SEQ ID NO: 2007 - DNA, 3000 bp, Unknown
  misc_feature (1)..( 3000): cDNA_ID_2047113_gDNA_ID_1620477_Annot_ID_158205 3000 nt of promoter + ATG
ggctcttccggttactctccgtcgcggttacagttacgaccaccgtggccgtcgttaaaacgtgcagcagctaatccattttctaggcagaataaacgccgtcaaggcgctgggaatgtccgtatcgatgatttctccggcggaactggaagcgattccgatgaagcggtggagcactacggcggagaagagaataggttagtccaaattgtgctgttcaaggatcttgtgtattacaggattgtgatggtttttgcaagtccttaaggtctcagttctgcaatattttgaatgtttgtgctagctttagtgattatttgtgcaagatcctcagatatgttgttgcaatttttgacagagctatagaaagacctgagcaatcatcaagatcaatgtctgaagaaactgtttcatctgagcttgaagaagagcctcaaaaagtgtttacgcacactgtaacaagctggagcaacggtttcactgtcgatgatagctcgttaaagacgttggatgacccggaaaatgcaacctttcttgaggttactaattcaataccttcttgccattttcaagttgtgttacatacaacatagtatagttacaacttacaagggtattggtctttctctgtattactttagataacattatgttccatgacaatgccagatcatatcaagtatggagtccccacgtgaactcggtcaagtccgtgttcaagtcaaaatcattagccgtgaagaagaaaactacactgtatatttgtctccttctctcttctctgattcaaataagccggtaaagtgaaagcccttattcttatatcttaacaacaggaatcacaagccggatcagactctgcctcaactaagccaccaccagctttagcaatgaggttatatgacaatgtgcttttctgaaggagatgaatcgttaatttctcaaaactctgaagaaatgtgctgttcaagaatccatgatactgcaaggatcttgtgtataggataaagatgttgatggtttttgcaagtcttgtagaagaaggtttttgaatgtatgttgtagctttaatgggatgcttgtgcgaaagctaaagatgtagatacgcttttcgacagagctaaggagtcagctatagaaagatctgagcaatcatcaaaggtattgtctggagaaactgattcagctgagcttcaagaacaacagcaagaagaccagccatatgaagtagtcacgtacactgtaactatttggaggaacggtttcactgtcgatgatgatccgtttaagagtttggatgatccagaaaatgcagcttttctcgaggttactaatatcaatatcttcttgtcattttcaattatgggtctttctctgtacttgtttcacttggataacataatgttccaagtatatgccagaggataacaagtttggagtccccacgactactcgatccacttcgtgttcaagtcaaactcatcaagtgtgaagaaaatttcagtgtatactgatctccttccctctctctctaatctttttctcttctctgattaaaatgagctaatatttttaacaacaggagttacaaactctagccggatcagagtctacctctactgagccaccattgacgactacacaaccaccatccatgagctcattagtggtggatcctgcagcgccaacaacctcgatccagcttatattagcagacagcacacgcattgtcacccagttcaatactcaccacaccattagagacattcgatgcttcatagacacgtctagaccagatggctccaaagactaccaattactcatcatggggtctcctcctacaccactgtcggactttgaccaaaccatcgagaaggctggcatcgccaactctgtcctcgtccaaaaattctagctcttttctaagcacattagagaccaattctatggttacaaaatagcatcataaactttttattgacttttcgctagtcttatgtttgactagcgaaattattattggtcaaacgctgtgtagtcgtctttgatcatgaaaaaagtacagtttacgtacttgttgagttttatactttttattctcacacaagtttctctccttaactatagaagttaattgatcaaattaggacgttgatggcgtcataatgaaatgggattggtgaattaaacgaaaattgacgacttactatttgacgaccatgtaaaacgtttacttttcagggttgttttgacttttttgactcacctgccattctgtcaaaccgtgcgtgtccatgtttattgatttttccttctgttctttccacctatgtgtgtgtgtctctgtgatgtttataaaaaaaaacaataaatttttttagaaaatatctggatgttccaggtttgttattcgattcagagcaaaacgattaagtgtttaaatggatttagatttacagtaaatatccagatagagagaaagaaggataaggagagaagaaaacgattactttcttctattcttgttcattacaaccttataatctcaacatttgttttttttcttttgttctctctttcttacatatttcttttggatttcgttgtcttttttttttctctcttttcttctcctctctctcgctcgatttcaatttgggcgagaaaggagcggtcttttgtctttcctgggtttatcagctagatccctcttgcctaaagtttgtaactttcttagggttttcttctgatttcctctctctcggggttaattctgctcaaaaatgtaagcccttctccttttatttcgtttgttagattttgttttgcttgatctgattctgttatgtaattttgggttcagggtttgattcagaggcaaatctggttttgtttagacaataaagttcgggactttttgacatactcacagctggtttttagctttggttcttatagagagtaatagtagtgaagggtttgtgccaatagttagaaatg

SEQ ID NO: 2008 - DNA, 3000 bp, Unknown
  misc_feature (1)..( 3000): cDNA_ID_2047149_gDNA_ID_1620477_Annot_ID_158194 3000 nt of promoter + ATG
tctttatactgcatataaacggacagcaacttcgcagacaattttgatgggtatggtctacggaataaccacgaagatcaaacttaaaaaatgttacaatgtttttaagaaaagcgaagctcaaatgtttcataaaagaaacaatttatcttaataatattttggcctcagacacatttaactacgataaatatgttgtacaagtaccgagactagtggatctatttgtttacaatttcacctcttcgagcatttgtggatgacgaaagagaatggtgtcataactattctgaagacaaatgaagtcacacatatcaaaacaggctgaagaatggccactcatgtcttgccacacaattttatattctctttattttgcttttttcactaggtcacatgtctcttgctcgaatcacctctcttttgaaccatttagtatgtaacacagttctgaacaatgggtacatgtgaatctctctggcaattagcactaaaaagctgccattttttccgttcacagtatcttttagcttcttttgactttttttttttgttttggacaaatgcaagtcctgatcaaacaatgaattacgttagattactaatccgacaagagcaaaacaatgatcagtcacgtgaacaaagatttttagtgtacggacggccccgttgcaactccaatttgggctcttgggcttttcgtgtcatctatattgaaagttttttgaaaagacaatgacccaaaagccagcgcatctctgtccaccccatctggacctgacttgtgtacgaatgtaatatgacgaattataattcgatgtatcaagatgaattaagacgagcgtcaaatcatgatgatcactaaggttgaatgaactgaatctatagtgtgtgacaaccaatgaaactccgagagcatattgattttcgcgacattcacacaaatgaaacggctgtgatactatcatactactttagaaatgttatgttatttatttttatttaaaaacagagtattcacaggttctacaaaacgttcataaacttaaccggttttaacaaactattaagtcgagtaaaccatatgtataaatcagtagtttcctatgtgtagtctctaaatacacaaaaatgtttttaacaagattcaaatatataaataaatttatacatgttccggtctacttgccaaacatattgtttcacactcgatacgttttggactaccagatctttcaacgaccgtatgacgatatgtgtgacaacaaatggaatggagcattaaaaatgacttcacacttctatgtatctaatacaaagagaaacataacgaatctaatcctccaagccacgttttctagtacaagcctaaaatactaaaaagggtaacctaaacaaataaaaaagttataattaaattttcccccaactttttctaaagagtataagcaacaccaaacccgtttttacgtagaagcaatgtctctctctcatcctataaacactcgacaaacaacacttttatgaattcacattcaagaacactataaacgacaactaaaaatataatttacaaaagaagaacaaaaaaatgtcgaaaacattcaaagccataagagaccggacatattcaggcgtaggagacctcatcaagctcctcccgaccggaaccgtcttcttgttccaatttttaaaccctgtcctaaccaacaatggacattgcctcctcatcaacaaatacttaaccggagttctcatcgttatttgtgccttctcttgttgcttcacttgcttcaccgatagttaccgaacaagagacggttacgttcattatggagttgccaccgtgaagggtctttggccagattcatcttcagtggatttgtcttcgaaaaggcttagagttggagatttcgttcacgctttcttctctcttatcgtgttcagtgttatttccttgttggatgcaaacaccgtgaattgtttctatcctggctttggctccgctgggaagatctttctcatggttttgcctccggtgatcggagttatctccggtgctgttttcacggtgttccctagtagacgtcacggaattgggaatccctcggaccacagtgaggatgatgcttccgagatgaaatgatagtatatgattttatactatttatatgcataaaacattaaaatgtaatggcatgtgtttattcgtggaatggtaaatacgaaagttttataattgtgatctttttttttgttatttttatttatgtatttgaatgctgatcatatgttgtgtgtttgttttttggtattttttccatatgtttgttgataaactcaaaagtaataacatatctctttttatgctcatagtgagtgaatcagcattattgaaatcactagatgttaaggagttgaaacttaagagacacttatatgaactaatgtatatacacacaaatatttctatatatccttttattttgaaagaaattagctaggaaaaattaatgtggatgggccctttaacaaaaaaaataaaaaaaattaatgtggatgttaaaaaggtaagcctagagtatgaataagataaaaagtgtacgttcttgattttctttagatgataatcattcaattattatacattgatttttaagaaaatgataaaaaattactaatattggtcatggatgtcgtgagccatttttctttttgtttgttctgtttcgttcttagtaccaatgattacacaacatagttgcaaattgagaaaacaaaagtttgggtccgaagagtaagggcttcaaatctattgaaataaagttaggggttaaatattgaatagacaaaaggtttaagactatatcgcaatttatcaaaagtaacattggatgttagaaccctgctgccttaaccactctaaaaccctaaatcccgccatcaaaagctagaagaagaagaagaagagaaaatcaaaaccaaagcttttggagaatg

SEQ ID NO: 2009 - DNA, 3000 bp, Unknown
  misc_feature (1)..( 3000): cDNA_ID_2990944_gDNA_ID_1620477_Annot_ID_158196 3000 nt of promoter + ATG
aaaaacgaacaaaagtaagtaccaagctagaagcagaggaggctatagaggtaacggcgagagatggtccaccgcgagaggaggaaggagttagggttttggagcagacaccttgccggacgtgccatattccgaccttctccaacgccggagcaagcacatacttccccgtcgaatcgtaagctatgttcgaatctacagatgaaatcacaccgaaagaggtcgctgcatcgtatctttggtaagccttcaccattctccaaaagctttggttttgattttctcttcttcttcttcttctagcttttgatggcgggatttagggttttagagtggttaaggcagcagggttctaacatccaatgttacttttgataaattgcgatatagtcttaaaccttttgtctattcaatatttaacccctaactttatttcaatagatttgaagcccttactcttcggacccaaacttttgttttctcaatttgcaactatgttgtgtaatcattggtactaagaacgaaacagaacaaacaaaaagaaaaatggctcacgacatccatgaccaatattagtaattttttatcattttcttaaaaatcaatgtataataattgaatgattatcatctaaagaaaatcaagaacgtacactttttatcttattcatactctaggcttacctttttaacatccacattaattttttttattttttttgttaaagggcccatccacattaatttttcctagctaatttctttcaaaataaaaggatatatagaaatatttgtgtgtatatacattagttcatataagtgtctcttaagtttcaactccttaacatctagtgatttcaataatgctgattcactcactatgagcataaaaagagatatgttattacttttgagtttatcaacaaacatatggaaaaaataccaaaaaacaaacacacaacatatgatcagcattcaaatacataaataaaaataacaaaaaaaaagatcacaattataaaactttcgtatttaccattccacgaataaacacatgccattacattttaatgttttatgcatataaatagtataaaatcatatactatcatttcatctcggaagcatcatcctcactgtggtccgagggattcccaattccgtgacgtctactagggaacaccgtgaaaacagcaccggagataactccgatcaccggaggcaaaaccatgagaaagatcttcccagcggagccaaagccaggatagaaacaattcacggtgtttgcatccaacaaggaaataacactgaacacgataagagagaagaaagcgtgaacgaaatctccaactctaagccttttcgaagacaaatccactgaagatgaatctggccaaagacccttcacggtggcaactccataatgaacgtaaccgtctcttgttcggtaactatcggtgaagcaagtgaagcaacaagagaaggcacaaataacgatgagaactccggttaagtatttgttgatgaggaggcaatgtccattgttggttaggacagggtttaaaaattggaacaagaagacggttccggtcgggaggagcttgatgaggtctcctacgcctgaatatgtccggtctcttatggctttgaatgttttcgacatttttttgttcttcttttgtaaattatatttttagttgtcgtttatagtgttcttgaatgtgaattcataaaagtgttgtttgtcgagtgtttataggatgagagagagacattgcttctacgtaaaaacgggtttggtgttgcttatactctttagaaaaagttgggggaaaatttaattataacttttttatttgtttaggttaccctttttagtattttaggcttgtactagaaaacgtggcttggaggattagattcgttatgtttctctttgtattagatacatagaagtgtgaagtcatttttaatgctccattccatttgttgtcacacatatcgtcatacggtcgttgaaagatctggtagtccaaaacgtatcgagtgtgaaacaatatgtttggcaagtagaccggaacatgtataaatttatttatatatttgaatcttgttaaaaacatttttgtgtatttagagactacacataggaaactactgatttatacatatggtttactcgacttaatagtttgttaaaaccggttaagtttatgaacgttttgtagaacctgtgaatactctgtttttaaataaaaataaataacataacatttctaaagtagtatgatagtatcacagccgtttcatttgtgtgaatgtcgcgaaaatcaatatgctctcggagtttcattggttgtcacacactatagattcagttcattcaaccttagtgatcatcatgatttgacgctcgtcttaattcatcttgatacatcgaattataattcgtcatattacattcgtacacaagtcaggtccagatggggtggacagagatgcgctggcttttgggtcattgtcttttcaaaaaactttcaatatagatgacacgaaaagcccaagagcccaaattggagttgcaacggggccgtccgtacactaaaaatctttgttcacgtgactgatcattgttttgctcttgtcggattagtaatctaacgtaattcattgtttgatcaggacttgcatttgtccaaaacaaaaaaaaaaagtcaaaagaagctaaaagatactgtgaacggaaaaaatggcagctttttagtgctaattgccagagagattcacatgtacccattgttcagaactgtgttacatactaaatggttcaaaagagaggtgattcgagcaagagacatgtgacctagtgaaaaaagcaaaataaagagaatataaaattgtgtggcaagacatgagtggccattcttcagcctgttttgatatgtgtgacttcatttgtcttcagaatagttatgacaccattctctttcgtcatccacaa

SEQ ID NO: 2010 - DNA, 3000 bp, Unknown
  misc_feature (1)..( 3000): cDNA_ID_2047125_gDNA_ID_1620477_Annot_ID_158201 3000 nt of promoter + ATG
gttaattggactaactcgacgttggatcagttaaagaatctaacttttagtgatattgataaactctctatatcgaatataccaactggatcatccaggttaagaaacttctttaatatttgtggctttagttgattctagtgatgaggaatattctgactagtatatgtaaacaggttttgggtgcatttgtgtatggcttatgttattaccttttggacttgctttgtcctacaacgagagtacaagcatattgcttccatgaggctacagtttcttgcttctgagcataggagacctgaccagtttactgtatgcagacattttaaatctcttggtccacttactttttgagttttctgaagaggaaatgtggtatgtgattctattttttgatgaatgtaggttcttgtaaggaacattcctccagatcctgatgaatcagtaagtgagctcgttgagcatttctttaaggtcaaccatccagactactacctcacttaccaggtactacaactttggttgtctaacttaggatgttccatgttttcggtgtattcatcttctcgtttaacaaaacaggcggtctacaacgcaaacaagctgtcggaactggtacagaagaggatgaaattgcagaattggcttgattactatcaaaacaaacactctaggaatccatctaaaaggcctttaataaaggtaagacaaatgtatgcaaccacattgctttcttgatcttctctttagttgaatcttgataatcttctatttacctgagcagattggtttccttggctgttggggtgaagaagttgatgcaattgatcactacatagaaaaaatcgagggtctaacgagaaaagtaaatgcatcagttcaatcttacatataatcttgtgctactaaacttgtttttgatcatcttgttgtttctttactttgatggtttcagataagtgaagagaaagagacagtaatgagcagcacaaaatcactcgtacctgcagcttttgtatccttcaaaaagcgttggggcgctgttgtttgctctcaaactcaacagtctcgaaacccgacagagtggctaaccgagtgggctccagagccgcgagacatatactgggacaatctagcattaccatatgttcagctcacaatccggagactagtaatagctgtagctttcttcttcctcactttcttcttcatgatccctatagctttcgtacagacactcgccaatatcgaaggcatcgaaaaggctgttccgttcttgaaaccgcttatcgaagtgtataatctctcaaccttaattctctgttccttaacttgtgatgatgtttctctgaaatctttgtgtatgtggacaggaaaactgtaaagtcatttatccaaggttttcttccgggtatcgcattgaagatattcctcattgtcctcccaagtatactaatgctaatgtcgaagttcgaaggcttcataagcaaatcttcactagaaagaaggtgtgcaagcagatactacatgttccagttcatcaacgttttcctctgtagcataatcgcgggaactgcgcttcaacaacttgacagcttcctaaaccaatctgcaaccgaaataccgaagacaattggtgtctcgataccaatgaaagccactttctttatcacctacataatggtagacggatgggctggtgttgctggagagatactgaggttaaagccattgataatatatcatctcaagaacttcttccttgtgaaaacagagaaggacagagaagaagcaatggatcctggaaccataggtttcaatactggtgaacctcagatacaactctacttcattcttggtctagtttacgccgctgttagccccattctccttccttttatcctcgtcttcttcgccttagcttacgtggtttaccgtcatcaggtttaaaacccaaatcacagaatcctctgcttctttctatattctattatatgcttaagaaactaagttctttttgttgcagattataaatgtgtataaccaagagtatgagagtgctgcagcgttctggccagatgttcatagacgtgtagtgattgcactgatcgtatctcagcttcttttgatgggattgcttagcacgaaaaaagctgctcgttcgactccattgcttttcatacttcctgtgttaaccattggattccacaaattctgtcaaggacgttaccaacctatatttgtcacataccctttacaggttttctactcttaccaagaaatgagtcttcttgtgtttttggtcttcttagtgagtttcttcttgttttcaggatgcaatggttaaagatacgttggaacgcatgagagaaccgaatttaaacttgaaaacgtttcttcaaaacgcgtatgcacatccggtgtttaaagctgcagataatctagctaatgagatggttgtggaggagccagcgcccgataagacgccggatttagtggcgactaaacgtggctcaaggaggtttaatagcggctctgctgaaacctttacttagtaatactaatacttagtgaaaagtggtgatgagatttttatgattttttacgaacgtttcttcttattaatagaaagaagttttccaaagtttactttggtttttgctatatcatatatatacaaaaaaaaaacaatatcaaatagaggtcatcaaatttatctaaaacaaatcaaataagttattagtcaacattcagcaatattgaaaaacaaaagtgcaaaaaaattaaaaaggtaaaattgatttccttttaacacaataattgatccttcccaaatacggaaccaacacaaaaagcctaaaagcttatcgaaaacaattcaatactctcttctcctgaatctctttacctttttacgttgacattgatcctcgcagtgtctgattttgatcgaagaagaagaagagatcgggattttttcgcggttgtatatcgcctatg

SEQ ID NO: 2011 - DNA, 3000 bp, Unknown
  misc_feature (1)..( 3000): cDNA_ID_2025094_gDNA_ID_1620477_Annot_ID_158203 3000 nt of promoter + ATG
acgccgttaaaactctcgttagttaacggctgactctgaagtgaaaactgaaaagtcgaagggtctctttatattttcagaatcaaaatctgaaatttatctctcggtcgatccagtcttcgtgagtgacttcgacgacgacgacgagtcacactactcttgagcttctcatacttcgtaagttcactctcctcttctctaaattgacaaactttttcttcgttttctgctattattgacgacgagacttgattttgttttgaaatgaaatggttcaagtagctgacttcgactatgttcttttgggtttttgtcattgaatcttacttgtctgatttggtcgatgtttaatcaattcaacacttaaagattcaatttttggattgacacttgcacatttttattcagacccaggttgatttgggaaataatggatgaatctctggagcatcaaactcaaacacatggtaagtaaattttcatagatttaatctctctgaatacatatatatgacttcaatatgtttgattggagtttttttgttgtcccatattcaattggatgctttgttaaaggataaatgtctatcaaattatgttgactgcgttattctttctaaatcatattgtgaatcttggaacaaagcatgtatacaacaaatttgttagacttgataactccttttctgtttgttaagaattgagaatgactattggggttgactaatgcatcttttgtggctccagaccaagagagcgaaatagttactgaaggaagtgccgttgtgcatagtgagccatctcaagagggtaatgttcctcctaaagttgatagtgaagctgaggtcttggatgagaaagtcagtaagcagattataaaggaaggtcacggttccaaaccatccaagtactctacatgcttttgtaagtaccctttagctttctgttgattggatgttgatttttcgattgcacttgttggcctattgctactgtttatttgaatctttctatctgaccaatttcatattggccatagtgcactacagggcatggaccaaaaactcgcagcacaaatttgaggatacatggcatgagcagcaacctattgaattggttcttggaaaaggtatgtggctgtcgaatatgtactctacacctccatttcgttagatgaatcgtcattggtaaatttgatgagttagcttgtgtattatatgaacccaatgagatggatatttgggaggaaaaaagattgagttttgtattttttttgcttcaatgctgattagcccattttaacgtcactatacaattttttttataaaaaagattgtgcactaagagtgaaatgttgtctgtgagacagagaaaaaagaactagccggtttagccatcggtgttgctagcatgaagtctggtgaacgtgcgcttgtgcatgttggctgggaattagcttatgggaaagaaggaaacttttcttttccgaatgttccacctatggcagacttgttatatgaggtggaagttattgggtttgatgaaacaaaggaggtaagttatttcctataccatcatcttgtttccttaccaagacgactccacatccaagctttatcccaacctccttgcttacctctctgacttagatgatgtattgaacagggaaaagctcgcagtgatatgactgtagaggaaaggattggtgcagcagacagaagaaaaatggatgggaattctctttttaaggaggagaaactggaggaagccatgcaacagtatgaaatggttatgcatctctctctatctctatctctctttccaacaattacggtcaaagtttaggttttcaggcatacttagtgagtctgctcgaggctcttgtgtcttctttcggcttttgattagtcatggttttgctgtttcaggccatagcatacatgggggacgattttatgtttcagctgtatgggaagtaccaggatatggctttagcagttaaaaacccatgccatcttaacatagcagcttgcctcatcaaactaaaacgatacgatgaagcaattggtcactgcaacattgtaagactcatcaaaccattcatttgaagaaaatcattaaagttcatactcggtttctcgaaatctaatcaaactcaaaaccttatcaggtgttgacagaagaagagaaaaacccaaaagcactgttcagaagagggaaagcaaaggcagagctaggacagatggactcagcacgtgatgatttccgaaaggcacaaaagtatgctcctgacgacaaggcgattagaagagagctacgagcacttgcagagcaagagaaagccttgtaccaaaagcagaaagaaatgtacaaaggaatattcaaagggaaagatgaaggtggtgctaagtcaaagagccttttttggttgatagtgttatggcaatggtttgtttcccttttctcccgtatctttcgacgccacagagttaaagcagattaatgtatgaagaagggtaacaattcaactctaaaagaccaacgtgaaagatctacccccatttcttattagtgagaattttgaaaaatattttatataagaaaaaaaaatagtctctattgttttcgattataaagtaactttatattttgatccaaaaaaataaatttttaacaaaaaacatacaaaattcgaacgtaaaatctacttccttcaacagaaatggcggtcttcatagtttttgtctttgaccaaagactttcaaattccagctgctagttgcattaaatgatcttagtattattaattaattaagaaacttctcaacaattaacaaacactaatcagtaatcatcattctctttagttgaaaaaaatagtcaacgtttgattaagtcaacctttttcgtctttgaatccatcttcttccccacagagcaacgacgaaacaaaaaaaacagagacccttcctctggggaatctaaggaagcttcaaaatg

SEQ ID NO: 2012 - DNA, 3000 bp, Unknown
  misc_feature (1)..( 3000): cDNA_ID_2047121_gDNA_ID_1620477_Annot_ID_158202 3000 nt of promoter + ATG
aagaagatggacatggaggcatcgaaacagttcttggcggaactaaaagtcttaacgcgtgtacatcatgtcaacctggtaaaccccttttgtgttctctcaagataatatctgagatcagatgaagatcaagtcttagccaaattttaacgaatttgttttttcttgcaggttcgcctgattggatattgtgttgagggatcacttttcttggtgtatgaatatgttgagaatggtaaccttggacaacatttacatgggtcaggtacgcaatataaagacctccaaaagtgaatcatttttcgagaaagttgtaaactaaaagagtttatgtgaaactaggacgagaaccattaccgtggactaagagagtgcagattgcactagactcagctagaggtttagaatatatccacgagcacacggttccagtttatgtccatagggacattaaatctgccaatattttgatagaccagaaattccgagcaaaggtacattctcgatttctcttttgtcaatcaaaagtgaaaaatactgaaaaggttagatttttcctttgtcaccgctctgagtcgtttacgtgttacaggtagcagatttcgggttaacaaaactgacagaagttggaggttcagcaactcggggtgcaatgggtacatttggttacatggcaccagagtaaagaatttgatctcgtttacacttatatactactttagagactacactatagtgatggtgtatatatgtatgtatgcaggactgtttatggagaagtgtctgcaaaagtagatgtatatgcatttggagttgtcctttacgaattgatttctgcgaaaggtgcggttgtcaaaatgacagaagccgttggtgaatttagaggccttgttggtgtggttagtattattgtttcttcgtaacatttagtctttctgatttaaaggcatgtatgtggatcacttaacaatatgctttgtttatttattattcagttcgaagaatcattcaaggaaaccgacaaagaagaagcactacgcaagattatagacccgaggctcggtgatagttacccgtttgattcggtatacaaggtaatatctcttcttgttccctattctattcatcattgatcattctaaaagagggtgtccaatccgttttttggtccgaaaaaccgattaaaagtgcgatttttaaaaaccggtattcactgaacaatgtgctattcgattagcttaaagtgtcgaaaaatcaaaccgaataccggattgcacatagctaattttaataacggggtaagccaatttggtgttttatgtgttgtggtatagatggcggaattagggaaagcatgtacacaagagaatgcgcagctacgtccgagtatgagatacattgtggttgctttatccactctcttttcgtctaccggaaattgggatgttggaaacttccaaaacgaagatttagtcagtcttatgtccggccggtagactcgttttccggtttgctgttgttatatagaaatgattgttttttggtatgctcacgtatattttgtctgtctatacgaactttacatgtcacaactcacaagttgacttttatatgattttctataacgctctatatgtcaattattcaacgtctccgatatcagcatctcacgtcaaagataataatgaaatgcattaaaattctcataaataaattttttgaaatcgagtttgccgacaaaaaaatcaaaacataaaaatataactttttgtgatggatactctcacgaagcttagaacaagtcttccataacaccaaagaaattcgaatgattttgtcacatggattccccaatacataaaatctatattccagcttagaacactaagtatgtttcttatttcacctagctagattttctttattagaaatagagtaatcgaatattcttttaccataaaccaatatatttcattttttgtttttttcttctgtcaacaacatacagatacggctacatatatctatgattttttttcgtttgtccattatttgtaacggaataattatttaaaacacacaaaaagttaccttaaactgactaatattaaatcaaaactttttcattccaaaagtcagatctcaaacctttttttttaacataatgtgtcctctaaactttcaaatcagggaataaataaatacattagaaaacgttaaaccaatataaaatacagccgttataatatgaacataaataacatgctaatacggcgagacctataaggctaataaaccattattgcttctctaaagaaactgaaaaggaacccagtaacggacgatgtcctaaacaacaaaacattcaattaaaatacaaattccttaattaacactattactttatttaacacaaattaatctcttttgccaggtgtccttcaccgtttaatcctcggttcgctaaattagttaattaattaattaaatggacttgtaacacccaaaacgtatgaatcagcagaaatctcacttcagttgaatctttggatcaatttccaaaataaacccaaacacacaaattaaaaatctcatttttatgaatgtttctgcttcttcttttgatccctaatactttcttcttcttcttcttcctctccttcattctctgctcaacgttgtttgacttcacagatagaaacaacaagacgagtttcatcgctgagctcttgagaaaggtaaaaacttaaactttatctctatctttcacattcatgtgaagaatcactcatttgtagagttgattcagtgtttaatggatttgacggaatctgaaaagactatgactaggatccaaaaattccgatttctgggtgaaacgagaaatttatggagaaaaactagctaaaaatattggcaatttggaagtccttggattgcaaggaaccctaatttttttcgtttgtttcaggaacattgtgtgtttctctctaaatcatg

SEQ ID NO: 2013 - DNA, 3000 bp, Unknown
  misc_feature (1)..( 3000): cDNA_ID_3065544_gDNA_ID_1620477_Annot_ID_158190 3000 nt of promoter + ATG
aagcaaataacagagaatatggatttggttcagaagcagaagagtttgcaagattacaccaaatcactcttcttagaagtaagtttttcacatttgaaaagatcaaataatcagaaaacttgttttaacgttcacaactttttctttctggttttaggacttgtagtaaaaatggttttaggacttatagtaaaaatgtgttaggcttttgtagtttctttggtaagataatcatgagtttaggttatgtaaaattagtttctgattatggaaagtcttttgttttgggtaaatacaaaaaaggggattttggacagccagttcttgcagctgcaacaactacaagatgaaagcaatccagattttgtttcacaagttgtcacactcttcttccaagactctgataggattctcaatgatctctcactttccctgtaatcttctttacacattctctctttaatctttttttttttgttcttttccaaaacttgtgtttctcactgtttttttatgcttcgggcagagatcaacaagttgtagactttaaaaaagttgatccccatgttcatcaactcaaaggtagcagctccaggtaacaacaaaaacaaaactggctatttctgattttaatccaatgataatgacattttcttgatcttgaaatgtgtaacaatatatattgccaaaaaataacagtataggagcacagagagttaagaatgcttgtgttgtcttccgcagcttctgcgagcagcaaaatgtcgaagcgtgagtttaatcgatatgttcgttggtccattcgttatttctttgttttaagatctgattaggaaaatacatcgttgaaaaatttcagatgtcatagatgtttgcaacaagtgaagcaagagtattatcttgtgaaaaacagattagagactctgttcaaggtaaaaagtcaaagagactttttttttttttataaaaccacccacataactcttatctagttatacaatattttgatcaacatttgaaacttatctgattcaattttggttttgatgatcgaatctatgcagctggagcaacagattgtagcttctggtggaatgatcccggccgtcgaactcggattttgagtgaatttcataaacatctctgtccattgttgtttcattttggactctctcttcttcctctctttatgtgactatcaaaaaaaggttcttatgtgaacttctttctttgtgccattggaagagtgagacatgctaaaacgtttcttaatccacatctaaatcccacatatgtaaaataagatctcaagcaaacatatagtcatgagtcatgactacaattatatagagtttgatcaagataatgtacgcatcaaggtaatgtgatccggacaacttggttaggtattaggttgttgttttactgtaactgttagaagtagttagaagtcttgtagtccttgaccaaagaacacagatgggccatatgaattttagtagcccaagatgataacaaagggcccgtactaaacatccatgatgatcttggaaatcttttttttattacgattgcacttcgacgaatctctaaagattttcagacatttatacaatgcaattaagaaaaaaataaagttatactatgtgagtgcacgttaaataatgtagctaaaaataaaataatgacaaaattcttaattacttacagatccgtgacctgtcgtcgactatatatggctccaatttataacctcatgttcgatttctagacttctagtttaccacttataactttgtattgctctatactcgtattaattagtgctccatcttttttatttgaacttttttgggtaaagaatgagcgttcccttcatcgtttgttcataactttactagttcctttaattgtaccttctgtttaattttgttttcaagtgacctttttgtcttttcaataataattaagatttccagttcgtaatttcgtatgtataatgaaccataccattaattatgcaatatgacaaaaatatgatgtttatatgttcttccaccttgttattatcgattacaaatttaaataaggatcatagggtaaataacacttttttttttttggttataatcaatatcttattcctattttattgtttcaaacatgcatagtatccaaagggaagcatgttttggtgaaaatatatgcatagaagaagaagactaatcagtaatcaagacaagagataggttgaataattccattaagttttctcctatctgtagtctaaatcactagttacaactttcaacacacatgaaacacattatacatgcatcattattcattaatgtgttaggttacgctacgtatattttgtgtagatttgaaagtacagatatgtaatgtaattatcatacaaacatctcttaattaaagtctcccacaaagccacaatatggtgtaagtgattcccgttggattagtacattagtcaatacactacttttttgacggctactgatttaagtttctatttgaactatccccaataatataaatatcacgtcgatgtgattgagacgagcaatagagccgtgcttaactacttttatagtgaaaattaaataaggcttatgtatccaaatacttgtggtcaacttttgtggtctgaattatttatcatttttctgtcacttaaattaaatcatataccttgaattataccaacatctaacttgggaataagaggtgtgtatcttgcggacaaatgaatttagaccgttgttaaagagcgtaaactttaataagacgttaacatgtgtgtgaacagaaagctattctctaaaattttgatattaaatttgtacaaaatacatttctacgtggatttaaggtgttaaaagagttcgattagtaagctttacattttattgatactaccactatatatacgttggaatgtcatatcaaacacagattaacaaattctctcaaatg

SEQ ID NO: 2014 - DNA, 3000 bp, Unknown
  misc_feature (1)..( 3000): cDNA_ID_2047167_gDNA_ID_1620477_Annot_ID_158189 3000 nt of promoter + ATG
tcaggaaagtaatacagaaatgtttgataggcatgaagaagcagaagcaggccctgatacacaaatggctgctgaagtgatgaatgctctgcactctggggacggcagggaaattgatcctgagccaaataatctaataggtaagaaattgttattggaaggaggcatttctaggtgtggagtcgttaccagaaagtccaagaggatcaaggggattcaggctgtggacaatgatgttgaatcattgaaaccaaaaaacaagaaggctagatcaattcttgctaagtcttttgagaagaatatggataggtattcaaaaaatgacaaagttgatacgccagatgaagctgttgcgtcaaccacagaaaagaggcaaggagaattatcaaacaaacattgtatgtctaagttacttaagcaatcacatagaggtgaagctgaggtgttgaattatcccaagcggagaagatcagctcgtatttcacaagatcaggttaatgaggctgggaggagttcagatcccgcgtttgatactccagctaagtctaagacgccgtcaacaaatgtatcgcctatatgcatgggtgacgagtatcatagactttcttgcaaagattcatttacatcacacactacaagggaatttcgtagcttaaccgtaccagtagcggaacctatctccgagacaaagagtactagaaagagaagagatttgggtagtatatgtgtcttgttcagccagcatcttgatgaagatgtgaccaagcatcagaagaaggtatagttgggtttctaactgtaactttagttaccttcgatcatgtgaccttattccttgctttttcttttacaattggtagtgaattttcagttttgcattaaccaagtcttctagacaaaagtaaacctcttaacaatctggcatatgatatgtttaacagattttggcaaggtttgatatctcggaagcttcctccatgaaggaggcaacacacttcatagctgataactttacgcgcacaaggaacatgctagaggcaatcgcttcaggcaagccagtggtcacaacacaatggcttgaaagcatcgatcaagtaaacatatacgttgatgaggatatgtatatactcagagattcaaagaaggagaaggagttctgtttcaacatgggggtttctttggctcgtgcacgccagtttccgctactacaggtatctaatactcttttggtttcaattctttttttacctcgtttattctcccttttcggctcattatatttacatatttcagggaagaagagtttttatcactccaaatacaaagcctgctttaaacacaatcactactttggttaaagcagttcatggactggtaatcatttcttcacctttttacactttcatgtgcatgttttcaaaactttttctccccgaaactgatccataatgaaaacaaatgccagcctgtagaaagactcggaagatcttccctaagcgaagataaggtcccagagaatcttctggtcttatcatgtgaagaggatcgcgctatctgtataccctttctggaaagaggtgagttttatagtttggtctatataacttctgcttttgtatgtggtagatttcacggggaaatcacagtttttcttttccttcttctcaggggccgaggtatatagctcggagttactactaaatgggatagttacccaaaggcttgagtatgagaggtgggtattgttattagacaataaattcttatatttgtcgaacaaagctttgtctcatctcattcatggcttcttacttgggaatcttgaactgtgttaggtaccgtctcttcacagaccatgtgagaagaacgcggtcaacgatatggatcaaagacgggaaaggtaagttccaacgtcgtagcgggtaaaagagtaaatgtgatcaaactcctatatgatagttcagttttagattagtttagaaagtggctgtatatgtaacatgtttggcttaactcgtgtaactataatctgttgggttttgagtcattatgaacaaattgaaaagaggaacaacgatagagattctttaacctttctatttcatcattgaatggtagctaaattatttaaaaaatcgatggaaacacccaaactcaaaaccaaaggcaaacattcgcctccgcttccatcaccagcagtgaaatctcctccacagaacatttgattaggttcaagacggtggaagattgatcccttgtagtggagtggcttaccaagcttccccatccctttctccctgtgtacatagggcccggaaattctccgccgctcgtggtgtcgtgtctgcaaagagctccatcacaatccgaccacactctgctgtccacgctcaaataaaaaaaaaactttaggattagcttttactacttgttcaacgccaccacgctccaccagccggaggaagaacattaacgtttaatccaccaccacctccaccagcgggtggtacgagttcggcaacaggtttaaacgttaattgtaaaaccaacattagccggaacgttaattgaacaggtgcattggcttcattaaagctcaaacttacatagtagggtttaccggagatttaccgtagatttttacgtatttctctaatatataatggattatcctaacgatatctaaattattaaatctaatgatatctaagtcacaacattacactattttttttttaaaaacgaaccgttatcacaattcacattacaatgagattcaattaagtattcacacttgcatttcacacttgcatctattaaactcgaacagaataattaaggaacggtattaaccgtcaataactcccatcctaaatctaaactgccattgcatcacaaaattcaaaaactatccgactcttttgagtttttgtcatctcttgtcgcttcagacataaactacagtctgaacttcataaactaattgtcgtcgattcaaca

SEQ ID NO: 2015 - DNA, 3000 bp, Unknown
  misc_feature (1)..( 3000): cDNA_ID_3065595_gDNA_ID_1620478_Annot_ID_158225 3000 nt of promoter + ATG
atcttatcctagaaatatataattattatatgtagatgatagttgacaaaaaaaagaagatataaatcgtaaaagctgcacaaaaattctgattgtacagccaatttaggttgtctgtccaatcgcaatgcgtgcaactctaagcggtgtgcgcccgccactgtgtatctcgatcgtcaacttttagtattatttgattcttcagtctatgtgtgtaaaaacatggtgtatatatattttaattttattttgataagaacatgctgtatatgaaataaattgtcttagaaaatccgtgtaacttgataattgagatatacaaaatctaaatcagatcacctttggtgatgcacgatgtttcactcttataacacacgatgtgaactagatcattttcaaccacgcacgatgcttcactctaaattaacatataatctatgacactatttccaactctatagaatagatatgaataatattatagaaaaaattgggtaagatttatagaatcttttaattaagcggttggatttgttcgttgtaaaaaatgttggttacgttgaactgtcgacaactgtatgtagtgtaaattattcaaccattagaaaataactaaactagattcctgcatatgtatagtaaataatccgtatttttgaccatttctcttgcgttgcttctatatatcccacaagaaaacgattaaaaaagtctttagaaactaaatatgagtttgttttcggaatacttttgacgtccaaaaccaaaataggtaaatatgattagataaaatatatattttttaagaaaataagaaatggtgctaatgcttttggatttgatcgtgagttagtgtgactagattgttttgttagcgtaatctaaaataattgaaataatttatgtccaaatttattttatttttagccaaataaagtaatacaaaataaatgtttcagctatactactttagcaaagagtaaactgtaaaagcaatacaatttttcatccacatttctgtttcttcgagcttctcattttctaccattttgttttcatttctcatcaattacatacttttgatgatattaagagagaaacattaacagtaacagtcacattatgtaatcaatttcttatggaataaatcgaatataaaattaattatttaagttttagcgaataatcaaacgttgaatattcagataattgtagaatacatatcgataaaataaaaagccaagagcaagacgaatacaaaatgtcaaaatatctaaagatagataaatggaacgaggagaggtagtagagttgacccgccatcttaagtcggcttttctggtccaaattggagcgtttatttctttctattataagttaggtttcgtaagcatgccccaattcatttcaatggaccttactggtaaagtctttgcttgattcaattatttctgagaaaatcactctctcttattgtttggcggcacggtcaaatcagtcatattattttctaagctaaattttacacacgatacaaaatttgcatatgaattttttaactctgaaccaaattataaagtgcccttttacatttattatcatttattttgtacctaaaattcctataaataagaataaaatatttctgacgaggttggtagtaattttgtgagattagactgtttgactaacaaatctaagaaaatgtgtgatggtcaggaaaacggtagacatattattgactcgtatcatttctgtatctatccgtattttatgggaatatcccatttattgataatttgatatggtcactactcactacagatatcaaaagaatttctgtctattgcctgtaaaagttcctcatatatgcatctatccatattttatgaaaatatccctagttattgaaaattactgatcaaacttttttttctctttttccttacttatattttgcagtattttttccttctaattcttgtcatactagtgccaataatcatgctgacatatttaacattagacccaaaaaaaaaaaatcatgctgacatattgatcaagattgaagactttgcatcaagatcttttctactctttgcttggtcaaaatgccagtttcaaatgtttatttctttataagacatgttaaaagatactaaaatctgcatatcgaaacctatccgtcgcgttatagaaagcgtttaagatattagatccattaaaaacaggatttacattctactaatttttgtccattgaacggtgagctagtctgtggactataatatttttaccgagttgataaagtatgttttatcaaacatttggcaatttgatgagtttttgatgcataaaattataatatttatagaagaataacatacaagtggatgttgtcaataatttgtaacgcgttatagtaacaaaaatcatgcctcatatatatatgtttatgtaaagtatgaagagtgactgaccctcttttaaaaaagaggcataatgagaggagaaaaaatagacttacacatttctctcacgtcgagtttgatactttactttgagtgattcattcttttggatttttgtcttcttgttcaaaaatgatcctcggattctcttcattttagaagaatctattgaagaaaaacaaaattcaacaataacaatagtggcacagaaaaaataacagtaataattttcactgttctatcttattttttgatgaaaaaagatgaagcttgagaatgaaactacgtcgttttggaaaacatgaagtcatgaaccattcttgtctccaagccaatcacagattctcagcctcatgaaaaaaaaaatgaatacaatttttgattcgatttttgtcgaaagaaaaagtgacaaaagtttttagcataattttatgttttctcataaacaaaaagtaaacccaaattgttttttcgaaacaagaatcgatttggcacgaaatcgaagatttgatgaattgtgtaaaacatg

SEQ ID NO: 2016 - DNA, 3000 bp, Unknown
  misc_feature (1)..( 3000): cDNA_ID_3065576_gDNA_ID_1620478_Annot_ID_158235 3000 nt of promoter + ATG
aaccactgaattgaaaaattttagactctgtatcaagaataaaaacgtcttcgtggttgagagtcgatcgaacaaacggaacctgtgaataagaaaatcaatgcaaaccaagatgaaacataaagaaccagttgagagaaaagacatttcaagatatgctaattaacttgcctctttaacacggacgacatgtttgcctttgcagatatacagacgcgtctgatgctcctcgggctttacatggttgaaccctgaagcaactccaccttcttgaggtattatgcaaggtttgaagtaggaaagaaacttctcggtttcgtgaccctgtacttctcggtactgaacagcacgtccacctaatgctgaatctaattcaacagtcatgacggctacagcacctgcttcatcctattttcatcaacacaacaccatggttcttatttgtcgaagaatatacaaaaaagaaaacaaaagactagagaatatgaagagactgtacctggctggaatctttaccgagccagtagtgaatatcatgatgcaaagaaccgcttcttgacgctgtggtctggcatgagatagttagataagaaggtataagacactattaagaactatatatcaataaaccaaagaaggaacatgaaaaaactactgacctttaagactatataggaatccccggtgaaaaatttcccatgagactcttgtggaacagtgacaggtttgaagttctcgatgcgccatatttcaatcccgctgtgtaaacaatttgccaaaaataaagtccagatgaatcacaagctacgcagcaaggactacaataaaaacaataaaaacaataaaaagtgaaagaaggttacgatttctggccagctccttgaagagcctgatctaaatctctcatggaaaacgtcattctggtttttgcaaatctttaaactctccccaagcttcttaaatttcaagaaacaaaccaaacctgcaaagattattaacaagtatcaattgacactttaccagaaactcaggaggaaggtgtaaatgaagattttttaaaaagaaacaagaggttcttctcaatatctcaatgagcgtaacaagcacataatatattatataatctacacaatgtacttgaaacaaaagaaccgatgtttggttacaatgtaggtactaaaatcgcagaaacttccattgtaattgaaatatgaatcttctatcgattcatattttttctgaaacaccaacattttactcaaccaaaacataaaaaaggaaatcgtgatcctcaaaaaaagatgcgaatttcagacaagaacagaggagattcaccagaaaaaaccaacaaaagcaagaacaaaaatcctcacaaacccgttaggataattcaatatagaacaagtagattcataccagagaaattcaaccaggttggaaagaaaagtaaattgttttaaggcaaaaccacatgcaagctctaatgggaggaatcagaggcaggggagaaatcacaaatgcaaacaaagtttcttgtgaaaaccatcggagaaaaaacgaatgagctctacgattataagaaaatacacaaacacacatgcatgacgctgatacataataatgggacttttgaaaaaaaaaaacaggaacaaaggaaataccttttacagatttttgtcaagaataataacgtataatgctgcgttcatagttgtaaaattctcttgggggaaaaaactggtaaaagggaaaagaaaaatgtgatgatccgagaaaattataaacgaactttgtggtaattgaagacttcccgctttttcaggtttacacttcgaaaataacgggaatagaagagagaagaagatgataaaaaaaaaatggctaatccaatttttagttataattaaatgaaatgaaatgtataatcccaatataattacttctcttttcagtcaaaataaaaataaaaataaaaatcgtcagctcaattaacaaaacggactaacgagttcgtctcctcgacgcaccgcacaataacctccgtcgcattcgcaggtaattttgtttctctttctcctccatctttcctccaacgaattcgtcttactcagtcgtggatccaaacaattccggtcataatcgtagccttgaacggcggttttcgcggcagtggaatccgagtctcgctctctcattcctaagatgtatcgattactctcttcaaacatcgaattagggttttgtttatgttatctgatcagacatcagagtttaggatcctttggattctaattttttccgatcatcacaatttgtcaatttctactttcccgatgagttttaaaattggacccactcaaaattcaatttatcggataagcaaaccaacccaaaattaatatgaaccgggatcataacataatgggccttttcagcactgaattaaaagcccaattcgtactatgtggagagaggagagaacaataacaaaaaaactcaccgttccttcgtcctccgtcaaactttttggtcggttcccggcaccgacgtgtctggcaagaacaacacgtgtgatacatcactcgatctcagagctgtgagtcgataaaatttgggttttaaaactatactattcctcattgttatggctttcgttaattctggagtttactacttcattcttcgagcttaagttttaagggtagattaaattagggtctcggtttcctttccggtgagtcggtggattcatagaacagctcaaaagattcttcttcagtttcatgattcctgtagttagaaaaaaaaaaactttgaatctcaacgaaataatttttattttctgaaaattttgatgtgattggaacattttttgtcttctctgttttaatctttagtaggtgatgaagtggtctaaccatctaaaatttgtggggatttggttgtaggaacagagtttggagtagacgactataatttctgtttctattgagagctatg

SEQ ID NO: 2017 - DNA, 3000 bp, Unknown
  misc_feature (1)..( 3000): cDNA_ID_2990493_gDNA_ID_1620478_Annot_ID_158237 3000 nt of promoter + ATG
atacagatagaagcggtatgtgtattataaaccgtaatcaaatagctttcttgttcatcagtttatacttggtaattcaaataagtatctggttccaacaggcttccgcaggactaaattcttcgcactgttatatattacacggtgattctactgttttcacttggtgtggcaatcttacttcctcggaagatcaagaacttatggaaagaatgttggatttgattaaggtaatctgttaattatatttgtttctacatttcggaacttacctctcatttctcacatatggtggaacctctgattcttggtttttctgttttgttcagccaaatgaacccactaaggcacaaaaggaaggctcagagtctgaacagttttgggaattattaggaggcaaatcagaatatccgagccaaaagatcaaaagggatggagagagtgatcctcatctcttttcttgcacatatacaaacggtaaaaccattttgcaacatccgttcccgggatttacacttcaacttttctcatttcaataactgttctgaacttttatttgatggtttttgctggtttggttgtccggtgatactctgtggatatcttaccagaaagtctgaaggtagagtatggatttcataatagtcataagccacattcatgttatgatcccacttctcaggttctaaaattgagactcttctttctttctttctttctattaccatataggctacagagatcttcaacttcactcaagatgatttgatgactgaagatatcttcatacttgattgtcacactgaggtctttgtctgggtgggacaacaagttgacccaaagaagaaacctcaagctttggacattggagaggtacttaaagatccattcaactagattaactaactaaactgaaaactgttcttataaacactctgctttattgtcttcatcaacagaactttcttaagcatgatttcctcctagagaatctagcaagtgaaacaccgatatacattgtaacagagggaaacgaacctccatttttcactcggttcttcacctgggactcttctaaatctggagttggacttctctctctcttcacatttgcttttgaaaatcacacctcatggagctaactcgtactaagcgataaagctgcttcttgcagatgcatggagactctttccagagaaagcttgcgatcctgacaaataaaggaaagccgcttctagatgtaaaagcttgtactcatttggttacatttgtctaaaatcaatctcgatctgtcttgatcttgtgtccttttgttgctcagaaacctaaaaggagagtccctgcatacagtagcaggtccaccgttccagacaaatcgcagcctcggtccagaagtatgacttttagtccagacagggcccgcgtgaggggacggtctccagctttcaacgcacttgcagcaaactttgagaaactaaatataagaaaccaatcaactccaccacctatggttagtccaatggtccggaagctttacccgaaatctcatgccccagacctctcgaagatagctcctaaatccgctatagctgcccgtacagcgctttttgaaaaacctactcctacttctcaagaaccacctactagccccagttcttcagaaggtctgtagcaaaaacaaagctccacttttgaaccccaaactatcaatttggtgaataaagttgagatcttgagcttacccttttttgatcattttttatttatgaagctacaaaccaagcagaagcaccaaaatcgacatcagagacaaacgaggaagaagcaatgagcagcatcaatgaagactcaaaagaagaagaagcagaagaagagagcagcctccctactttcccatatgaacgccttaaaaccgactcagaggatcctgtttcagatgtcgacctcactagaagagaggtcagattcttcaaaactctcaacacatattataacattcgtttattaagtttgtgtttcatgagttcagcttggtattttgcaggcatacttgacttcagtagagttcaaggagaagtttgagatgacaaagaatgagttctacaaactgcctaaatggaaacaaaacaagctcaaaatgtctgtcaatctcttctaaacaacactcttcttcaagaactcagttttcttgttcttcatcttaacccaaagacccgtaagtttttcgccttctactctggtttgtttgatcactttggtgcaatcttacacctactgataggcaaggagtatcgctagacctatttaacatagtcttattgatctttgtttctattgcttttgcagctcaagaaacacacaaagagggcatcatacatttattcctttgagctgcttacaaataaataatcaagcacataaattttttgaaaaatcatatattctctttatataattataacatattcaagtttctgttttgataattaggatttttttgtttgtttgttttatgatctcacataatatgtctggctgtaagattctttctttcctggccttgaaattctctaattgcttttatgttattgaagaaccaatgtaaattaaatcttatctttatcatgtgttatattattctatggtcgtcagtaatcttcactaatccataactttatttctcttgtcactttatgatataaactttttgtcatttaaaagtctgtcagaggtaaaaacaaaaacaaaaacaaaaaatcatagtaaaccaaaacaaaatctagaataaacaaaacggagtcgtaagagagaaccggttcgaacaaaaacggcaaaaaaaaaaaaaggggagcagcaacctttttccaattttgcgtgaagcagcagtgaagaaaaaaaggaaaaaaagtgagtgagagaagaagattagaaacgacgatatatacggagaatctcaggatttcgatcctgtttttgttttttctacttttggtactctcc

SEQ ID NO: 2018 - DNA, 3000 bp, Unknown
  misc_feature (1)..( 3000): cDNA_ID_2148618_gDNA_ID_1620478_Annot_ID_158240 3000 nt of promoter + ATG
gatctctgtaacgcgagagctgatctgaggaagagagtccactctacaatcgataagtacgctgagcgtggacttaggtcattagctgtttcaagacaggtgagaagaaatcttacattttgtaacaagttataggaagaaggaaaaagagagagagagtttaatgtaaattttgtgtgtctatgtttcagactgtaccagagaaaacaaaagaaagctctggtagtccatgggaatttgttggtgtgttgcctctgtttgatcctccaagacatgatagtgccgaaaccattagaagagctctagacctcggtgtcaatgtcaagatgattactggtttatatctaaacattactcttcgctatagcgaaaacaccgaatttcttactaatgtttccaatggttttataggtgatcaacttgctattgcgaaagagacaggacgtagacttggaatgggatcaaacatgtacccatcctcttctttactcggtaaacacaaagacgaagccatggctcacattcctgttgaggatttgattgagaaagctgatggctttgctggagtcttcccaggtttgtttaagagccatttttgtttccacaaacacaaacttgctcttctctctgtaacatttggtctcttttttttctttaccaaattcattcagagcacaaatacgaaattgtgaagaagttgcaagaaaggaagcatatctgtggtatgactggagatggagtgaatgacgctccagcattgaagaaagcggatataggtatcgctgtggcggatgcaactgacgctgcacgaggtgcttctgatattgtcctcaccgagccaggtctcagtgtgatcatcagcgcggttctaaccagtagagccatcttccagagaatgaagaactacacagtgagtgttctcttaatcttaaaccataacctttttagaatctttacaccatgataacttgttctcatggtgtttttaaatgttcctttaaacagatatatgcagtctcaattaccattcgtatagtggtaagtaatcaatcttgtatgtattcttgaatatcatcaaataatctctttttctatatgatttctcactttgtgccttttcacagtttgggtttatgctcattgctctaatatggaagttcgacttttcaccattcatggttttgatcattgctatattaaacgatggtgagtttttttcttctctttaaaagctctctctaaattttggctctaatcgactaacacatcattaacttacgcaacaggaaccatcatgactatctcaaaggacagagtcaagccttctccaacaccagatagctggaaactcaaagaaatcttcgcaaccggcgttgttcttggaggctacatggctataatgactgttgttttcttctgggccgcatacaaaaccgatttcttcccggtatgtaacatataaacaacctctctttagattccttgtcacacaagcattaactttgtttgtttcctatagagaacattccacgtgagagacttgagaggcagtgaacatgagatgatgtctgctttatacttacaagtcagtattgtgagccaagctcttatattcgtcactcgatctagaagctggtcttttacagaacgacctggatatttcttgctaattgctttctgggtagcacaattggtaagcattgtatcttcttgattgattataaactctcttgaatgattgattcataaactttgaccttgtagattgcaacggctattgcggtttacggtaattgggaatttgcaagaatcaaaggaataggatggggatgggctggagtaatctggctttacagtattgtcttctactttccattagacataatgaaattcgcaatccgttacatactagccggaacagcctggaagaatatcattgacaacagggtacgttttgctttcttcttagttcttcttctgaaatgtgattttaagacttaaacaaaatctctctgtgtctttgaaaaaacagactgcgtttaccactaagcaaaactatggaatagaggagagggaagcacaatgggctcatgcacaaaggactttacacggtcttcagaacactgaaacagccaacgttgtcccggagagaggtggttacagagaactgtctgagattgcaaatcaagccaagagacgagctgagatcgcaaggtaaatgatttgtaaaaagtaatttcggtttcttgtgagagaagttaacgttagggtttttgtttacaggcttagggaacttcatacgcttaaaggacatgtagagtcagtggtgaagctaaagggactagacattgagacagctggtcactacaccgtttaataaagatttaacaagaagatgattaaggaagaagaagatccttttgtttaagagatgataatgatgatgattttataacaagagaataaggttttttttctgtgtatgttaagttcctctaaactcctggggtttttcttccttccttattcatggttttagactttaattataaccatgtgtttttgtttcccctctcttgaataaaaaagagaagatactaatatcataggtttaatacgtttatgttttataaaagttcaatagatattgtttttggatattatgtgaacataacaatatttataaattcacctttcaattttcttatgagatgatatcatctttactacttaaaatatcttctaattaaaccaaaagcagatttaggtccggttagatgaataaccggttcgattaatttcgtcagaccgatttgatccgtggatatcattaatccgtggaatacatgtgtgttcttgagtaggccactagttataatccacgtggcaagcattttatcacaaacccagagctacaaaaacaaaaccaagaagacgagaaggatctttaacagagaaaaaagagctttagaccaaatcaccagaaacaaaacaaaaatg

SEQ ID NO: 2019 - DNA, 3000 bp, Unknown
  misc_feature (1)..( 3000): cDNA_ID_2148614_gDNA_ID_1620478_Annot_ID_158239 3000 nt of promoter + ATG
tcaggtaaattcatttcaacactagactaacatatactatgaatctaggttttagaatctccgaaaatatcaaccaattaatgttacagaaaaattgaagacatgaaaaagaaaatttaataattgttaaaactgctaacaagtgatatgctataagaggatctatctcattaaacttggtgtcagataaaaatgataatcatgggatattttgggaatggttggataataccagtacggatgtcgatgatggagaatatgtacgttaaaatatacaaattgataaaagaatttatagaaaagggaatcatttgaatttctaaaagtaatacagaaaacaaatcgccatttttttcttacagacacaaaagatacaagctttgtcttcaattggtagttaatataatatttatttgtttttttatatggttacatgcatatcttgatcatgtccagtgaggacttgtcttgaatatattggctaaaaataacattttctgtattattttattgttcatcatttgtccaaatcctcttgatcttctcgatttaatattatatcaacacacccaattatttcaaacccccacttatatgtataaaccaaaaattatacataatatacaaaatctacttccataagacttaggattctatattttatcagtaacacttaatatgtaaattcttgaacatattaatatatcaatcttttgagttaatactacagcatggtaagatactaagatcttttcttttactatttcatatagtggcatttatattaatgatttttttttaaaaacatcaccttctcagagaataaaggactctcaagtaagagattaaaatattacatactagtaaatccacaagaattatataaaattagctattgttttgtctgtctgttagagagagaacaattagatggacatacaaagctaatttagcatatgaaaacctctcagctttttccttgcctccttccttcacaaatatcacagcctgtcaaaattagcctttaagaactatttaacttccatcactatatattatttgtttattaatcctttttaatttaagcatttccttagctgtgaataccccattatccctctctccttctctttcctttctctctgaatatctctctatctcttcttccacacagctttagtcctatatttgattgttgacaaaacaaagcctatagtaatctctcagctattggattatgctttgaagctaaattggtaaagaagcatatagtaaggtaagtgtgcgtcttgaagaatttctcttaagtgagttttgtggcatgagtatagaacatgtgatcaatgagcttctttggagaaaatcacagcttgaccactcttcttttcaggtaatttatatagaatttctttatatgtattcgtgtatatatgtccataaacagattccggatattgctggtgctttctatttagatagatatattttctatatatgtatgtgtgtgactgcgtataaggaaaaaagtcacaaatttggcttttttcagttgattgaaattttaatacctcaagtgtatagagagagctaaaataattttttgatagcgaaatagatattttgtctagaaatatacacacatacattaggaaaaaaaaaagaacgttttcttttaaccaattttattgtccttgtcttatcctattgggtatctaatttggttctctacaattatagctaaatagacatgatcttttcatgtctttgtgtacttgtgagcgtgtgtataatagatacgtaagtacatgtgtcacatatatttatatttatttatttatatgttttagaaaaaaagataggaaacaagtataagtggaaatttaggtgatatagtcctctccgcatgaatgcgaaaacataatgaacgatgtgaccaatttatatacattatgtaattaattccaattttaatagaaaagaaacttaggtgatacagtcttcctcgcatgatcatcaatttacactaaatagttaaaattcctatttgttgactttaaattgactgctcgaccagtgtttgttgttgcttttttccatgtctctatgactctatcttattatgttaatcattctcatatctttaactttaacccacaaaaaaaaaatcattctcaaattctaaataagtcatgcttatccatagaaaaggaaacaaaatcgacaacttgttttttttccaaccttcaccacatattttatatttcttgcaattttacaactcaaatcattctattttaaactttagtagagaaaatgatattattgtactataccgcatcaattatttcactgatttgaaaataaagtattatttccgaatgcttactgcagaagatatcctatctaagtatttttacatcaatattttactataacacaagagataatttagatattttgaattggttatgaatgtggataaattcaaatagaaaagctttgtaatgttatcttactaaaacaagccgtgtctagtgttgtcatgcttggctctacttcgatttgatctgactaattagctaattgaaaataattaatcatcttccatctctatgattaataacaataataaagaaataaaatcataaatccaacaatttgtggtctaactagttctatccattgatttagtgaacataaagacatttgattcgatttaaaaaaaaaaaaaatacttggctttaagacaaaacaccatgagatagagaatctaatcaaattcaaaagtgtgtcccactagtcaaccttcttttgtctataaacccctcacttcacgaactagtggcttctgacgattactccatcaatttcatactcacatgtatacatacacatacacacaacactcactcacatatacaatttaagtagagttagggttttctaatgtgtttcatcactcatcaaatggttatgaaactatatgactacgtttcaggc

SEQ ID NO: 2020 - DNA, 3000 bp, Unknown
  misc_feature (1)..( 3000): cDNA_ID_3065572_gDNA_ID_1620478_Annot_ID_158236 3000 nt of promoter + ATG
gaattatttacataaagagccctcatagcttttctccatgatatatgatgaaatgaaacgtatgtacttggaaagcaggtcctttctagtattgtgggtttgtgtttcagtttaatttgaattgagacaaataccccattttgattgttatacttatacatgtagtaatacaacaagtaatcagataaaatcaacaaaatttcctcaaaaatagtgggaatcaacagttaagtagtaagctcttaagcagagccttattttacctaccaacttttacagtttgggttttgaaacagctgaagcaaaagagaaggaaaaaaaaagtcagagctttatggcagagtgaatggcgacaactccaccaacaaggttctcgtactccaccttctcaaatcctgcatctgcgatcattgatgcaaatcgctcctgcactcatttcatgcatctagtgattacaaaacatgcttccgactaaaaaaacgtcttatagactagacatcacctgatcacacacacgatgctcatataatcatagctatcataacttaaaactgatcttcttacaggaatctaacacaaccttaagctatggtattgatcacggcaagttgttgttactaatggttttgacgaagtccacaagttaaaacttaaaagttatcttacatgaatctaacacaaccttcaattgaaagattcggccatgacatttattactaatggtcttgaagaagccatgcagcaaaatcacgaaaacacaggaaaactaatctaaaaattgtgtatattgtataccaaattttcaacaaaggtaacaaaaggttgaatgtttgaacctgagggggaaaccgacgaacgctctcaaccaagtactgataagattccctgtccccggcgattagttcccctaagtttggaatgacctggaaagaatacaaatcgtatctgcaacacaagaaacaaagtgagattatcatcgaaacaaaaaagacttagggacttacttccacaacatgtctaatcatcaaaacttacagatttttgaaaaccggaatttctacatggctgagctcaaggcacaaaaatcttcctccccgtttgagtaccctaacaatgggaagagttttagaatactatacacaaaacgctgacacatgaaaatatacccgaatagaagagggtgtaagtaatttgtaataggtacctataagcctcagctagagccttttcgatgtgtgtgacattccttattccaaatgcaatggtgtatccatccattgaattgtcatcgaaactcaaggcctctgcatctccttcgacccatacgagtgacttgttatctcttagacctattcaagatagtaaatgaagcctgagctcacacatacatagaaaaaaaacataaaggaataacagaggatacaaatttgttgcacaaacaaacatctgatctttcacctctctcagcagctcgttgtttcccaacgtttaacatgttaggattaatgtcacatacgtatatctgagtttcctcaagagaagcctcatcaactttctgcaatgctcttcgtttgacactgtaaacagcatcatagatcctaaaagcaacatcacctgcatattacaaccaatatctataacaaagagcctaaaacattttcaataataacatgtatggactcatgatcagagacagcaaaattccatgtttaaaattgatttgactaacctgttcctccggccacatcaagatgcttcatccctgcaaatggacttagcttcccaacgagtctgaaatcacaagaccaacaaaagtgtcaatttttacacaagagcaattcataacactagtgataaacgtgtcacggagtctaacctttccttccatagcctatgcaaaccaccactcatcacatcattcataatatcataactcgaagctacattggtgaatacattaccaaccaatttgcttttctcttcttcctttacttcttgaaaccctgaaattaaaacattgaagttaaactcacacagtagaaactcaagaagaagccatataatagaaaacaaagcatttcgtatagcatcaaaacagatgatcttgaattgtgaaagtcatccacaagaatgttaccgaaacttgtggcatgagagtgaagcgaagcaacaaaggaacgttgattcaaaattctgctcccgagcctcctgcttactgatcgtagtgccatagctctcaatagaaacagaaattatagtcgtctactccaaactctgttcctacaaccaaatccccacaaattttagatggttagaccacttcatcacctactaaagattaaaacagagaagacaaaaaatgttccaatcacatcaaaattttcagaaaataaaaattatttcgttgagattcaaagtttttttttttctaactacaggaatcatgaaactgaagaagaatcttttgagctgttctatgaatccaccgactcaccggaaaggaaaccgagaccctaatttaatctacccttaaaacttaagctcgaagaatgaagtagtaaactccagaattaacgaaagccataacaatgaggaatagtatagttttaaaacccaaattttatcgactcacagctctgagatcgagtgatgtatcacacgtgttgttcttgccagacacgtcggtgccgggaaccgaccaaaaagtttgacggaggacgaaggaacggtgagtttttttgttattgttctctcctctctccacatagtacgaattgggcttttaattcagtgctgaaaaggcccattatgttatgatcccggttcatattaattttgggttggtttgcttatccgataaattgaattttgagtgggtccaattttaaaactcatcgggaaagtagaaattgacaaattgtgatgatcggaaaaaattagaatccaaaggatcctaaactctgatgtctgatcagataacataaacaaaaccctaattcg

SEQ ID NO: 2021 - DNA, 3000 bp, Unknown
  misc_feature (1)..( 3000): cDNA_ID_2148592_gDNA_ID_1620478_Annot_ID_158233 3000 nt of promoter + ATG
tttaaggaacaaagatttcattaagggacaagaatcacagtgaaagcttttaaaagagagaaagttgttataatctcctcacatgaaagaatgttggcaggtaatgttcatccgcgatgcagttcttgtttgcttctactccaggctgaggattttcaaatcagaatcagagtaagacaaaactgaaacttttctcaagtttttgaaaaccctgaggactcttgatattagcaaaagagatatgcttgagatgaaccaaagcttggtgtctttatgaacaatttcttacaacggaactcagtcatatatggtaggctgtaacatgcaaacaaaaactttggtataaaggaataccgaacttactctgcaatactcccggaatttcgagtagtagagaccatcagccatcactattacagcgtgttgacgcttcattgtgaaccactaccaccagaagagaaaagtgggaattacacatttacgtaatttcaacaataccattaccaaacagacttagagaagcaacaacttaagaacaatccacaactgagagattaagttaacagtttttcacctgtgcaccctttctgaaatcttgccttgggatctcaggtaacatgtgatccatgtgtctgccagtcccatgaggaccaagatcctcaaaacttgagagagagaaacaagtattggtgaatattaatggagaagtcaaatttagcaatagaaagaatagatacacaaagtttctgagagtcatttatttacctatcaatgaagctgacatttgcgtgcatcaaatatcgataggtgtagtcaaatgtatgcaacggtatacaactgcaacattaaaagagatacatcaagtaaacagaacgtagctggaaattaaagtaatgactttgtgcaaattcaataagtttatgaaataacctttctgaaagaagaacaaagtgctggttatcaggatcttcaagagcatttgctagaagccgtctctcagcatcaaccatagaaatccttccccaagtgacatgatcactatgaatttcacggtctgaaaagtgacggctaatgtgaactggtcgtaacctggaagggtggatgtaaatagagaatcttccttcttgacccttcacaatacagagcaaaaccgtcaaataccataacacagcaatcaaataaaatcaagaaatgtctcggaacttgttccaacctggaaaaacttatcccaaagcttctcaaatggcaaagtaccaggagtcaaaaacataaaagcgattttcgatttagcggttagagcaggaggtagtctcagtatatctttgatcacaactcgagctgctacttcttcatcagtgaatttcctgacatgaacaggaagccatccagagagcgcagcttgacagcctctactagacaaacccgcacaagcagagctcttactgttgttgtgttgtggatacatgtaagtgatcaccaaaagcacacttgtgatacagactaacaaaacaatcaacaatggcttctttagagaagatcggtgtcgtggagacaaatgcagattctctcccattgtgaaaaaaaagtttgaatctttaacttctttacattgagcaaaacctgaaaaaattccaatcaaagaacattaaagcttgaatctttgtcacttaccaacactcttgagaaacaagggagtataattcgaagtctcccacacgtttggtgaatcaaaatcaacggatttaaagaaaagaaaacctaatttaaaggagaaaagaaattcacgttgttcttgtgattgagaaagatactcacccccacgtacgagagcaattatgcttcactgcaaaaccaaaatctgaattaataagcaaaactctatcagattcgatttttttacagaaattgtaatgaagagtggaccaaatgcatttaatcagtgaagagagttattattacagttacctgagaatttggagctggggagagaataaaaaaaaaagaatctttgtctgagcccagatctcaaaatgaaagctttgatgatccttctttatatcaaagagtgaagagaaagataacgagacagtgttggattttgtttgcttttggaataagtatattaatgtgttgtaatgaagaacatacaaaacaaagtaaagtgtttgacgattcagatcctcgatttgttttctctctctttgcttagaaataaagaaatcgatgaacgagtgtgtttacaccattttcttcttaaaaaagaaaaaggtctaaaactgttttaattatcttcttctgagatgtatataaacaaacccctcaacaccagtcgatttttccaatcatggtggaatcagaagaaactagagatagaaaggtatatgcacgcataatttttattttatttttgttgataataattactatgtagtaagaaaaaacaaatcttaaaatttttttcctatcttttatgctttggaggcttttcttctccgtaatttttttgtttttcacaaaaaaataataatctaaaagttaaatttggaaatgacgatttaattactaaccggatcacttgtctctatggacataatttcactcataaagcttaaattatagtgcacaaaaaaaaaaacagcttaaattattctgggactaactaaacaaataattgaatgccaaaaataagaaattcaatttttgtgcctaccaaaaaaaagaaattcaatttttgttagttattggcccgttgctttaagaagttttggctcagtttcactgttaagctaaggcccaagacagtaaggctagagcaacaaaccaaaccgaaaaatcggaaaaattcactgatcttgttggttaaccggtggaccacaaccggttaacaaacatcgtttttatttttgttttgggctctaaaccctaaaagaaaccttcaacgccgttcgtttcttcttcttcctcctctgctacagaatcgttttgctctagacgctaatt

SEQ ID NO: 2022 - DNA, 3000 bp, Unknown
  misc_feature (1)..( 3000): cDNA_ID_2148570_gDNA_ID_1620478_Annot_ID_158227 3000 nt of promoter + ATG
ataaatgggatattcccataaaatacggatagatacagaaatgatacgagtcaataatatgtctaccgttttcctgaccatcacacattttcttagatttgttagtcaaacagtctaatctcacaaaattactaccaacctcgtcagaaatattttattcttatttataggaattttaggtacaaaataaatgataataaatgtaaaagggcactttataatttggttcagagttaaaaaattcatatgcaaattttgtatcgtgtgtaaaatttagcttagaaaataatatgactgatttgaccgtgccgccaaacaataagagagagtgattttctcagaaataattgaatcaagcaaagactttaccagtaaggtccattgaaatgaattggggcatgcttacgaaacctaacttataatagaaagaaataaacgctccaatttggaccagaaaagccgacttaagatggcgggtcaactctactacctctcctcgttccatttatctatctttagatattttgacattttgtattcgtcttgctcttggctttttattttatcgatatgtattctacaattatctgaatattcaacgtttgattattcgctaaaacttaaataattaattttatattcgatttattccataagaaattgattacataatgtgactgttactgttaatgtttctctcttaatatcatcaaaagtatgtaattgatgagaaatgaaaacaaaatggtagaaaatgagaagctcgaagaaacagaaatgtggatgaaaaattgtattgcttttacagtttactctttgctaaagtagtatagctgaaacatttattttgtattactttatttggctaaaaataaaataaatttggacataaattatttcaattattttagattacgctaacaaaacaatctagtcacactaactcacgatcaaatccaaaagcattagcaccatttcttattttcttaaaaaatatatattttatctaatcatatttacctattttggttttggacgtcaaaagtattccgaaaacaaactcatatttagtttctaaagacttttttaatcgttttcttgtgggatatatagaagcaacgcaagagaaatggtcaaaaatacggattatttactatacatatgcaggaatctagtttagttattttctaatggttgaataatttacactacatacagttgtcgacagttcaacgtaaccaacattttttacaacgaacaaatccaaccgcttaattaaaagattctataaatcttacccaattttttctataatattattcatatctattctatagagttggaaatagtgtcatagattatatgttaatttagagtgaagcatcgtgcgtggttgaaaatgatctagttcacatcgtgtgttataagagtgaaacatcgtgcatcaccaaaggtgatctgatttagattttgtatatctcaattatcaagttacacggattttctaagacaatttatttcatatacagcatgttcttatcaaaataaaattaaaatatatatacaccatgtttttacacacatagactgaagaatcaaataatactaaaagttgacgatcgagatacacagtggcgggcgcacaccgcttagagttgcacgcattgcgattggacagacaacctaaattggctgtacaatcagaatttttgtgcagcttttacgatttatatcttcttttttttgtcaactatcatctacatataataattatatatttctaggataagatacgaactttcgtcgtcaccttcgatgaacaaatattataggttgatcaaaagcataaacttaacgagcagccatgtttgagaagtcgtaattggaatgttgtcattaatagcttgaaagaaacatgtaagtaacgcagtgagttcatgtttattcttgtcgaattccttattgagtctttacaaaagaaatgtcatggtggacctttttggaaaacaaggtgggtacatttgcctatattttttaatcaaagcagaatatttatcgaaagacaaagtaaaaacaagtggtattgtgtgaactaatgcaagttgatcagtgactatagttaaagacaattcgaatccgattcattctgtaattatctgaaaatcaattacttttatttactttgtgtgtcggtcgcggttattgaatcgtatatatttatatattttgtcggatattgaatcgtatataataaggtggatatcacatattttcttttaccatattaatagttatgttgcatctatttatcggacgggagatgcagaaaagtatatgatttgaaatctgttgaaattcaatataaagcatttatatatccaaatttcctatttctaaatagaatagttgtaagtgatcgaaaaaaaataaaaatagaatagttgtaagcttataacaaatcaaatcagttatttacacgaaagtactattttatatatatattttagatacaatatacatattttgggatatattcaattaattatttaattttaatcagtattggtaatatttttaaacaaaaattataacaactttagtttttgttaaaaatcatctaaacctaaaatcatttacagaaactgaactaaccctataatattttagcctagtgaccaatactaacatccaccttgcatcgaagtactgtatcaaaccaaatctaatattgaaatggtcaaggagaatccatttattagtggaccttcataatacaacaaagaaagaaagaaaacgaaactcaaagagacaaattaaaagagtcaaagttcaaaatatgtactctttattttattgtgtttaataactttgtatttattataaaccaatccatatatatatacacatagaccatccaccattttcactcaaaccttctcacaaaaaccaacccaaattctttctatatattaaaaaaaaatcaacacaaaggaaaaaaaa

SEQ ID NO: 2023 - DNA, 3000 bp, Unknown
  misc_feature (1)..( 3000): cDNA_ID_2148580_gDNA_ID_1620478_Annot_ID_158229 3000 nt of promoter + ATG
taatgcaaaaaatctcttattagtgattaagaattgataagttaccttcttgagtattttgtctgttttcacctaataagcaatggtattctcttgaatctgattcatttggtatatgctcagatgggagattcaacatttctcgatagaatgcttctccagcttcgctccacttgcaagtaatgagttcgtttcgttaattctataactgtgtagaaaaccaatcatgataatgggttgatctttctgttaaaatgaaggtattacagcggttaccctaaggatctcgggccatcgcgggttctccattttacatcagaaagagagtttgtccaactccttcaccagggctatcctgtggttgtcgcattcaccataaggtaacttagcatttcccaaaacctttcaaactacactatattcaatcacgtgcgtcttcttctataaaacaggagtaactacacacaacatcttgaccggatgcttgaggaagctgctgctgagttctatcccaacataaaatttatgcgtgtgagtcgatgtaaagctgtataaaagaatacaaagaaaatagctggtaaaccatgaagtgactgttgtgtttggattgtttcaggttgagtgtcccaagtatcccggattctgcataactcgccagaaaaatgaatatcctttcattgaaatattccatagcccacaacatgtatagttctaaagtcttgtatttccggtacttaacctgtttaaatcacgaaatctcctttgttgttgtatctcgttaaatgaaaatccatctgatgcaggccggtaatgaaggaaaagtacaggatccaaatatcactcggtattcagtgaaagttgtacctgtaagttgaagcatcacacattgtcttttatacatattcatctattgcagagtctaaaagacgatatttttccttgtttgtttcgcttggcagtacaattatgatatgagtccctacggattcagagaattctttaagcgccagggggttcgtacttcggatcccaaatgaagcaacttgaaggttggttcgtattcacaagcttttatgagtgtatcaatgacttctgtgatctaccaacgactgaactattgtattactaaatttcctttttgccttcagaagaagaataaaattcttatgatatatgtctgagaatgttccaagttctactatttccatgaatcaataatcagagcggtgtaaaatttaaatgttaaagtaaaaaaaaaggcattagatatgactcttatacatggtatgtgaatttcaaacttagtcttatatccagatttcacacttttaaccattcaaacatcgaaattcagcctcgtaatcagttctagaacatcctaaacatcatttcccactcctaaataagaggcgaaccttctgaaataataattttaaaacttaatacaattagtgactatatatatagttaatgattttagttggtaacgagcgatgttaggttaaaaactttagtgcgaatcgtgcgatcagtaactatatagagttaataaatttagttgataatgggtggtgattttagttggaatggggttgatgttagattttatttgatacttttttttttgtcatcgatttaatttaatacgataaaatggttttatatagttaggaattttagttgagaacggatggtgttgtgtcgagtcatcgtctctttatttcaaccattatctctttagctctatacttctatccatgccataaatgatttacgtaggaagatccattattttcttcaggtctatagtttttgttcttatattagtatggctgacaacaacaaaaaacgaatatgcatgaatctttgagagcaattccctaacagtctaaaatttaatacagccatgttcttatcgatgggatcacattaatgatacaaagaaaatgtcaaaaaaattggatctgcctactgctttgatctaaccactactgcttcttccccataacactatttactacgtactcgaataattgaatgttcccttgacctatatgtctttttcattttcaatgttttatggatttcgtggccaatacaatagtagaaagttatataattttaattttaaataaaaaaaattgtggaaaggaaaaacaacgaaactgtttgatagagcttaaaacaatgaaacctagaacttgtaaagttttatgttctacacatatatagttcgtgactacgtgtatataacaaagcgcattaaaaatgaaattgtagaatcaggtaaaaatgatttacgtatcgtattggtgagaatgatttagctataactatgatatattggtaccattattttgtgtcattcttcttatatattaaaacatgattatcttctaaatccgtttctgatatttttctgtttggcgttttcttctttcgatagacatccgtcttttaacttgtctttcacttacaagcaacttacttttgctttgctaatggatttaagatgattaaaaccccatacttcatagttatatactagtagtattaatttattttccggtgagtattataaggttgtgagactgtcaatttgtcatgctcctttaaaagtaaaaaaaattttacaaagtaatattttgtatacgacaaatcgtcattctcatactactatatatacaacacacacatcgaggcttgagcaaaatagtctacgcgtttccttttcccttgtaatatttgctttttaaaaagattttgctttatcaggtaaacctctttggatgttttcgttctatcaatagcacccaatgcctaattttaatatacctttctagtttcttttatttgttcatcattaaggttcgatttctctctacttacaatcaacaacatcaaaaaagacttgacaaaacgctttagatcactcttcttcttattttgtttcattggttttgtttctgtgtgcaaacgcgcagaaaaaaaggagaagaa

SEQ ID NO: 2024 - DNA, 3000 bp, Unknown
  misc_feature (1)..( 3000): cDNA_ID_2148532_gDNA_ID_1620479_Annot_ID_158261 3000 nt of promoter + ATG
tcaaattttgaagcaaacagttattataattagaaaaaataaaatccaataaaattaatttcctgattttaatcattccttttactatttcagtattccatttccgaactgattaatttccttttctttttataaagagttaattcaactaccatttcatttgtgaaaacaaaacccaaaaaacaccaaaaataaagtcaaggaaaaagaagaagaaaactaagttgtatcttctagagacacacaccatcacataagttcagtcaaacacaagctgacatgtctttgaaactctgtccaaaggctttaacttctttaacatgccattatattgtctgtttctacatcttgtcgagaatgtcgccatctttagaaaagtaacgcttgctagctagtatgtacgcagccatttgctctgtgccttcatatttctatccattccaagatctcgaggttctttgataaacaatcgggaacaattgttggttctttccagatgttcactggatcactggaatggatcatgtttctgacgataaaacgaaataaatattacctgtattagtgttacacatcgtttaaactaaaagcggaaacacagatgtttttattgtattgttcatctacatgcatactagtcaaagtacgtacctaaagtgaaaaataaaacaatagtatacgacataccaacgtaagcttgagagattgaagtcttgcagcgtctttgagtatacagttaagtagattacaccatcccacagaacatgtacatatggctctagatgttcaagaaagaattgaagaaactacctctaggatatggagtctgcaattgaagtatacattatttactgaagtgagaataacaaaacataagaagagaaatcttgacattattagagctagaaagttttttacctttgagatcaaattaagaacttattttctccgaaattatgacattttcataaaggccaaatcaaaggataagaatatactatagtcttgacatgagagatcctatctaaggagaataacatatggtggagatgagtcatgggcactcatgggtcctactccaaagacccattcaattatttatttattagaataaaagtcaaatgattattctatctggattaataaactaaccaaatacattgtgtaggttttgcaaaggatttttagcttttggaatgccccatccaattttttttaatgattcacgttgttccgattttcttcttgtaatgcatgaaataaaattgaatctttatttagtttcttaaatgtagtgttaactttaagcaaatgatgtgaacaaaactctgttttcacaaataatggtgctctaaattactacgacaaaaaaaaaatatatatatatatatatatactaaatgcggtgacgtttttatcgtacgagctcttgctagattgggccattttagatgggcttttaaaaagcccagatattcaatgaacacgcgctttattggctaaaatctgcgcatgtgatattttgttaaccatcttagatcaaccataacgaggataacgctcttttgttctttttgcacttttctctgataatttcatgcaagattggaacttcgaaataattaatttttcaaaattaaaagtgcatttttttttcatccgttgtgcatatcctcttagaaaaatctcaaaggagacttttagtatgtagtaatgtcaatattgattttaaagaattatgaaaaatatgtatgaataggaatattattctcctaacttaagcacttcaatttgaaatctgtatattcaagtatcatagatttttactttgaattgaattcagtgtgtgtcaatgctaaaaaaatcgtctgaaacttgataacttgatattatcctccatatttcaaagaaaaaagcagtctttttatttgtcgggaaaaagttgtttaaagagggacaagattcttggtttaaggatatagcgtaattattactatgcataaaatgtcaatataaaataacttaaggatatacgttgttatatttctatttaaattgattttgaggaaaagtcgttattattagtgatgggaactacaattttcggtccaattaacaaaatcagaattaaaaaaaggtgagcggatggatagtggtgacgaggacatgatacggatatgttttaagagaatgggtcttatcctcttttgcctagtaacagcaccatagggaattgaaaaaaaaaactccctaagaagcaaatctaaacaatagatactactattttaattacacaaaccgacctttatcaatatttttatcttctctgcaaaacctttagacctaatctcttttttttatatatagtaaatccctattcactggaacatctgtacatgacaagaaaacatatgttatcttatcaaactacaaaaatatactaattatagttagtttagaaatgaaatttttggtattatattgttgattgtgtattattttgtaatgttatggaaaacgaataagactcaaaataacaaagtaaatggaaaaagtgagttaagaaaaaccaaaaaaacaaaaaccaaaaagctgtgatatgataatgacgggccatagaatgagaaccgcatatgggaaaagaacacaataatagcaattaacatatgcgatgagataaacaacaataacaaaaaatttggagataaaacttgaaaagtgaaatttatttattttaaaagggtcaacgttatccacggcttgcacgtaagtaatacccacacatatatttatcctttttttccttctctttacgcttttttaaaatttaaaataaagaagaaaaaaaactcaaaaaactcttcacatatcccatatatatgtgtagatatctattctgcaaatagaactcacgtttctttgtttccaattgtagaataacacacaactttatttctcctgttcaagactcctttattttctcttatgttcaaagagatg

SEQ ID NO: 2025 - DNA, 3000 bp, Unknown
  misc_feature (1)..( 3000): cDNA_ID_2148540_gDNA_ID_1620479_Annot_ID_158263 3000 nt of promoter + ATG
gcaagccgtggataacgttgacccttttaaaataaataaatttcacttttcaagttttatctccaaattttttgttattgttgtttatctcatcgcatatgttaattgctattattgtgttcttttcccatatgcggttctcattctatggcccgtcattatcatatcacagctttttggtttttgtttttttggtttttcttaactcactttttccatttactttgttattttgagtcttattcgttttccataacattacaaaataatacacaatcaacaatataataccaaaaatttcatttctaaactaactataattagtatatttttgtagtttgataagataacatatgttttcttgtcatgtacagatgttccagtgaatagggatttactatatataaaaaaaagagattaggtctaaaggttttgcagagaagataaaaatattgataaaggtcggtttgtgtaattaaaatagtagtatctattgtttagatttgcttcttagggagttttttttttcaattccctatggtgctgttactaggcaaaagaggataagacccattctcttaaaacatatccgtatcatgtcctcgtcaccactatccatccgctcacctttttttaattctgattttgttaattggaccgaaaattgtagttcccatcactaataataacgacttttcctcaaaatcaatttaaatagaaatataacaacgtatatccttaagttattttatattgacattttatgcatagtaataattacgctatatccttaaaccaagaatcttgtccctctttaaacaactttttcccgacaaataaaaagactgcttttttctttgaaatatggaggataatatcaagttatcaagtttcagacgatttttttagcattgacacacactgaattcaattcaaagtaaaaatctatgatacttgaatatacagatttcaaattgaagtgcttaagttaggagaataatattcctattcatacatatttttcataattctttaaaatcaatattgacattactacatactaaaagtctcctttgagatttttctaagaggatatgcacaacggatgaaaaaaaaatgcacttttaattttgaaaaattaattatttcgaagttccaatcttgcatgaaattatcagagaaaagtgcaaaaagaacaaaagagcgttatcctcgttatggttgatctaagatggttaacaaaatatcacatgcgcagattttagccaataaagcgcgtgttcattgaatatctgggctttttaaaagcccatctaaaatggcccaatctagcaagagctcgtacgataaaaacgtcaccgcatttagtatatatatatatatatatattttttttttgtcgtagtaatttagagcaccattatttgtgaaaacagagttttgttcacatcatttgcttaaagttaacactacatttaagaaactaaataaagattcaattttatttcatgcattacaagaagaaaatcggaacaacgtgaatcattaaaaaaaattggatggggcattccaaaagctaaaaatcctttgcaaaacctacacaatgtatttggttagtttattaatccagatagaataatcatttgacttttattctaataaataaataattgaatgggtctttggagtaggacccatgagtgcccatgactcatctccaccatatgttattctccttagataggatctctcatgtcaagactatagtatattcttatcctttgatttggcctttatgaaaatgtcataatttcggagaaaataagttcttaatttgatctcaaaggtaaaaaactttctagctctaataatgtcaagatttctcttcttatgttttgttattctcacttcagtaaataatgtatacttcaattgcagactccatatcctagaggtagtttcttcaattctttcttgaacatctagagccatatgtacatgttctgtgggatggtgtaatctacttaactgtatactcaaagacgctgcaagacttcaatctctcaagcttacgttggtatgtcgtatactattgttttatttttcactttaggtacgtactttgactagtatgcatgtagatgaacaatacaataaaaacatctgtgtttccgcttttagtttaaacgatgtgtaacactaatacaggtaatatttatttcgttttatcgtcagaaacatgatccattccagtgatccagtgaacatctggaaagaaccaacaattgttcccgattgtttatcaaagaacctcgagatcttggaatggatagaaatatgaaggcacagagcaaatggctgcgtacatactagctagcaagcgttacttttctaaagatggcgacattctcgacaagatgtagaaacagacaatataatggcatgttaaagaagttaaagcctttggacagagtttcaaagacatgtcagcttgtgtttgactgaacttatgtgatggtgtgtgtctctagaagatacaacttagttttcttcttctttttccttgactttatttttggtgttttttgggttttgttttcacaaatgaaatggtagttgaattaactctttataaaaagaaaaggaaattaatcagttcggaaatggaatactgaaatagtaaaaggaatgattaaaatcaggaaattaattttattggattttattttttctaattataataactgtttgcttcaaaatttgataataatcgcatgagttaccccaccgtatctatatacgattaaatcaccaaaaaaaaaaactaaatttcaataattgctatttgctactacgtatttgtttcatatacatattaaaagtgattttattttattttttgtggcgaaaccctaactggactagggttcttttcttctttctttgcaaatttcggggcgagttttccaaagagcagaattcggcagaataaacaaaaat

SEQ ID NO: 2026 - DNA, 3000 bp, Unknown
  misc_feature (1)..( 3000): cDNA_ID_2148685_gDNA_ID_1620480_Annot_ID_158269 3000 nt of promoter + ATG
gtaacaaacggcacgacgtctataaaggaagtgttggaacggtatagcaaagaagatgtgaggaagatgagagaaagagtgattgatttgataccgaatttggtttacgctaagtctccgaatgggttagagactttcaaagacgcttttgatgtggcgatagatggagtttttaggagattcaaggagcaagagaaatggtacaaatggagatgatgattggataaaattatttatttatttaataaggatttttcaagtttttagctccagtaaagttatgattacacttgtaaatttatgatttttgttttgagagatgaataagttgtgttagttgaatttttggtagtagtcaagtaagtaagttgttctatgtgttgaattctcatttatatattctcttttggagacaatttatagttttctttctgattcctacttactttacagtctcgatgttgataggctaaatagtttttgagtgttttatatatctgtaatctcttgagctaatttggtaggtgggaagtgaaaaatcaaccagaggcccgcatctttgcacgtagaagggttattttattaagtaagttgtacgatgataaaaaggtggtaggtaggagaagtagaatttgattttgggggttaggtttgatcatcgtgtaatactcgtgacacgttgattactctaggtaaaattgagatatatgctcttgttttctttgggaaagtttaaatctgttactttccaataaatccaatatctgtaacaagtaaagaagctggatcagttttgtcatgtcttttgccaatatatgtagtaagtatataacaaaattggttacaatgaacgggagataagttcacctaactaacatggccttaagaaatgatagatacttggtgtaaattgaatatattctatgcttcgaaaataatactagtactcaaagtaatagtaacacagaaaaaaaatagtacacttcaaatactcgacaatcacttttcttcatgaaagatattttcgtagtctagtgcttctatatgcttgctatatcactatatgcttgtttgtggattgtgttgtgccaagtgtaactgagtaagtatgaaggtaagttaatataacaagggtaacttctcaagttctctatttaaccctcatctcccagatctcttttcaagaagacaacaatggagtgctctctctcatccatcctccttctccttgtactctgcttcactcatcccattccttctctaaccttcgagccactaatctcttctcttgatcttcatgaagaagaaagctgcccttacactgtaattgttaccacaagctgtttctctcctgattggtctagagatcaggtcactatcgctttgggtgacgccgacgataaccaggtttgatatacaaaaactctttggttgttttgttctatttgtgggtccaaatatttgttatgttcgtattatttcaaaccctgaagttatacatattccatcttgtttgatggattcacgtaagaagtttgttaaactccggataaaccaaagccattagaaccttaatgaaacttattttgaatataacagtcttattttgatggattttagtgacgatgcatgtgttatgtgtatcttattaataaatacgtatatcattgagttttggttttaatttattaggtggtcgcaccgagactagacaaaccgctaagtggaggaggtggttttgagaaatgttcatcggacacattccaagtcaaaggtaaatgtctcaacactatctgctccgtctacatctaccgttccggtaccgacggctggatcccggagaccgtcgagatatacaaggaaggttccaaatccgtgaaattcgatttcaacaagaacgtccctgaaaacatttggtacggaaacaactattgtaacaacaccgatttgccaccgccttccccggatttccctccgttttctccatccatcccaccgccttcaccaccttattttcctcctgaaccaccttcaatcccgccgccaccaccaccatcaccgccgtctgctgcctctggacgtggaagtggtcagagtttggttgttgcgtttgctgcgtttgtgtttgcgtttgcggctgtggttgtttgagttattttgttaagaattaagagttgtctcaataagtaacgagtatcgtgtaatccctctgttttgtctttgactctttgtagttgaacattgacaatttcatattgtggtaacattaattagttaactaatgtatgagttcgagtttttaacgtactattccttataaattctgcatcaatgttttgtatgtgataaatctatgaatattagattacacaactatacaaccacacaccatgaaaatacaatttgataatgacatttatgtacttcgaaataccaagtactcttaaaactctaaactttttacataaatctagagctatagagtaaacaaatgattctaaaatgttgactttagtttattatagaaattccagtatatcaagatgttgtaaatttacttagtgcatgatcacattcagtttctgtggatggtaaaatgatgatacatgacaaaaatttaatatcagtgtgcaagttttgtattgatttgtatacaacatttttttttcaaagcttaaagtggttacttgattaagaatcatctagaaaagcacataacctacagttacatgtcgaatctctaatcaatttcttctatacaaaacattaattacattttctcctctacctaaatattatgacactgacaagagatgtgtggcctgtaacttgggcgcgtcgccatttatttcagttcttataccgaaattgaatttgtttgaatttgacccggtctaatccggtttatcctcaactggttcgagactttatcttctcaattactctttcgttttctcttcgcttgtgtatctgcgagcgatttctcgaagcacgaaaatg

SEQ ID NO: 2027 - DNA, 3000 bp, Unknown
  misc_feature (1)..( 3000): cDNA_ID_2148717_gDNA_ID_1620480_Annot_ID_158278 3000 nt of promoter + ATG
ataaatcataagacacagtgttgttttaatagaatcatgatcttgtattagaattctctgttatgtttaagaaggttccttcatcgtttgaaacgaattgaaagatgatttagagaatcttgtcctaatttgttgtggtatgttaaaagttgtggtgcgtttggcaaagctaaaataaaagtatgtttgtttttgtctaggaagcattatatcaacggaggtgatgcgttactcgcccgcgaaccagaagcggaggtcgaagcggaaacagaagcggaaggagaggcgcatagcatgtctcaaagccggtaagcaaacgtgattccaaaaatgaggtgttttggaagcgtagtgaaaccacatgactctagtttggaaacgttggtggtgtggatcggaagcgtcgatggtgacttgcaattctaattttgggtttataatttgttttgtggcccaacttaccttggtcaccataagcatttaatgtttggtattttaggttatttcatttttgctaatatattcaaacaaacatataaaataaaaagacaaatcaccacccatgatattaaaaaaaaaacactaataaaagatgatgtctcctggaatggtcgacgcagaatctgtagccactcactgttctttatcgttgtctcctcctcaacattatcccaatcccacgttcgcttaattttttaatttttaggttggattttatttttcatcaaccatataaaatcattgaatagacccattcttttatcccaacctttgaattctttacctcctcccacttacaattattcgagatttagtttgaatacatgtatacttccggtgatttgatcttggtcggaaaaaacaatcttttacgacttttctgaagtatgtcgcgacgataaagactattgaggattcatgtctacgtctacggtttcaaaatgtcttataatgtctactgtgtagtacatgcatcgaactccaattatacctacacgtacgtatttaataaagttttgtgctatttaaatttgtatacgatctaaacatttctaatgtattttgaacgtcggaccagtaaaatatatgaaatcgatcgaatgtagtagaatttagaagttctctaaatatttgttttgctattttttgttatgtttttgtcaaacttttgatatttttctttcttatctctttgttcatgatctacaattatcaaatcaaccaataggaactgtttcgagttgcacttggaccacaatatcccacactaaattaaaacttgaaccagatcaaaatctcttcggacctttgccctttggaccagttcggtccaatttaacctttcaatacccttatcttgatagagtactataaagaaataataatgacagatgcatgaaactagttcaagtggaaaaagcatcgtgcactgatatatcttcatcaattgcaagaacatgtctcaataaacccaaaactattcaaacattttttctgaatcatatctatcagcatgggacactgtggctctttgtgcctttggattcaacgcatccttcacaatcttttttttgtaactgcatctcattatcgcattagtagcaatcaccacctatatgaaatacctctttatatgtatatgatatcgatttaaaagtatttagtaaaaatcgattaatgttttctacaataagattagtcagacgcgattgccaaatccataaatccaaaaagaattatatagcaattgatatactattactataggatatattatagagtggatatgtttcaccataagcttaacattaatttctcaatcttggtttgcacaatgattaatgcataattagattaagtgtatatgaagcttcatggaaacccgtacgtgagaggacggtcactagattgtacaatcaagaacgtaatatatatatatccattaatctaaaccgtacgttgtagctaattagttttgtgaaatcgagaatctaatcttgtaagaaaaactgtaggcttgttgtcagaacaaacatggacccatgttctctatgtccctaagatgtgtaccaatctcaattcacttcttttgttgcactattttttaaaaaataacttttattttatattttgagatctccattgcccctgctgcactagacattacagctcattttttccttataattcaatccctagctatttttctttcttattagtttaaactaatcatatttgggtaattagcgttgaaactatctatcatatcaattttaatgatacatatgcaatactttatgtgagtatatgcatgtatgcatgttccaacatccagattaatgactaacgtttaagccctgattttttcagagaaattttgtgttgtacctatgtttgtattacacacaatatttaccattgtttaacatgtacacatgtgtttataaatctccgtacactataatgcatatttgaaccatatatgacagaaagttttccactagttctaattacattttgttgccctttcctactcgtctattgcctatagaaatattattttagttatgattaagaattgggatgcacattccgaaattaattattaaatgccactatgaagaacccttgaacatagtctaattcaattttaagatcataaggaacattaacagtgacaatagctaaggtctctcgacaatgagacaatccgctttttaaatatatacatataagagataccatattgtatacatatgcagatacaattacaacttgaccaaatttattcaatttctccttctctttatatcaataagaaactattcatgatactggaccagcctgtttgaatcttgtcccatccacaaatctcccaatatataaataaagaaccttcacccgtaaaaccaaaaccatcaacaacttcaaagctttctaagcaagagattgagagaaatcggattttctttctaagactcaaaatatctaaaaacaata

SEQ ID NO: 2028 - DNA, 3000 bp, Unknown
  misc_feature (1)..( 3000): cDNA_ID_3065635_gDNA_ID_1620480_Annot_ID_158280 3000 nt of promoter + ATG
cttcaagtcacatctatcagcgattgtgcatattcgagagtgctcttctacatgtacaactggtatttcaacttcacagatacgacaaatcatagaattatcgtatgtcacacattgatggtccgcccagaaaccccacaaagcacttctgtctgcagatgcaggctggcctgacgggctatgcaagttttcagcgttttcatcaccataaacttttggttggattttgctctcccccttagccttgggagtgttattaagactacggtttttctcggcagcagatggaagcttcttccaagatgacatccgaaaattgctcgaagttgaatcagtacttctagcagtatttacttccactccatcagctccgctgttcgagttctgatcatcttgtttaccagctagattttgcttttcatttatcttttggatttccttctctcgaagaaggtcctgttgtcgcgagatttccaccatctgttcaggataaactccaagatcacttagctggtgcattcccagaatgtgttcttcaacataaccactctctttacgaaattgcacaagcctattgcaacgagtaagaatgaaaagaagacgattatgagcctgtttcagtcctcccatgggtagctcctgacgtttatcatcaagcttctgaacaataccttcacatttcaaccaaaactcactagctggcatggttgcacattgccgagcctcaactaacaaatcctctagacccactcttaattctttgttagattctggtgtgctctctagagttgtcactaaatagccagcaaaaactcctaaatcagcatcaacatcttccttttgcttatcaaacttcgttctgatcgccgccataatctcctgtaaaacgttccacagattgcatcaaccaaatgagcagaacttatcagaggtgagaagaagcatcaaccaacactaacctccatgtgaccaactgcgcgagatctccacacgggaaaaggtcgcacacctttagaattaagttcatgagagaagctcttaatgtcatgagctttcttcttccttccacttgtgacacgcaatatcgcctgaaaacgtggagattgtgtttccttggcaagacctacatgagtactctgcattcacaagaacaacaaaaaaaacgaatcagcaatataaaattttccaagaatttgaaaaacaaacatagaagaagacattcacctctacccctggatttgaatttgcaggcactcgttgagattttgattgactccactgaacttttttccctaaaagacaaaacaacaaacacctcctgatcattaagatcctctgaatcatcatcatctaagttgaattttcgaattcataaatcctaaatcgaatcaacgagaaatctaccttgatcgggttgatgtggaggaatcggccatctggcacgagcatcagcacgagcatcaacaacaccaaccctcggtttctccttggcgacgtctttatcatcttgacccggagatatcaaaggcgtggcagatgaaaatctcaaaggagacggcgcaggagacgatttcgttctgatatgattcaaacctaaggaagaaggagcaagaatttccggcgaatcgtgactcatcggaccttccccagctaattccgtagtaacctcgtccgtcttcgcttgttcatcttctccttccttatccgaatggcggaaaggaatcgcagggatcttcttcagaagcttcgcattggtggaagtcggagtagatatggtggtcggttgtggatcccgatcattctcaggcgacggttccgtcgtagacatttgttattaatagaaaaatttgtggagaattatttgaattttcatatttacactcttttaatttttgtttgtttgtttgttttgtgattttatcaaaacataacgattacagagaagcggttgcgagagagagagagagagactgaggttttcgcgggaagtgggggactccgtttttactacttgatgcaaaaattggctcattcgccattttttttgttcttcttgcagataaataaatttgactatttacatctaaattttatggtaatttgttatctttaattcaatatgactatagttatagtatgatacttctatttgatgttaacttaatatctttaaattataaagatttgctgtcaacaaaaaataattctaaattagttccaaattcaaaagtcagacagagattttattatggttgtgatttgtgattattcgttgtattcttatatccatagtgctaaagttataatttctgactttattattcttacaacaccttaagttattaatgaatggtgatattttatgatttgtatagttcttaaagaataatcatgtgggagagtgtccatatcgaaactacgtgcttccaacaaatgcatgtcttccccattttctagaaataacaaagaacttaatttttttttgtttaattttaaaaaatagccgttcgtgatgttttctctgggttgactaaaaaacacggtaccaagatatttttggttaaaacttctaaaaaatattaatttgttttttataataacacgtttattcattacaaaaatttatgtaattaaatcaaacatggtttgtattttttaataaaatgaattgttttccaagtaattgggtcaaaacacaaaagaaaaatacagagcaaatatttttgtagttattgggctgaatattgtttgggcccaacaagtccatataaattagggttttcatattaaatcaaccgtctcttaggttaaatcattcgactccttccttccttgcagcaaaaagcaatccgccgtcgagcttcgttcgtctctcaggttctcttcacttgatccaagttttaatatttttcatgtttacatgagtttatcggatcatttgttaatgtgatggattggttggtgtgtttgtgattgttttcagaagaagctgcaaatatg

SEQ ID NO: 2029 - DNA, 3000 bp, Unknown
  misc_feature (1)..( 3000): cDNA_ID_1009366_gDNA_ID_1620480_Annot_ID_158279 3000 nt of promoter + ATG
acacaatatttaccattgtttaacatgtacacatgtgtttataaatctccgtacactataatgcatatttgaaccatatatgacagaaagttttccactagttctaattacattttgttgccctttcctactcgtctattgcctatagaaatattattttagttatgattaagaattgggatgcacattccgaaattaattattaaatgccactatgaagaacccttgaacatagtctaattcaattttaagatcataaggaacattaacagtgacaatagctaaggtctctcgacaatgagacaatccgctttttaaatatatacatataagagataccatattgtatacatatgcagatacaattacaacttgaccaaatttattcaatttctccttctctttatatcaataagaaactattcatgatactggaccagcctgtttgaatcttgtcccatccacaaatctcccaatatataaataaagaaccttcacccgtaaaaccaaaaccatcaacaacttcaaagctttctaagcaagagattgagagaaatcggattttctttctaagactcaaaatatctaaaaacaataatggctttttggtctgctgagaatgctactaaagcctatcttagtacattgaaaacggtaagagtttattcttataaccaaaacatttacccgtgatattgtttcaaattacgataaaagattagttaatgtcacattttgacatatttctctatatgcattttcaggatcaaaggacaaaagaaccaaacgtcgccgaattcatatcagccctagccgccggaaatagcgctagaaagatagccgtggcttgcgccggagcagcaaacgccgacatactcgttgcactaatcgcagcggctaaccaaacgcgtggtcaagttgtatgcgttttacgtggtatcgaagaactaatcatatcccaaaaaatgttggaaccatcagagattcatcagatacaattcgtagtcggagaatctaacgacgacactctaatcaataatcatttcggagaagcagatttcgtcctcgtggattgtaacctcgaaaaccaccaagagatcgttggaaaaatccttaatcatcacgaagaaaacgcaagaaccgggggtggaagcggtgtggcggttgtggtgggttataacgcgttttcgagagggtcatggaggtttagcgatggaaggaaaacgcagtttttacctataggagaagggttacttgtgacgagggtcaatgataatcagaagatgatgatgaaaaatcaccatcgtgaccaagtgatgaggaagagtcgttgggtggtgaaggttgataagtgcactggagaggaacatgtgtttagggttagggttccccgaggagaagccattattgaagcttaaattcaaatcttatagattattgggtacgttagagcaaagatgatcacctctgtgatggttcagacgagtgaaagtagtaattaagaagatgattagttattttgtataagtaattatattaagagagttttgattggctttggagtattttgtgtggtgagaagagtgaaaaagtctatgtttttcgagtaaatgactttttttgtaagtgtaaatatgaaatgatgtgttttggtttaaacttctctctgattttggattttttttttttttttttttgtcttttcttgagcatatgtacacgcattgttattcttcagattttggatgtttagcaaataagatattcaaaaaatgcacatgcatgcatgagagatggcatctgaaactaatataatgaaacattaaagtaagcatatgtatttagctgtcttatacagattctcaaaatagatgtagacgtatattattgagaattgacaaaaaaaaacgtatattattgagttgttgagtctaattttttttgttgacactatttaaaaccgacaagcacgtcaaacagatattagtaatagtatatagggtcttcagacatgtattcgtttgccttaaaattgtattttaaaaagatcttcttctttttttcatcaccgttacctttattataaaaccaagaagattaatatatagtgaaatccgtaaagacgaaaaattaacgtagttcttatattgaagatgaactaccaaaatctaattaattcttatgtgattttgttaatcattgtcttggaattcactatataatgaagttcatcatctctaaggaatggttttactttggtccgattctttcgacttttggtcgttccatttctcattgaatcaaatctatgcccaaaggtaaaacataatcttctacagtacttttagatatatgatccaaattctcatcgacctaaacttataagtcattgaattcaactaggcttgtgcacatagctgggaggcaccaaataaactccttcttcgaagtagacaactcgtaatgaatgtatattatttttatcaaccgacatctccgttaagaaaatagataacaatttgaagagaagagtcgttgttgacaatgatccgttcattaatataaagcattgtcacaatctctatatgtcccataaccttcccctatccccatgaatgaccacccccatctcttccttatccatcatctcccacacctcatcactctcaaagacaacgacatttttcacccataaatatatttacataacaaaatttattcgaaacaacattaatcaacaaccaaacattacattcacacaaagtaacaaaaaaggttcaagggaaatggaccaccagagagacttatctgatctcaatagtttagtgggcttatgttttaatgtagtatgggcttttttaacgaagcccattttgtcaaaagccttgtagtgttcttcatcagtaaacgtaacaaatcattcctctgagaaaccctaagaaaaaccctgcctgaaaatctctgttttttttgacgattctttctttgtgatcggaaaaa

SEQ ID NO: 2030 - DNA, 3000 bp, Unknown
  misc_feature (1)..( 3000): cDNA_ID_2148752_gDNA_ID_1620480_Annot_ID_158290 3000 nt of promoter + ATG
ccaactccaagaacagcattgtctctaatcttctccgcttgaacatattcaaaggcaatacagaatctccttagtcgatctagctccgcgttaccattagcccactgcatgtactgtgatttttctttcctcaacttctcgagagccggcaatatttcatgatcaagaagcttattaatctcatcaaccttggtctgctttttttcaagcgttttcaatgcagcctctttcttgttttcatacatccttgttccagcagcttcttcaagcatggacaatatctccggaggcttcatattcaaaactttggtgatacgcccttgcatgatgagaaagtgtggattgttgacattaagctgcaccgagtgaaatagattctgaacttgacttggttgtgctagcttcccatttatcaaatacttgttccttccaccaactacaatctttttaacaccaaaagatacacaattccaagttaaagtctcaaattttgtcaagcacatgaattgatgagtacaacaaaagagaaacaaagaacatacttgtctagtcacagtaatctctggatgttcttcgtagccgagagggcttctgtgtctctcggaattgtcaaaggtaaccgagacagtcgccttagtaatcccagcttggccttgcttatagacgagttcctgaagattagcagctcgaacttgctgaagattggtgatacccagaacgaaacagatggaatcgaggatgttggattttcccgaaccattcagacccgttatcgcgttgaaatgtggatcgaaaccagaaaccaccgtcctcgtcgcgtatgatttaaaaccctccaagcatatctcctttatatgcatcttccttcttcttcttcccccaaatttccactcacactcgcagcatatgcgacaaaaccctagaaaaaagcgagaagagctcaatcgaaaccccagaaattcgaattcaaaattggaatctaaggtcgaaggcacatgaaattgaaacgttgcaagagaagaagaaggcgaatctgaagtcaattttggttttttagttgaagataattaggagtcgatttgggattttgaaaacaagggcatttcgatttgggaacacaaggagcgggaaagtgaactttgggaacagttctgaaaccttccacaccattcagaaggtttgatggtatcaaatacattctgtacaattttatacatgtatacttcatatgttaacaacgatatcccactctgcttcacacccacaaattaatggttcattccttgtttgaatatgactaatgaatggtgctatgtttgttaatgcacatatatcatgttcgacatgcatggcgcagatccacacaacggatatcgatatcgtcgagggagcaaaactataggatctaatttctataggccacgtaaccttggccttggacagttatatttatgatacgtgtagcttcacattaaccgtcgccatccgatcgactacgagaagttatttttaagagtttaaaacctttcgaaaatgggagaaataattgtttaagaaaaggatgaagacgacgaaggcgaaagcaaacacaatcttggggaagaaactcgaagaacttgagtattacctacaagaattcggttctggcaatggtgatcttaacgcataccgggaattcggaacccggtttgttttcacgcaaacccttttatgtgcggagatatcgtcggttaaggacgatgaagacgaagaagagatgttgaaacttcgtttcatggctaagaggttaaccgaacttgaagaggctttcaaggaaaagaccggtccaatcaaccaactggacttgcagagtttggaaagtggtggtggtgtagatgagaccactttggttcgctcgttggttgaatcgttacatgcagaatatcaagatgcgaattcattagaagagaagttggcgatgagaagaaccgagaagatgaagaagaagcggtttaggggtttggttagttttggtatagttggttttgttacgagtatggtaagtttctatggttatctttgtaatcaaatgaacgaggaaaccatttttctcactcctacttaactttggtgacaaattttcgttgttttcattgaacctactttgttttgattatgatgggatcatgtgaatgttaaattacaatgattatgatgtaattttcaataggttttggctttctattaatgttttacaatgattctgatgtaattttcaatagatctttgctttctatttatgttttttttgtttgtttcgattctcttggcattttttgtcttcgtgataaaacacattcaaaataacgtaagatttgtttggtgtggctcacgtgggagtaaccaggccccacgtgccatcttttacccggttgtaatcccaccgaaagattctcttgtcgacgtaatacctcacacgcttcaaggtcaaattcgtcatttccccactaaacacacggttatcttcaatatccgcctcatctgttcatcgaaccgggctggttatcatagataaaaccaatttatacgtcgaataaagaaattttcaaaccaacttatctcgccagtaatgaaaatactattcactagtaatatttaattgctaatacaataagctttagtaaacttttattagtttatatttgaaatggcatggaaatggccaaaccggataatccccatcgtaaatgtcaaacttaccctcaaggcccaccgtttttgaccattcttgctcttttgttcaatctcaacatcgttaaactcaagaatttgtcgtcttctccatcttctgtcttaaatctgatatcaaatttttggatcaaattctaaataaagctcatttattcgtaaagccattatcactaccaatccaaaagagcttttattaatacaccttactcgtgaccggattcgcagagttcacgagcttccgagtcaaaaacactctaaaacaaaaccatg

SEQ ID NO: 2031 - DNA, 3000 bp, Unknown
  misc_feature (1)..( 3000): cDNA_ID_2148748_gDNA_ID_1620480_Annot_ID_158289 3000 nt of promoter + ATG
gagtttattatagtatctctgtaattctatattagaatggtatgtaatatgaacaaaattaaaaatggaaccaaatggagaatttgtatgtaagtttggtgggggcaacaggaattgaaatggggccagcaccgaaggcgataaggagcttttttgccgcgatgatgttccctgtgttattacgtaaccactcatctcacgccacgttattttattactgtttttttaaaacaattatttactctgtagttcacttcttttttcctttacgatgttgttatgggttatccattaaaaaaaaaaatatttgtaaatcgtctatttaaggaaaataaaataaaacacttcatatcatgttatgtagtaccaaattaacaaagtattaacttcaaattaattcgccaaaaagatgttatgatgtgatgcattctttaatatagattaaactattggtgatttgtttttctatagttaatcactagcaagaacatttttcttttatgtttacagtttttagattataaaaaaatggtgtaataagaacatgtcaaatcaaatgtatttaatttgttaatatagatttgtgtataaacaattggtagttttgataattcaatttttcagcaatcatcataataatactttacaagaaaagctaaatcatctgaaaattttatatgaatacgtacggtttaattcccaatctacaacttttttagttggatttattataaccgtttttctaaaacaaaacacattaaaatttataagtgaagatccaatgggttcaaaccttttaattctcaataaatatacatagattctcgaagatatcctatcaacttgtaaaagttgtttaatcaatcttttgtttgatgaaatcttgttcaactgttgatttggttaagttttatagctgaaatgtgtataagtgtttctgaacctttttaattactgctaaatcaatttatgtcttacaaacttgccgatgtatcatgtatgttcattaggggtgtcaaaatgagccagctcgctcagctcagctcatgatgaacttaaatcttttatgagccagctcagctcaactcatttattatatgagcttcaaaatacaaactcggactcagatcatctagatcacgagctaaatgaggtagttcgcgagctaatgcaaataaatgaaaaaatttaaattttctaaaatttttatgtaaattatatatttttaaaaatatatttctatttttatagattatataaatatttatgttttgattgttgactttttgtgtttattactaatatttattttcagaaattattatgtaacttatatattttctaaaatatatttctattatttatagaaaaatatatatatactttgattgttagttttttgtatatattacttcaaaaaagccaaactcatgagctagctcatgttcattaaagctcgctcatataactcgtgagctaaataaagttcgatcactaaactcatttattaaatgatcctaaaaaatagaattcgcgctcatgaataactgagtcgagttgagccagctcatgagctatcagctcattttgacaccattaatgttcatataataatcgtaatccatcatgaccaattaggcaattaagacatactataacaaaacatttttttttttttcgtcaaacattgttttgttaaaggtttcaaaaagaacatgcgtatcaatttcaccaaacgaatctaataaatagcacgaccatcggatattatattgctatttgacgatcaacgtacgttcgattaaaaaaagtacggggattgtttagtttaatccaagtgtagtgttatttagacttcgagtaacatcaacgcgggagaagaaacgcatgggatgaatgtgtaaagtggttaactttcaacaatgtttcttaattgctaagatgtttaaaacgagtttacatgaattcttgtgttacttatcgaattatcttttatgagataattagtacactaccttattagggctccatttctttttctatctaggcctaggtcgatcagtactgtgtatgttacacatatgatattaaaaaaaaaattgattctataataatcttcataactaaaggcaagtatagtttatttgaaaacgtctcattcaatagttggtagagatagttctaaaagatcacattacttctctatcacacagagtgtagaaaagtgaaaacttatgcaacacttcaggtagaaagagaaaagacagtgatagcttagttataattaaagacccccaaaatccaaatagaatcttctcttaaataaactattgaaaaaatattcacaaaaaaataaaaagcacatttccttttgcttgcatcacgagagcttttgtctctctttacatttatgtgcctatatataagcctagagaatccaccatcatcggagtactcgttgtctttcatgatctcaacataaacaagacaaaacgcttttgtctcttgtctatctaaattaaatctacgaggaaacgaagagaagcaacaaaattcgatattttagaagtcttgcataaataagaagaaggtttcaagtaagtttctttcagtacatagagaaaccatgtatatgatttatgattgtcaagatgttacacagtcgtatatataattataagtatttcataaaagtaatttatgaaaccatgcacataactaacttttgtttttgattttgtaaattgagtagtttttgtttttattatcatttttatgtgtttatagttggttcagccgagatattatgagtaaccaaacgtaacctttttcataatgaaacggatcaaatatactttaatctttttcctacatatgcttagttacttgaaaacttgatttcacattacttctatgcatatcttttctatgtaccgcgcgatgataaagtatgtgttacaaattgccacattgcagaaaatataaaattaaaaagatcaa

SEQ ID NO: 2032 - DNA, 3000 bp, Unknown
  misc_feature (1)..( 3000): cDNA_ID_2148728_gDNA_ID_1620480_Annot_ID_158282 3000 nt of promoter + ATG
tgtggtcgaccgcatatattagaagaatttaaattccagttgtgacacatggacaatagtactaacatatctaagatccaactatagtatatgccagtcttatgaatcgattatttaagaagttgaaatcttgggctacgttacgtggctcgatgtgtatattggggactaataaggcccaaatcattgttacggcacaatataactcggcaaagcccgaggcaaaatatttcttgtttgcttatgtttgtctcgtgtctctctagtgcatgtgcaatatttgtatgtgttctggtaatctggttattgaacagatatttgataagttcgtacaattaatgatgagttgaaaggaggatctttttgataatttatcttcaacaatctcgaggtttacataagtgtaaggccagtttggtattcgagataagtgaaaagggactaaaaacatgtttaaaatctagatgtgtttttaagctagggttttttgtttagtcttcgataatcatttcgaaactcttttattcattttggactgatactacatgaataccatacaacaaaagaagtcaattcttactaattcttagcaaaagctatgaacaacatcttgacattgtttatttcatggtgcaacttagcgaactgggtatgaagtgactttcttaccgcatccgagactccgccccggactgacatctttaccggatccgcgaacgggctggagcaagaattctcgaccatatactcacccgcaatggcacagacttcagcattgtttgtgtgaaacaagcattcggtccaactgttacaattcaccacctcttggagttcttcgacagaacactgcgcatctgtagtgtatgtttcggttgttggtcggcagtctgcaagggtttggaactggctcttcctcaggtgtgagatgaagagcttcgtggacagcgcttgtttcagactcacggcgatagctgcatccacgaggcgtcgagggcttgtttggatcgtatttgcgtagaccgagagcgtgtccacgcacagggattggtacgttgtaactttgcaagaagattgaatgaagtttagtgcttttgtagaagttccggccgcggtgacggtggcagccgtgaggtctgaggagaagaggtaggagacggagaggagtagaaagagagcttgacattgttttgtcatgattgttgttttttcttgaggttgaaataattaagtgtgaatagaaaagagttggggttcaaatatttatagtacgggctacctttttagagtgcactattacttgatattgatactaatcagtaatcaccatgattaatttgatattttggttatttgtttcaaataaaaatcacgtatcttccactcactttcgttccaagtcttaattttatatatccatggtatttgtaaattactatctcgtaaccagatccgatcggattgttacacccaacacatgcagatatacattttgttgacagccaatttataattattttcccttataaatgtttatatactttttttttttttgttaattgttttaccaaaactaatatagaaaatgactcatcaaaataatatatgaacatgtagttgacttagtgaaaaatatatctgtagtttcgtttgaaagattagaaaaatgagaaataaccagatatcaactgattcatccaaatcgggaaaaacgaatttttcccaccataattgtctatacaagaaagtgggaactaactttcgtcttcatcgaagaggagcattctatcaattccgttagtacgaccaatatttatcaatagatttttttttttcttttcctaaattgttttatctttaccgacagaatcaagttgttgtcaaaattatttttcttgtaacaagtttataatgcatgatcatactacacattcatagcgaaatgcttaactttctgttttgtttttataaatgtgtttaaattttggtatatcattattatatttataagttgaaataatgtggataaaactgagattgtttcgaaaaatatgtgttagaaatagaaaacaacattttttgtgaagtcctatatatatactacgtgtcaaagatatttaataaattctcaattcgaaattaatatcatttcagtttgttaaacttcaaaggcaagtctcatgttctttttctctatttcaagattttatttataaatgaagtctcattttcttgtcatgatcaaaacgcaagcagcatgatcttttttccttaaaacatgtgaatgtacatacaaaattctaaagagccaagtttataaaagatttgaaattagataaacaagaagataaatacattgtttatttcacgtatatgcctatttatagttataatttttgttttgttttagccgtttgctaagagtagatgacaactttgttgtacgtgtaaactgtaaacgacatatcatcaaatcacgaataatccaacatgaattgtaaagtaatatgaaggtaaatacataattatacgaaatttatccgctaaacagtacgtcaaaagaatttaattatactttaatatgaaagtgtttaaaaataaaaatgaaagaagaaaaaggtttatatatcgaactataatatacacacaattacttatttaacaccgtattcaatggttttagcaaattccacaaaaacatcagaaaagattcaagaaacttttggatcatcgagttttcttaattatattgaatgaaaatgaaaataattattaatcttaattaagcatcacaaaaaatggccaagaaactccatacgtgtgtatatatagttagttagttgagataaacttggttaccacttttgtgttgtctttctttttctttttctccattttccatttatcgaccccttgggtgtagctaattactttcacgattttcaaatccaataaagttttaatttgatgaagctttttttaaaccatataatataaataatg

SEQ ID NO: 2033 - DNA, 3000 bp, Unknown
  misc_feature (1)..( 3000): cDNA_ID_2148724_gDNA_ID_1620480_Annot_ID_158281 3000 nt of promoter + ATG
attctgcgagtgtgctgagctgaatcctgaaccagttcaaggtaaaacatataattactggtttaatagtatcactaattgcattttttggttacctagccatttatatctttggtttcattgcatctttcagaagaagaagaagaaagcggacataattgggtgtttagtgctgatcagatggatgttcgtggaggaggtaattaatgttttcatatgacttagaccgaattaaagagtgtgttaatgtattcatcttgaatggtacgaatgaaatgtgatggttttctatgtgtttgcaacagatgatgatgcagagtggcaaatatctcagagtccgactagtgtaattggtcattccaatggagatgaaggtcttaatcagcctatgcttgaggtaatacaaagttacaaaactctgctttcaatttttcctctttttttgtttttaaaaaattgagcgtggtttcatctgccttttgtattcacactgcagctccaaatcaatgatcagaggtttgaggatgctgaagagatggttcatgaaagtgagaccaaagatcactagactcttcacaattgtactcgaaaacatagtagttgtgttattttaacgatgaaagagttgtattatgttcaacgataaagtattatgttcgtgatacttagcttttcaatttatggctgattaaactttaatctttctcgtaatagatctctcaatttgaaatgagatagcaagttggtaacttcatacagagttatgtcatcgagagggtcaaaagatctcaagttaagaataaaggacgaacttctaattaaaaaattcaaaatctattaaattaagaaaacataagaacttgggtttcactacaacaaaacatttgttttttttttaactcaaaaggaatgtcgttacgggaaaagaagattgtttcttaagagaatttgaaaagagataccaaagccacagaagggttgatctacgagtcagcgatggtgacctcaacttcaacaccaggttcaatggtgatggaggtgatctgcttgaccacatcaggagagctgaaaagatctataactcgcttgtgtaccctaagctcgaatctgtcccatgtgttggttcctgtttacaataccaatagttaagagagtttcagcaaatgtgaagacacttgcagtgacagagtataaaacagtattgagcacaatcacaaattctaagacctaaatcctaggtttaatagagcaaatgaactaagggagtggttccaacaacaagctctagtgattctgaaggcaatataaaagatgagatgagcataatcatcataccttcaccacaaggagctttacgggtagtgatcttgagaaccttggtgggcattctgactggacccttaactctcagtctcttgtccttagctccacgaaccaaatcagtacacactacatatcattttgtagaaacagaacaataacaataaatcagtatcaaaatgtccactctcaaaccattcgaatcatcactgaagcaaatcgaagtcaataaatctatcatcttctactgaaaaaactaaaccttcaaaattcactaaaactaggaaaacattgaatcctcaaacattctttacggttttgaaagcagctcaaaactaaattgctgaagcgaaatgataagataatcaaaataaaaggataaaaaagaaagacctttttccaagttcttgacattcttggaggagagagtaattctgatcttgtgaatctgctcgagtggctcttccaaaccagccttccctggtttcattggttgatacgctgtcgccatatttgcagcttcttctgaaaacaatcacaaacacaccaaccaatccatcacattaacaaatgatccgataaactcatgtaaacatgaaaaatattaaaacttggatcaagtgaagagaacctgagagacgaacgaagctcgacggcggattgctttttgctgcaaggaaggaaggagtcgaatgatttaacctaagagacggttgatttaatatgaaaaccctaatttatatggacttgttgggcccaaacaatattcagcccaataactacaaaaatatttgctctgtatttttcttttgtgttttgacccaattacttggaaaacaattcattttattaaaaaatacaaaccatgtttgatttaattacataaatttttgtaatgaataaacgtgttattataaaaaacaaattaatattttttagaagttttaaccaaaaatatcttggtaccgtgttttttagtcaacccagagaaaacatcacgaacggctattttttaaaattaaacaaaaaaaaattaagttctttgttatttctagaaaatggggaagacatgcatttgttggaagcacgtagtttcgatatggacactctcccacatgattattctttaagaactatacaaatcataaaatatcaccattcattaataacttaaggtgttgtaagaataataaagtcagaaattataactttagcactatggatataagaatacaacgaataatcacaaatcacaaccataataaaatctctgtctgacttttgaatttggaactaatttagaattattttttgttgacagcaaatctttataatttaaagatattaagttaacatcaaatagaagtatcatactataactatagtcatattgaattaaagataacaaattaccataaaatttagatgtaaatagtcaaatttatttatctgcaagaagaacaaaaaaaatggcgaatgagccaatttttgcatcaagtagtaaaaacggagtcccccacttcccgcgaaaacctcagtctctctctctctctctcgcaaccgcttctctgtaatcgttatgttttgataaaatcacaaaacaaacaaacaaacaaaaattaaaagagtgtaaatatgaaaattcaaataattctccacaaatttttctattaataacaa

SEQ ID NO: 2034 - DNA, 3000 bp, Unknown
  misc_feature (1)..( 3000): cDNA_ID_3065639_gDNA_ID_1620480_Annot_ID_158276 3000 nt of promoter + ATG
cttcttcttcatctgaaaaagctcattttttttttttttggaatcagagtttggtgaatttcaggagcagagtatttaagtaattttggggaattagtgagaaaatggaggagaaaggtgaaataagtccaagtggggtcgtcacagttaagggagatgaagctttggttccaagaacagagtttcaacaaaaccctagttttctccaattcgtgagtcccacaacggtagtgactcctctccctcctccaccagctccgtcttcggctccggtaccaaccaccgtgactcctggctcagccacagcatcaaccggatcagatccgacgaaaaagaagagaggaagaccgaggaagtacgcaccagacggaagcctgaaccctaggtttttgcgaccaactctgtctccaactccaatctcatcttcgattccattgtctggagattatcaatggaaacgaggcaaagctcagcagcagcatcagcctcttgagttcgtcaagaaatctcacaaattcgagtatggaagcccaggtaattaaaagttgagatatttgtgtttgaactgtttgcattggtttcagtgagacaagatctgatctgggtttcgagtgattttatgttgttgtgtggatttttgagatgttgggaagtgggaccaacataactggattttgctgggtacacttttgtctgaagaagctattacactcagaccagttagagacagagaaagggaatctgctgatgctgaccaaacaaaaacagaaataaaaagaagattttgtctttaaaaaaaaaaatacaaagacagaataatctctgtctcttcctttttatcttagaagataagtatgtctagttgtgattataagttgtttagcagatcttacgatttctcattatctgttttaattactgtgtgaataaaaagagatttagattattagttggtctttgttttgaatcatggagttagttgcttgaggattaggattaattaattagctgattagactaatgcaaactctgttttactatctcttgcagctcctactcctcctcttcctgggctctcatgctatgtgggtgcaaattttacgacccatcaatttactgtcaatggcggtgaggtaataaatttcccacagaggattcttttgttttctttcttcaacacggtgcttgtaactcaagctttggtattaaattctatcagtctttgtttgagaatttcttgttttgatcaggatgtgacaatgaaggttatgccgtattcgcaacaaggatctcgagctatctgcattctttctgcaactggttcgatctctaatgtcactcttggtcaacctaccaatgcaggtggcactcttacatatgaggtaacaaaacattgaatcaaatttcgttagtacctcgttttgaaatatatatcgagtaaaactgttatgtgttttttcttttctaagggtcggtttgagatactatcgctatctggttcctttatgcctactgaaaatggaggaacaaaaggtcgggctggtgggatgagcatttctttagccggaccaaatggcaatatatttggtggtggccttgccggtatgcttatagcagctggtcctgttcaggtgacacgatttgattacatgaatgaaacatatttacagattcaggagtatagaaaactctaaagtcttataatatgtgacaggtggtaatgggaagtttcattgtgatgcatcaagcagaacaaaatcagaagaagaaacctagagttatggaggcttttgctccaccacaaccacaagcaccaccacaactgcaacaacaacaacctcctacttttaccataacaaccgtgaattcaacttctccttcggtgaacaccgtagaggagcagaaaccacaagcttatggtggtggtatagtgagaccgatggctcaaatgccttcttctttccaaaacgacaattcaactatgaacaatttcacaccggcctatcatggatacgggaatatgaacactggtactactcacaaagaagaacatgaagacgaagatggtggtgatgatgatgatgattcaggcgatactaggagccaatctcatagtggttgagcaattctctgatcaaagtcagaaagttttcttgtgtagaaaggaagggagcttaaaggagtgcttttttttagagggttgttttagttgtgtgagggttttcttcttttgtgtgcttttctaatttctagggttattcttctttgtgatcggtttagatttaatcatgtcgaagtcatagactaaacgatgttcttattgttgaggtcattgggattcaaatttagtaagacttttgtgatatggttcatattcttgcaaagtccattcataagattcactacaaacaaatgtttttgatgtataatacaaagtaggagtactataaaatcctacctgtgattcatcattatttgtctatgtcattaaaacattcatcagtttaaaaattgcttcaagtctagatcgtgcgtaattgcaaaagtctatataatttctgttccacatacacagactcatcagtggattctgggtttaaattgtaacaaataaaaagtcaagatacaaaaggaagtgagcataactaaagcaaaacaactataaggtgatatttaaaataaataaagaaatataggggttaaaacataaatacaaactcttcgctaattctcaaaacccttccctttcctttatcgcagtcgtaactggcctccgttggtctctatcgtgactcccttcacgccattaattccgattaatcggagcttcgacttctcatcttccttgggtaactcgctctaccttatcttcatgtaatcaaaattcgaactttttgtctgtgtgttttagttgtttattgggtaagttactagatcttctctttcgattttgtttcagcgttcgtgcgattcaacgtttgatttgaagaatcagtagca

SEQ ID NO: 2035 - DNA, 3000 bp, Unknown
  misc_feature (1)..( 3000): cDNA_ID_2148694_gDNA_ID_1620480_Annot_ID_158272 3000 nt of promoter + ATG
ctggttcaatgatatgtaggaacaacccaatttgcaaagctttattaaaagactctttagttgtcgtcaaggtttaacttgtagtagttggtaagaaattctacgtgaaataggcaacattacaaaaacaaaaatcaattcgaaatcatacaaaacgaaaccaagtagtaaccaactacactattatgacattaatgattagacattcccaaatcatacaagttcctgtcatgaaggaaacaatggtccgtatttgcaaacgattacaaaaattcaaaccaaaaatgaaaaaacgagttaaattatttggtttataaaaatagtaatgtcaacagaagactagattgggaaacctgaagcgaacagagcttttaaaaacgagtttgaacggctgggatcatttggtacaatacccaccgtaagtttgtttaccctagggatgcaagccaaaggcccaaatcagttactacttactgctacaaccatcgtctcagctttttgtctcagctttttactaatgaagcatacaatttcttgggcatgtcacatctcgacacgtgtccactattctcttctcttattggctactcgttcgtaggcttctgttaatagatgatctctctataactctaacagtcttttctttctctttatttcgttttggtattttaagtttcaaattgaaaataataggaggaaaagtctagttttaaatattgtttttttacaagtgaacgtgaaccaatttacctctttttttttatatatcctatcggctaatctggttagtatcggtagaaatgcaccgaggtgctacagagattaatgctagggatagtcagaccgcttgtatttctgactatcaagtaaatctacgcccaactcacatatttcccaaacaaatgtgatttttttttttttttttttttttttttttttttttgtaacaaatgtgattttgttttcaaggaaaatagaacttacgtttgggaatttcacccttcactaaagcttccttctgccattagaccacaaaggcttgggcaatttaccatttttgtaaaagtagaaaacaaaatgcctaaaatgttcatacttcattacatcaacaaggttatgcccacgatatagaggcatgtaacatttatatatatagtggaagaagcctacgagctttattaataagtataaactctgattattaggtaaataaattacttaaaacgattactcaactgacaaaaccgtagttgaataataaggttactatgaataccgattgaatattgcaaagccggaattgaaaaatatataacagatcaaatgttcaagtgtggtcataattctcacataggtcatatagctgaacccatgcatctatttactagtctatagaaagtactagagacgcatacagctgaacctactctattcttttattaattttggttctcgtggatacaaaattcctccaacatttattagaacgaataaaaccaatatgatgatgattagttattggtaaacatataaacgttgagtaaacttcaaaatagattgaagtactattaagacttgcattttttccccttgggttatattcttgaatcgtttcgaagtattttaactttcaagaatagaaggttcctcaactataaacaattacattaatcaaaaccatttctatgtaaacaacataatttttgtatattttagtcttccccaaaagtttgaccgatagggcggtttagaccgtatagtacgactgtacaacaaaaaggactctggagacctaaagatccaaaactatgcaaaataaagatacggtcggaccaatttaatctaacaaaaccaaatccttatactaaactatttaccgatacatttccatataacacagtacacacaattaaatcaaacattattggaagaacaagatagaatattggcttaatctcgaacgattagagttatcctagagcctcggagcttttgtcacatataatataaactatggtatatataaacatgactctcatttgtatttatcgcaaggtacaattccaccaatttttttcgtcccactcatacagctttaattgtgaaatcaatccataaaaaaccaacatgtgacatggtctctataactataactataagatagtaaaaaattcacatcaacataaaagaaaaccaatcatattggctaaaaaaaactaacggtcgaaaaacgtataaccacaaaaccaaaccggtccaaccggtgtccccaatcactatcaaagcattaactaactttcacaaggaaaagcatagttcagtttctctacatcgcttcccatcctcttaaccctgtttactcgaatcatccaccgttggatcaaacacgcgctacaaatctagcgcgtgaccgaggtttttacacagtggaatattaccatgcattggaaagcggcgtctacaacaaacggcgggtcatgtcaccgtcaaaatcaacctttcttaattcctaacgccgttacttatctccgtttactaaaaatgttaatgcgtgtgagagtgaagatcatatactaattagaagtggctaatgttttaacgtgacattattatcatagttaatggttcgatcagagttttaagtagtaaatgatataagtgtgtgtatataattgcatacatatatactctcacactctgacagatttgtcgtggtcttagtattctctttcatggctagttatatagggctctagtacattatctctctctccccatttctctgtctctctcttctttaacatctctggctctgcatttcttgcagttcacgctaatcacctgttttggtacccttttctctctgcaacaatggcagaacaagcctgaagtttcgttcttttgtgttttggtttcctctgctttgttgttattgaatcaaaacttcaacgagcttcttggcttattaccccaaaaggaaagaagaataagaagaaaaaa

SEQ ID NO: 2036 - DNA, 3000 bp, Unknown
  misc_feature (1)..( 3000): cDNA_ID_2148698_gDNA_ID_1620480_Annot_ID_158273 3000 nt of promoter + ATG
tagctaagaagagtgaaaaagatttttagtaagataagcattcatcaatatgacaatgtgtacgttgggatcatttatatcaaacctggaagtttattaacaagtgcacgagctttctctgcgcgtttgaggattaaatgagatccttttccagcgttgtatcggttttcatcctatacaaaaaaacattaagtaacggcaaaatgtcagaactgaatctttaatgaataaaaaaaagacaaacctgattatactcttcaagccaattctcttcctcacaagcattcaaccatttatcagctttctcaagaatctcttttctgcttagagcttcctctttcactttcccagctcgatactcgatctgttctagtatattttcagggttcacatctcctgattcaatggctttgattacattctctaccgcgatatcttcttcttcaagaacaatgtgtgttcttctacatatctcttcaagctctgaccttttctttagaacaagttctttcattttgctccacttcaactcctccaaccgacatagctcagctttaacctatttaaaacattaagcaatccatcggcgaaaatagtctcagtaagtttacaaaaagatttgatgtaaagttgttgtgaagttacctcttctagcaaatctatagaaagactattgggtttggttatttcagaaacagtagcagctatattacatgatacatccatgaacttttgttgttcttctgctggtgtatccattaaattccaaaactcaagcatcgttgtcacgagatcttgaagctgtaatccataagatagcatatatatataagaaacaaagagcagagtttttaagatggtaaaatgtttaaaaacattctaactcacttcttgcattctttgaatctttgtctcatgccattgttgtactgatgaagctaacttgtcaagtgtttcattacttatacttcttgacccttcagtatctactaaacttgggtgaatcttggtaacagtttctcgaaaattcaaaccaagaaccgaacaaagcgattcaagagttcttatattatcttgaatctgtttcacccggttcctctgagccaaaataaacagtaaagtattagttaactttttgatcaagaaatgaaatcaaatttaaggtaaagtttagaaaaaaccttttgttcttgaagtgtgtaaagctctctatgtaactcttcaagctttctaagagataaatcagattcatcagcagaaaaatcagatgaacaagtctcatcatcagattctccattaatctcttctcttacacatcttatatcatcaattacttgaataaactgaatcttcctctctgattttctcttttccatttcttcaagtttctgaagaatctttactaactcatctttcaagcttctcccattaccactttgttgatcagattgatggtgtcttccaagaattggtggctcttccattacagaacatatatcaataactcttgcttcagaatcagcaatctcttgttttatccgaatcttttcttctttaaccttttcgatttttcgattgtagacttctctgcattcttcttcgatctcaatcaaaatcttctccctttctgtttcagtttctccaacctctttccatataatctgcatcagaaaacagaatccacatcaaaatggaaatgcctttttgtaattgaaaaaaaaaagcgttttcttggagttgaagcaatcgtcacaaacctcaagttcttgtagaagagatgaccaagttgattcgatttgagatttggacattatttatctccaaactctgcaaataaattcaaaattcttccacattcgttatcttattcaatcctatgaggatgttttttttcctcaataggttacttcataaaatttctcaaacgataacaaaatctttttagaaaacacaagaatttttttctttctaaatgataatcattttaattgctgaaacttttttcttttgaattttcctggaagaaatacgagattctttacctggattgaaggacacagccgttggtttttccttgaaaaaaattcggataaaatttaggaatcaaataaaaataatctagtcaaaaaaaaattacaggtaagttgttaattgtaaacaaaaaaattacaggcagagggaaaacgcttatttcgtatatttgtttgcttccccctaatcttttgaaatctctcctttctcccctaataaaactttgtagatattagtttccttttgcttcatgatacatagattttcttgttgtcatgtttttttaacaatagaaagatatatgatgcgccaaatatatctcatatttaagagcgttacgacaagttgaaattatagaagaaaaacaaattctaatttcctagatacgctttaactatctttaaccacgaaattaccataatttaattcacaaattaaaacactattttcatatatttaagatttgaatttacatctagtaaagtaactaaaattcttgccaataccaagaaccgaagtagaaaacatgtgcaaaatttaatatatagaaactaaagaacataaattattagatgaactggtgttgtggttcaaaaaaatataaattggggtctaatttgtgattttagaaaactgaagaaccaaattgagaatactaaaaatatgagctgttattgttatacatccgcgccaactgaattttagggccgttaccttctctctctctctctctcttcttgtccacaagaaaagttagagctcttctctcatctccaatttctctctctctctctccttcgctcttatcctctggcgattttttccagagattctccgattctcgaggaggaggaggaggaggaggaggagggagagaaggagaaggacattttcgattcgattgatgtgaaacgctcctacttgattcccgtcgtctgagatcggagttatcatcgaggattgataatg

SEQ ID NO: 2037 - DNA, 3000 bp, Unknown
  misc_feature (1)..( 3000): cDNA_ID_2148705_gDNA_ID_1620480_Annot_ID_158275 3000 nt of promoter + ATG
tcttagaaagcttgaagagttacatagagagctttacacacttcaagaacaaaaggttttttctaaactttaccttaaatttgatttcatttcttgatcaaaaagttaactaatactttactgtttattttggctcagaggaaccgggtgaaacagattcaagataatataagaactcttgaatcgctttgttcggttcttggtttgaattttcgagaaactgttaccaagattcacccaagtttagtagatactgaagggtcaagaagtataagtaatgaaacacttgacaagttagcttcatcagtacaacaatggcatgagacaaagattcaaagaatgcaagaagtgagttagaatgtttttaaacattttaccatcttaaaaactctgctctttgtttcttatatatatatgctatcttatggattacagcttcaagatctcgtgacaacgatgcttgagttttggaatttaatggatacaccagcagaagaacaacaaaagttcatggatgtatcatgtaatatagctgctactgtttctgaaataaccaaacccaatagtctttctatagatttgctagaagaggtaacttcacaacaactttacatcaaatctttttgtaaacttactgagactattttcgccgatggattgcttaatgttttaaataggttaaagctgagctatgtcggttggaggagttgaagtggagcaaaatgaaagaacttgttctaaagaaaaggtcagagcttgaagagatatgtagaagaacacacattgttcttgaagaagaagatatcgcggtagagaatgtaatcaaagccattgaatcaggagatgtgaaccctgaaaatatactagaacagatcgagtatcgagctgggaaagtgaaagaggaagctctaagcagaaaagagattcttgagaaagctgataaatggttgaatgcttgtgaggaagagaattggcttgaagagtataatcaggtttgtcttttttttattcattaaagattcagttctgacattttgccgttacttaatgtttttttgtataggatgaaaaccgatacaacgctggaaaaggatctcatttaatcctcaaacgcgcagagaaagctcgtgcacttgttaataaacttccaggtttgatataaatgatcccaacgtacacattgtcatattgatgaatgcttatcttactaaaaatctttttcactcttcttagctatggttgaagcattagcttccaagattacaatatgggaatcagagaaagaatatgagtttctctttgatggtgtatgatcttatcttcttctctcaaaaaaaaacccctcttcttctcttttctcctttttctcttttatatacttcatttgatctcttaatctgattttcttcattcagaatcgcctactttcaatgctcgaagagtatacggaactcagagaagagaaagaacaagaacgccgcagaaagagggtattagttttacatgcaaatcatatttttaatcaaattttctattgttccaagaatcaccaagaacaatgtttgtaggatctgaagaaacatcaaggtcaagtgacatcagagcaagacaaaggaagtgttacgaagccccaaagcgcgaaaaagggtcttaaagtgtcaactaacaagagatttgtctcatcacctcatactcctcaaactgattcgcctcactcagcaaaatcgaatcaatcgtttagtactcctctatcacgccatggctgaaaaagatagagctaagatttcaaaaacagtctttttatagatcaactagtaatagtttctttcttatatacacactgtcacacatgttatgtacaagtatagttctaatgcaaccatagaaacaagacatgctaattcaaatagagggtctcgaaactgatgattcttgatcatttgtaatctgtcaaactcaggatccaagtgtgtactatacactgattgttttgcggaaagattagtttgactttgaccaaccaatatacttgctgcaaaaaaaaatgtcaattgtttcctaacatttttttaaaaccaaggaatacttttagttggtcgattttgtaattaacatcatcggtatagattttgacgcatagttagtcttattacaattagtgaattagctgagaaataaatctaaatcttgagcttatctagaaaattaattggtcttagtaaggtattcaaagcaataatctttggtcaaccttatttcaaaagtgatttactggaaaaaagacaaaggagattgtcagaagttttggtattctttattttattttccttttcttttcgaaatttcactttaatttttcttcgtatttccgtttattttattacaaatattaaatttccaagacggacgtggatctttccctaaaccgaaatcaatactttgatttttgtaattattatatcgattttcaactaattaaatccttaatattcctattaaataatacaactgtctacatgacatttttttatatatattatcgtttcttttcctgaaattttccattttatttatttctttgcaaaaaccctaaaaattcattcgtctaagagagaaaaattatcttctttttcttgtgaatttttttttggggatattgcatgtaattttttggggatttttgaggtttaatctccattgaaagaagctctggcatttctctgctacagtgttggttttcagctgcagaattggtgaaaaagtaaatctagaaactgtaatcaaatttctctgctttgatctttggtccttttgagctactatttcatatctcttgttccttttattgttcttagttattattacaaagaagaagaagaaaaaaaagaaacctttacttcttcttcatctgaaaaagctcattttttttttttttggaatcagagtttggtgaatttcaggagcagagtatttaagtaattttggggaattagtgagaaa

SEQ ID NO: 2038 - DNA, 3000 bp, Unknown
  misc_feature (1)..( 3000): cDNA_ID_2148701_gDNA_ID_1620480_Annot_ID_158274 3000 nt of promoter + ATG
cttcaacgaggtcttctttgcttgatatctgtcaagaaaaggaagattttggagtaaaagtaggacttttccatggatttttagtcaaaaaaactgaattacctttgggtctagaggggaagatttagattcatacacttggcaatttatctttctgctgtgattttctttgactatcctagtttttaaggaatcaatgggcttttttagtctgcagaaaatgtgtgtgagaacgttttaggaaaagtagattcactgaaagtttcaaagcaattggcactaacgttctggacttagtagcatcattctcttgtacgacatcggttttagcctgcaatgtgagacacatcatttaactaaatgtaaacatggaggtgaagaatcgacaatgagattcgtgacttacatttgaagagcgttccttcgctctcagtgatgtccttaaacgaaatgcctgatgcagaaatttttgttaatggatgaggaacgattataacactttgagtttgtagctattggaagatacattatacctgaaaatgttgggaccgtggcgtattagttttagccaaagatgttgaaacaggttccagattaatctgcaagatccaaactcataagcttctgagaatgtggtggtaataaagaaactgagatgaaaatacaaaagaggatataaagtacatttttgttcctaatgtgtcttttagaatttgatgtcgcaatctgctctctctgtgtgttaaccttagacctgaaactctcaagagaaaacatgttatacgaaagccaacaaacaaacatttttaacacaaagtccttaattacctgtgtctttcagatctttctgcagttctaagattcggttcctttggaacagtgagtttggctctgctgctaacatgagccaccttaaaggaaaaaacaatgactcattgaaagctatcagtataattgtataaagataactagaatcagcaaattcaaaatccataagagaaacacacaccttagcttcctgtttttgcctattggtgtcttggttttgtaacttagagactaagaccggagctacattttcaccaaacttggctaatgatcgctgacatctgaaacatcaaatacaagttgttgaagccacaaaataaaattcacataaatggtttcgtcattggttttagtaccttgtcagaagttgaacagagtaaatatctaaaggtttgttctgccttgcaagcaaagaagccgtaggtcttgtcaaagtagagttacttgttttggttttagatttcgattttttcttggatacatctttaacggtttggttataatatatgaagcctgacaacaacaacaacaaaataaactaaaggtctcaaaactgcattgaagcatcattatgcataaacaaagatttcagaatcattaccgttgaatttatctttgcaattcaaaccggtctcggcttccgaggattcaataatctccacaggcttagactctgatatggtgtttgtaatttgcttaaatggctcaaatttccaattgaactttgggctaaaagctgagataaatcacacaaatacataaataatatgaatagtaaagagaatcgttgaagatgaatgtgtgttcttacgtgaaggaggatagtttccagaggattgaaaccagatttcgatttcttcagtctcggaataaagctcaggtctagagaaatcatagaacctcggtgcatcgaattcgaaatcaatatcgaattcgaaatcatcgccagaaaaactcattatcctcgatgatgattcgggaaccattatcaatcctcgatgataactccgatctcagacgacgggaatcaagtaggagcgtttcacatcaatcgaatcgaaaatgtccttctccttctctccctcctcctcctcctcctcctcctcctcgagaatcggagaatctctggaaaaaatcgccagaggataagagcgaaggagagagagagagagaaattggagatgagagaagagctctaacttttcttgtggacaagaagagagagagagagagagaaggtaacggccctaaaattcagttggcgcggatgtataacaataacagctcatatttttagtattctcaatttggttcttcagttttctaaaatcacaaattagaccccaatttatatttttttgaaccacaacaccagttcatctaataatttatgttctttagtttctatatattaaattttgcacatgttttctacttcggttcttggtattggcaagaattttagttactttactagatgtaaattcaaatcttaaatatatgaaaatagtgttttaatttgtgaattaaattatggtaatttcgtggttaaagatagttaaagcgtatctaggaaattagaatttgtttttcttctataatttcaacttgtcgtaacgctcttaaatatgagatatatttggcgcatcatatatctttctattgttaaaaaaacatgacaacaagaaaatctatgtatcatgaagcaaaaggaaactaatatctacaaagttttattaggggagaaaggagagatttcaaaagattagggggaagcaaacaaatatacgaaataagcgttttccctctgcctgtaatttttttgtttacaattaacaacttacctgtaatttttttttgactagattatttttatttgattcctaaattttatccgaatttttttcaaggaaaaaccaacggctgtgtccttcaatccaggtaaagaatctcgtatttcttccaggaaaattcaaaagaaaaaagtttcagcaattaaaatgattatcatttagaaagaaaaaaattcttgtgttttctaaaaagattttgttatcgtttgagaaattttatgaagtaacctattgaggaaaaaaaacatcctcataggattgaataagataacgaatgtggaagaattttgaatttatttgcagagtttggagataaata

SEQ ID NO: 2039 - DNA, 3000 bp, Unknown
  misc_feature (1)..( 3000): cDNA_ID_2148690_gDNA_ID_1620480_Annot_ID_158271 3000 nt of promoter + ATG
atagtgcttcgccactattcttggtacaaagagtaatcattaaaggttttgtaacttttcccaccaagttaattaatccactttttggttgttaagcactctttttgcgacttaataatcatatgtttacattattagtcgaaaaataatatagaactaactatactagcaaattagagattgcgtatgtcttaggttttaacaagccatgaatatggaattagattcgtcccggtaagagtgttatcagctgatcaatctccactaaaaccgccgcgtttaacacacacgctctaatgatcacattaatcaccgcatttacatacgccgacactttcatggttttatcaatactttatctcaatttgttgcatttttctcgacttatcgtaatttctttttgttttttacttatcgtaaattgtgttttccattaaatttacgatatgcattttttcggtctatgttactttttttttttcgtaaaaagttaagtcggtctatgttactgatgataagcacttagctaaattacactacatctacatgtcacaatgttcaaattttattcgcatagtttgttagatgatacaacttgctatactctattactatcttgtaatagataatacatattatatatatatatacgtagcgattttattgctgtgtatttttattggtgtataaaatactgcagtctattgaactatatatccccgcactaaataattagttttccgtactgcacgatgctgaaagtcaaatgcatcaaaaccctaatcatgcgaaacatgtattatgtataaacgaataatcactatattttcatattttaaagcattgactcataggtcgtccggtttgggataattgtagctttgctttttgagttggatgcatgtattttgacgatgatattttaaattttattcaggggttaatttcgtttttactagtcacaaggacgttattgatttatcgactatcatattttagtgtacgttgtttaatagaagtatcaacaaacaagttccttaaagaaatatccatttgctccattcttttatctaattaccgtctcagtttttctcatcttgggactatttttcaaactgtcattcgactatgaggtcaaactgtacggtatatgatattttccaatagaattaatcagaaccaaaaaagtttaggcgatatgctctttcctatttataatcaatgaataagtagtgatttgaccattaattaagaaaaaggggtagtgagtgacctagtgtaccataacgctacattaatattttagttttctctagttttgttaattatcacataccactatggcactatctatttttctaaactctataattaactttaatactagtcttcactttcgtgaaagcttgaccgacaaatcaataataaactactcatagactttgacccataaaattaacgcttgttgtgagttgttactaacttagttattattccaacgaactcttcgattaaaattcaatgtcattacagttgatatgcttgccactaaagatggtccagactccagtatcgaaccgaatcaagttagagttcactctgtgcttgggtagttgggctaatttataatcaaatcagactgaacacaaaccgatcaaaccaaaattagtctcaatatatccggttttctgcggttatgacataggtcatgaataaaacaaattttgtcggcaaaaacttggagaatgtgacacgtcatgcggcatgactcgtggattaaagaggcatggccacaaaactcacatggcgcttacttaagttctttcaacatcgaacacagttcactctaatctgtcaactacacgtaaacgtcaccgtttcggtgccatccccgtctttgtagtccgttaataaatttatgacccttgattttgccacttgccccatatgcacgatcttcttctttccatttcctaggttttttttgctcttttcccaagtttgtaacgcttatatttattgaacaactttcctaatttctacgatcactgaccatatgattacactaaaatccggtgattgtatctaaattttaagcaatctttaaaatcaatgattctaatgtgatattatttccttttcccagatattggatagaaatcgtgattgatatgcaaataatactagttagtttctgacacaaactctggtggaaaaaataatctagaataatagtttctgtttctacaaagacacgttgtcaattacactaacttccaagtgttcactcttcaccggctgctgtggtcttcccttgtcggttgccggcacagacggtcaatgccacaggcacgtgtccgtttctttccactccgtaatgtctccaacgccttgagaacaattaaaaaatcaggacctctatcttattaaactttatgtaacgttcccaaagtttcagcatgtgctatttgactccgaaaattttgaaaccgattttttagtccacaaaaattgtagttgaaaacagatttatcttttgttaattccttttattttctactgtgcatcacgtatatttgattaactacaatgaaattcgtttaattaaaatagttgaggggacaaatttaactataatataaaaaaatctagtgtaaatcactaatattacggctaattttcgaaatctaaaatagttaaggggacaaaaccgtaaactttccataaatagtttggtaagaaaaagcaaataaatatagtttcattttttgtaaataaaaaaaaagaaaaagaaacagaatctccccgtttctcgagcactcttaagttctctctctctcacagagttagctttacgccttcaacgagaaccacacaagaacacaactacccaaaacgctcattttctttttccccggagattttagctccgtcgtcgtaacggacccataattcccggcgacggattctaatctcattttcagctaattataaactatg

SEQ ID NO: 2040 - DNA, 68 bp, Unknown
  misc_feature (1)..( 68): cDNA_ID_3065731_gDNA_ID_1620481_Annot_ID_158304 3000 nt of promoter + ATG
gatcaaacaaaccctaattatcatccatcgtcgccttctcaatatatatggccggaagagcagcgatg

SEQ ID NO: 2041 - DNA, 3000 bp, Unknown
  misc_feature (1)..( 3000): cDNA_ID_3065711_gDNA_ID_1620481_Annot_ID_158315 3000 nt of promoter + ATG
agtggtatcatctaccatcctcgcagtttcatcgactggtcaatatattattcaataaacatgcagcttccgtatatgatacttttctgctaaaaagaggaatttgcagttcacagagaggtggtgaggaccactcttaaagatattccgatatgaggaacaaataattggagcatggtcccttgagccctgcctgatgcattacaaaaagtagcatcataataaagtggtaggtgttgttgaactatttatccgatggtgacagaatttatgtagatataataatatcattccttgattatccatctggaaggtacatccatctccacaattgcattcaactattgaagcaatcatgtgttgataatccccttctgtttattttagtagaccaccactaaacatgttatttatattagtgtatcaagagagaagaaaggtatcttcaacacgcaataataaatctgacatttgaaaaaggaaaaacacatccttatcgaaatcactagtcgaagtcgcatttgtcagatactattgttttaacttcaaactctaacttccaagttctataacataagaaaaagaaaacaaaccccaacagctaaaagtataattaaagaagcaacatttgagatctcaacctctgtgttgttgagcatgaagtgattgtttgggctcagcaccacgcaatgtaccaatccaagctggtggctgcatccctgtctgctcataaaccgtatcaagaaccggtggtaacatcttgtagagtccagcaatatcgttcatcgtagctttaccaccaccgttcatcccctgctcagcaccaccatggttccacacgctgatcttaggctgcaggtccctgatcgcaacagcattggtcttggcaatatcctgataaatgccattgttgatcatcaagaagtctctcatggctgagtaatcattgttaactgcgcctaagagggtcttgaggtaagtcccctgagcatcggccattgcgacaagtccctctgcatctttctgttttgaatagaaggcagcatcagctgcagctttcgtcgcttccgcttgcttctgcttctcgtaaagaacagcttctgcttgcttttgcttattgtacaactcccagttcgcttcttgcaccttagtttcatactcaacactggctttactgaggaactcagctttaagcttctctgtccgagtcaatgcattcatcttctctactttagtctgaagctcagcttccctcaaagcaacagccttggctgcttcaacctcagccacacgagagttttgggacaaagcagccttttgaatcgcaagtgctgcatcagccttagcaacaagagcctctttctcattctgaaacactttgacttcagtcttcaccttgatctcctcttttgtcccttctcctagcctttgagtagagatgatctttgactcagcgtcaatcttggctgcattctggattgtgagtccagtcctttctttggcaccaacctctcccttcatctttgcctctgctacatcgatcttggcttggtttgctgcttccatctgagtcttctggcccaagtaagagaagtactcatgtccaggcacatcaacaagctgcttcacattggcgttgtagatcacaagaccaaactggtttagctctagctgaaccttgtcaaacacttccttcttaaactcctttgttcctacaattccacaattcaaacacagttcaaacaattatattaaaacagaactcagaaataaagaagataatcaaaaagggtatgtttggttacctttgaagacctcttccatagtcatggaagcaacaagaacacgagtctctccttcgataacaccctgaacaagctcattgacgtgattcgagtgcttatcgtgttgagacataagcatggcatacaacaagagagcgtgaggatcatcaacgcgaggaccgattgtgaaaacagcaggaataacaaagggaagtttctcggaactcatagcttgaacctcgaacgtgtagttcaccggagaaacgtcgaagacggtgcaagactgccatggaaacacccaagacttctttgcaagcttgatgtctgtgatcccaccaccggtgatcgcaagatactgcgatgctttagcgactctgtaactcattctttcttcgtcttccttgaaattagggttttgttgagatttagggatttttctagtacaagtttgtttgtggagaggatcataagaaaggatttaacttatatacaagtttttaatacgcgtaaataaaaaataaaaaaaaataaaaaaaaaatattctcttgaattaagcttttatattcttttctactttctacgaaatttcattgaaacgcggttatttacaaaattctataactgttttggctaaatttgaatgttaaaagataatataattgataacaaaattatgtggaaatcttgtattttgatacatatctacataatttatttttttatgtaatgataaatacatgcatattttttatagtttagatgttgtttttatgtttatctttaactttatttatttgtaagctataatatatggtggatacacgtgaaacatccaagaaatttcgggcatgtatatacaacatagcatgtaaattcaatatggaaatttaatgcttccgaaaaaatattatagctatatttttaggttttttttattttaactactgaatttacctaaagaaaaaaaactactatatttacacatttatagctaattttatacgtttgtcgttgatttagaaatttaaatacatctggatttttttttttttttttgtctctatcataaacgaagaatacattagctaatttaatgaataaacagtaatgactaattaaaatataaataatttataaaaaatcgaattaaaatatttaataaacactataacaaattacataaatatcaagtgttttcacctatttaaccaatta

SEQ ID NO: 2042 - DNA, 3000 bp, Unknown
  misc_feature (1)..( 3000): cDNA_ID_2148847_gDNA_ID_1620481_Annot_ID_158325 3000 nt of promoter + ATG
tttgttatccagctatgctttggaattgttgcggtttcgggaagctggagtggaagttgtagtaaaggtacttgcaaggcttatctctactatatatatgatcttatcacatagctttatattcatattcaatcaaattaactattgtaggacctgagaaagagatgggacaggcaatcacaagcattctacaatctatttagacaagcggatagagttgaaaagctagctgtagtcattgaacgacttgtaagaaactaacactctcacccaccacaaactcccattctacatgaatttctttctaatgagtttactttcatcctcaggagcaaggtgatttgaagcttagggtccgagcgctagagtctgagagggcatttcaacgcgttgcagctgttcaaaaaacagtaggaagtgtaagtagagctttccattctcatgtcttttttacatcaaaatctcttcaagtcgttctttgaaagcatttcatgttttctgttttatgtgttaaagttggtttcttttcctctttttgttaaacccattgtgtttctctacaggctgttgctgcaggaagtttagtcaatctcgcaacaattttgtatctgaattctataaaagtaagttggtactcttgttctttttttttcacctataaacctctttgtctgctcaaattcaccaacgttcttgtttctttgtgttctcagacacctgcaactatagcatatacagtatgtgctttcttcagcctccaagttctaatcggaatcataaaggttaagaagttcgatcaacgggaaaaactaatcactggaacagcttaagaacttgcttggtatgtcatgatttatcacctcttgatgtttacaagttacattatcagactcaaattctcacactcattttttggcttaatttgtacagaagaaatgtattaaagcttcttcaatctccataaacccttttgtgcatttcacaggagtgttaacaatttcactggtctgcaaataaaattatcttatggaagcttgagaggcaagagatggtcaactagtcaaaccaccaccactctctcatctctgtcttcttaaagttcgataataatttttggagaggagactctggttgttcatcaacagagtggtcatgagccacatgtattgcttgtgtatagagagatttagaaattaggaactttttcgtataaatatactcattgtactcagctactcactagactcatctctgttttagtaatattttgaatactgtatctcaaataaattaatcttatcaaatagaaaccatagttgaaaagtcatgaatgattcttaactgtacaaaataataagctttggtaaaaccctaaactttcgtttccaagatgcaatttctagcttctctcgtttccaattccagaaagtttggtcggagatgggatcgagctctctcgttgcatcatttctcttcgaatgcgacaccagcttcgatatcaaatccagcgttcgtcgagtttctcagggacaatgggttccagaaacctctagcaattgccatcgcaatgcgttaccctaacctcaaatccctagaacaacctcggtcagtgattcaaatgcttaaaagttacagtttttccgatacccagatccagaaatcgatccgggtccatcctcgaatgatgttctacaacgtggagaaaattctagaacccaaacttcgattctttaaagatattggatttactggctctggtcttggtaagttcgtctctcaaaactcatcagtcgttggtgtaagtctagtgaagaaattgattcctaccgttgagattctgaaatcgattgttgccccaaaacatgaagaccttcctgtcattcttagtagatgtggttggcttcttctcagtagagaccctaacttgtttctcttaccaaacatctcataccttgaaacctgtggaattgttgggtctcagcttgcttctttacttagaagacagccaagaatcttcaatctctctgaggaaaaactcagaggatatgtctctcgtgctttggatcttggttttactttgaactcgaggatgcttgtgcacgctgttatctcgttaagttctttgagcgagaaaacgtttgatcgaaaggttaagttgtttatggctaatggattctctgaagatgagataacagatattatacgaagatctccaggtttgatccggtgctcagaagataagcttacactggggtttgagttttacttgaagagaatggggttagagagggaagctttggcgaaacgtccttgtgtgttgtcgtataatcttgagaagagggtgattcctaggcttaaagttttgcagatcttgagggaaaaagggttgttgttaaaagaggagaagaagaagaagaacatggttggcattgttgagatgactgaggaagcttttctagagaaatatgttgtgagatttggagatgagattgctgaggaactgctggttgcttacaagtgcgtgtgtttagtcgatgaaacgctacttgatcgtatcaagatctaattgtagatttcacaagtccaaacttgaaattttgtcattgtatccaaacttcgctcatccgtaactgtgttgaacattataatttggaagtaactcttaaatcaccctttattacgagcttgaagcttctcatataataatgggattcatatgaagcgattctttttctatttcagcacttgagcaaaaactcaagattgtcaaagcgtcttaaaaatttgactcatgaatttaaccggtttgattttggttcgttgtaataaccggtttaaaccagagattgattccggataaaaaagcttaggtttttccgcgaagccgacactgtaaggtagggctaaaaccttagaatagccggagagaagaaggcgagaagaggagcgacaagggcgaagctgcagaattcttcggtaattttcagattcggttgaata

SEQ ID NO: 2043 - DNA, 3000 bp, Unknown
  misc_feature (1)..( 3000): cDNA_ID_1020642_gDNA_ID_1620481_Annot_ID_158329 3000 nt of promoter + ATG
gccaggaggaaaagacataaactgttcacaatcatcactaagcgctttcatctccgaagcaaaccagacagaacctataagggatttaattaaacattagaaaagtaattgattacaaaagatagcataagcttagccttattgaagtgaattgcttaggaaaacgttagatcacataccatcaagaccccatccaatgtaaagtggagtgataccaatagcgtcccttgcagcaataaaacttttgtcgcgagtatcaagaaggacaaacgcgaacattccatccaacatgtcgataaattcctctccatgttcttcgtactgcaagacataagattcaacaacagagatatgctcagttacttcttcactaattggccaaattcagatctatgcaaaaaaaaaaagtccaaaagatggaaatccagaaacaaaaaatcagtcttttcccaataacggatacttacaagatgtgcaatcacttcacagtcactaccagtacggaactgatgagacttaagcttttcacgcaaaatcttgtggttgtatatctctccatttacctgacatcataagcaaatttaatttacccttcagatgaccagcaaggaacaaaggccaacactttgacacatttatttacacatgatactaattgacattgtttgaaagacaagagaaagtacagtgacagcgacggtcttgtcttcgttatagagaggttggtctcctgaagtagggtcaatgatggctaaacgctcatgggcaagataacaatcttcataacaatggagtccactccaatcaggacctctgtgcctcaatctacacaaaaaaaagtaaccaatctaaacatcaattcgggtctatctatgattcatcaattgagtaaacgcacacatttcctctaaaaaagttgaaacctttattccaaattataaacgattcttcagtaacattgggcaggcttcatgattgattcaatggaaacagaagagtacctgcgagagagttcgatgatacgagaacgtttagcttgagagttgtcgatgcaaccaagaacagcgagaatcccacacattgtgttagagtggcaacgaaaacaaataacaatggcttcactcagaaactgattattagaatttatagggtggctttcaatcacggccgttgattttgactatttatgatttttaaccctaatctttttagtgtttgtttgttactcatttttgtgattgggagagattcatatcatcattgtcacgaggtccatttgtttttttgtcaattactttggattggaacttaataacgttttggcctttcgcgttacgaaatcacggattgaacgaatgcaactatggctcattattcatctttatggcttgatcagttttgaaatcgcattattatctcgtatgattggtttgaaggcttttagtggatgctatattccaattccattgttgctttgaagaaaggaacaatcaagttatatatgatttgctatgttctgacattgtaacctccttacattctgcttttcatttccactaatcacatggtttcatatcaacatgttacatgttatgtcttcttaagaagtggatgtgattgagaaaacataacttgtagattttcttatgattttttttttttttttcaacttataactttatttagaacttaagagtaatcgttgtttacatatggactcagaaaataaggacaagaatgaaacagagaccattgggtattctctttgatggcttgtttggctaagaaatccgcacatccgttctgttctcgatgtttgaaagagaattctatcgattcaaaacttggtatccaactttggatggtatcgagaaagtgttgtagccttggattagatgactttgtgtttatcattcgggtgatggtttggttatctccctcaaaaataaccttcttatgcccgaagccataggaagcttgtatagcccaaataagtgttgaacactctgcctcctccgtcgtcatacgaccttgaaatttccccataccacactcgatcacagtaccttgagagttccgaaggatccaaccaagtcctgaaactgtgtttctttcatggtgcgatgcatcatagttgcattttaatttgtctcttcccggcggcgaccacttggtattacgagacggatctgcattcctgttcccattttgctgctcgtttgtcattgtattgtccaaccattccttggtgtcattgagagccatctccactgtagtttggaattttgttcgcgtgtggttaaagactaggtcgtttccgctcttccatattctccacattaaccaaaagggcataaatcttgtaactcgatccacccttgaatcattatgcatttgaaagatgatacgcaacttctcttccggtggtattccattgtcacataattgggaagtttgaaagcctgcagctctccatatcatttcaacccgaggacatgagaagattgtatggtcatttgtttccagctccgtgcaacatcgcgaacaatacgggtccacgtttatgttccgacgtcgtagattttcggcaataccaatagcccgggatgcatatcgccagagaaaatgttttaactttggtgttatgattttttaatgtctactagattgtagtaactatcaatacttcataatatttttacatttataattacaaaatttggtggggattttttttttttttttgtaatctagatttgacaaatttaatatggataaattcttgcaaaatttcccaaaaagtgtttacttagcaaggattattgtttttacacttgtcaaacaaatacgacggcgttttgtagttcatctcttgagaaaacgacgtccaatgtagaaaaagtgaaaaagcgttcttcaaagcacaaaccaattctcgaccaaaagatcagaacaaagcgaaggcggattttctggattctcgacggccggagattcatg

SEQ ID NO: 2044 - DNA, 3000 bp, Unknown
  misc_feature (1)..( 3000): cDNA_ID_3065692_gDNA_ID_1620481_Annot_ID_158332 3000 nt of promoter + ATG
taaagctggcagagaagttgctgactatcttggaacacgccaccacgagtttcagtttacagttcaggtataaaatttccttgatatagtcatacagatccattatcattcatggttttcaaaatagacgacttaacatcttcctctaatgataattccaggacgggatagacgcgatagaggaagtcatttaccatattgagacttatgacgttactacaataagagctagcaccccaatgtttcttatgtccagaaaaattaaatctttaggtgtaaagatggttctttctggggaaggttctgatgaaatactggggggatacttgtacttccataaggctcccaacaagaaagaatttcatgaagaaacatgccgaaaggtatttccttgtcaacttactttgctgatctgcttttgtcccctcactgaatcttgtttatgcttttctttacatacagatcaaagctctccaccaatttgattgtttgagagctaacaaatcaacttctgcgtggggtgtcgaagctcgtgtgcctttcctagataaagaatttttaaatgttgcaatgagcatcgatccagagtggaagttgatcaagcctgatctcggaaggatcgagaagtgggtgctacgcaatgcctttgatgatgaagaacgaccttatctaccaaaggtttgtttacaaataactaaagctgtttttgtgcctctctgcagtttttttcgataaactctgtaatttcactaataatgttctaacaaaatttctcatcttctggtgaattcagcacattctatatagacagaaagaacagtttagtgatggagttgggtatagctggatagatggtctgaaagatcatgcaaataaacatgtaagaaatgtcttttattaaggcaatttcccgataaatgttggaagttttttgacataaacttccatttttcttggtaaaggtctctgatactatgctgtcaaacgcaagctttgtcttcccggataacacacctctgacaaaagaagcgtactactacagaaccatcttcgagaagttcttcccgaaggtaataaaatgccataaattttcaaaatctcacataaacgtctctgctttgctgatttgttttgttgtatttcctgagcagagtgctgctagagcgactgtaccaggaggtccaagtatagcttgcagtaccgcgaaagctgtagaatgggatgcaacttggtcaaagaatcttgatccgtcaggccgtgcggctcttggagttcatgttgcagcttatgaagaggataaagcagctgctgctgctaaggctggatcggatttagtagatcctcttcctaagaatggaacataagagaacaacactacaggcattgaggatataagcaaatgttttattcttctacacagagagatcgttatcttctagagggatcaatgaataaaagcttcgtccatttctagctggagattccatggatctccagttagtgcaagtgatacacgttgtctacatttgtacctaagtttctgcattttttgtcgttcttttgtgttagacaagtcttggaccctagatgatacttcagtttcttagacgttaaatttgatgaatccgaacttgtttgatttcaaagcctggcctttctgcaatgtgtttttgtgcatgttctggcttgtttgttgttactcaacgcaggatttgttataatatgtacaatatatctagtacacacataagtcaagcaagtaagactccgtggcccaatggataaggcgctggtctacgaaaccagagattctgggttcgatccccagcggagtcgctcttcatctactatttttatttttcttacgcgcattgcttataaaagttttttaatgaacgtgggataaaagttttcagattcgtatttattatttcaaaaagacagatgacctaacctcattactcgtgtatggacttttttttccttcaaattatattttatgaaatttgagtagacgaagtaactgctccccttcagatttagctaaagagccaaccacgtgaagtcgtgaatcctctctgtcgttttcgtattaacaaacataagaaattaagaaatgaaaatctcgttttcttatgtataattgttttatatcgatcaccggtttctctaggtctaggtatagctgttccaatatcatgatttttaagtttagttttcaacatcattaagtaaaagtgtgaactcattatcatcatcgctttccctttagaatttttgcaaacacacgaaaataaataaattgtttggacatattattgagaaacatagtcaaatgagcccgttcacattctgaatcatataagttacagtcccaaacccacgttttattaaaaatgtactactagtcaataatttatgttgagtcatatttatttattttgacacagttggttttcgcagtttcttgtttattagtttcaaattgcacttattagttttaaaaacaatttaatttgatatttggtataatatctcttttgaattatttacaaactttattacagcctggttttgaaaaaaaaaaaatactttgcataattgctactttgctaggattactttataaactttttcagctttgattcatttaacattaaacccaattaaaatattttattcattttagcataaaaggggaaaaaaaagaaatatatatatatatatatatatatatttcctcttttcaattaaatcagctgttaaaagtggaaaaaatcaaagagatatcaaaatattgattagaagaatatgtccatattcaattattttatattatctttattaaatgctttaccttacaacaataacttaaataaatttttgggattcccgttacattacttaagtaggacgacgtgcgtctgcttcgtctcattacaaagcagaagaaacacaaacagaggcagagatcttaagagttaaagactaatcccaaca

SEQ ID NO: 2045 - DNA, 3000 bp, Unknown
  misc_feature (1)..( 3000): cDNA_ID_1557675_gDNA_ID_1620481_Annot_ID_158334 3000 nt of promoter + ATG
ttatgacataaaacaaacttattacattattctgtaaatttgtccaatgaatacaaaatttattattcaagtttcattctacatatttttattatacaatttatgtcgttatgcaattatacaatattatcaataataaccactaaatacaaatgctaatttgcaatgtatctcatttgaggagaatatactaaaagcaagtctaccagaacgaacatcattacacctatcttgtgaagttgtgataacatccttcttaagaactagttgtatggcaaactactacatatatggttcatgtgaaagaaccgataggtgaattactatcatcatatatattcatatacattaggtggtatttacttactatatgtgtattcgagtaacagtttttaataaaaaaatatcactctttaatactattttaaaatgatcaagctttctgttttaaaaactctttatcaaaattccagatacacatacttaaaacacccgaaaatatatgttgaaaacacagaactaagagcatccacttacttctttatttgatgtgtcgaagactagaaaattcttcttaaaaacatctcctccagagatactcaaaacgatcctaaccgtttttatgtgacgcatgttcatctactcagtactctccaacgttttttccaaaccaatttggaggaccttgcacataatagctttgatcaaagtcttttgctcccaactaattgcctctctaatggtgaaacctaaaattatgcacatatacattataaaaatttcgataattcaaaaaaaaatgcgttactcgaaaggtataatgatccgaattacaaaaccgtcgagtatttgtgttcggtcaaaaaaaaaaaggtttttgattaggtaaattgataagtagcttgctaccgtcttgcagagttgttaacctttcaattaatctcaccattagttgaccgagttgactcagcctcggccgcgactcgttctcaaaactcagttaggttccgcagtctcgatgtctgttccctaaaagaatcaatcagcctgcctacgaaccaaaccgaattaaactggatagcttcttctttctgacggcgtaaactttcggctctcccaaaacgacagcattagagaatcgtctcagttgggttttagggttaggcatcatctgagataggcccaacattacatatctaacaaggcccatataactgaataaacaatacacttgcaagtttgctttcaagtttcttgtcttagtgaagtgaatatgatcagtacttaagtgtcttttgtgaagattttcatgattaagccattcgatcacaacacgtggatattgtcctgtcaaatccatatgcattttttttactgcttttgataaaaatgttaaacgagtcaaaaatttacaatgtctggaaaatgtatgtacaacataagtgggtttctcttgaaaagttaaaatgatagaaagtgaaaaactaaagtgcagccacttgtctaggctttttctttcaagttggtaggaaacatcaattacttatttgattttttttttcaattaataatatgaataaaaggaatctattggtacaggaccaaacacttgctttgcttttcctttttttttcgtcatctttgtttaagggcccaaagattcatcgaaatataattggtttgggtcctttgatgcgttccattgttgatacctttgtccttttgtgctctcacaaaattagtttttctaaactttattgcttagctcatgtaccattcactgattcttcaatactttatcccactattttttttttcttttgatgtaacaaaagagttttacatttgtggggctgtgtggatttttgataatttaactttagaattgtactcaattatgtgcatcagatcaaagtaataaattttggtatctttggagtttctaactctttgacttataatatttcactaaaaacaaaaataaaaaggtgagaggcaatgaggaaatagtgagacaagacagtgcagctaaaaataagaaagaggctatgtgtccaaaagtttttggacagtttggtgacgcattcatccatttatacatgtccgcactaacttttgtcatgttcctaatgcttatgatatatcacaattttgttttatgaattgttttcttcttctatataagggatatatagtccgattcaatctaattcaaacttgagtttaaacccgtttagcttgactaatccagttcacaatgatctagatttatacacaaccggatcagactttacaatgacaatttttttcaaaagtggtaaatatcgatccacatgtttttggtccattataagatatttattatatatgtgataaaactttcgctatatagaagtgtttctgatttcgtttacccgtaagagatttttatatataaaggactgtctgactatcactagtatgagtacatctaatgataagactactaaaccgaaaactattcgtctagacaaaatttgtctttttttttgggtatataggtaacatttgaaaatttgaattcactggttgattacaaaaatacttgcaaactgtatccatcatatccaggataataacataatttcgggtaattcttctaatagattgaagcaataaatactttaaactataattttgggcattgattgaataaggggcaaaaatgggggtatgaaagtcgaactttgttacgcaatctcggattaaatgattgtcttaactcttaatctatttacagggttacaccaatatgattaccttatatataaaaaagaaaaagaattataattactaactaaagaagattataaaaataaaacaatattatctctataattagattctcccattctttttctttaaataactttgttcttcttctcttcttcctcccctttactacacacttcttcttttttcttcagaaagaaagaaagacagagagagagagagaagatg

SEQ ID NO: 2046 - DNA, 3000 bp, Unknown
  misc_feature (1)..( 3000): cDNA_ID_2990967_gDNA_ID_1620481_Annot_ID_158331 3000 nt of promoter + ATG
gttaccttagtattatgaaagtaaagaatgctgtgaaaaagattttcgtctgattcagaattgaaaatgtcaaggaatcaagactcctgtatgagatctgcagcaaactgttctgcagtgcatatatggctgcaggaagtcctgatgctgtcaaggatcccatcaacgtccactcttttgctaatcccttcaaactaccatttcttgccatgagaatcagagcacatatgacctataaaaaagaacatacagcagaagcatgaaacagtatttcataaatgcaaaattttcgaaagtagaaaggaaaaaaaaagatccagtaccttaacaatctcgcacgtcaaaacagatgaagttacaataacatcctttctgcaaaaacaataatgcggtaaagtgaccaaaccatgatagagacaatctattaactgtttaagaagaaacaaacaaatggactagtgaacacaagtctactagttctaaatatccatggcattttgccgcaaaattaggcaaagtgactcgatatcgagtactagataacgcgaaaggttacacggtaccctacaaaaccaagatgaacaactaaaacactatgatgaaaagctatattcaaggcatcaatgtagcaaactagtagattcaaattcatctctctaacactttagaaaatggcttagtttaacagtgaccatgtctttttccacaggaacaacgagaatacatcacaatcgtcgcatataacttcgaaattgtaagtttacaacactattctcaaccacaattcgcagaaagccaacaaaacagatgcccagaaatcgaactccatctctactcgctacataagactaattacaaccaaatctcgcaattcccgataaaagcgcacgaaatcagcgaatatgaacaaggctatcactaacatcagagatttaagaggcataggttgttgcaagagaccgtacctgatgcagcgtttggagatcagaggctgggctccgtactgaagtgtgagcaatatggaataaaacaaaaccttagggcccatactcgacggactctttgctccgttagccgtcgccatgaatctccggccgtcgagaatccagaaaatccgccttcgctttgttctgatcttttggtcgagaattggtttgtgctttgaagaacgctttttcactttttctacattggacgtcgttttctcaagagatgaactacaaaacgccgtcgtatttgtttgacaagtgtaaaaacaataatccttgctaagtaaacactttttgggaaattttgcaagaatttatccatattaaatttgtcaaatctagattacaaaaaaaaaaaaaaaatccccaccaaattttgtaattataaatgtaaaaatattatgaagtattgatagttactacaatctagtagacattaaaaaatcataacaccaaagttaaaacattttctctggcgatatgcatcccgggctattggtattgccgaaaatctacgacgtcggaacataaacgtggacccgtattgttcgcgatgttgcacggagctggaaacaaatgaccatacaatcttctcatgtcctcgggttgaaatgatatggagagctgcaggctttcaaacttcccaattatgtgacaatggaataccaccggaagagaagttgcgtatcatctttcaaatgcataatgattcaagggtggatcgagttacaagatttatgcccttttggttaatgtggagaatatggaagagcggaaacgacctagtctttaaccacacgcgaacaaaattccaaactacagtggagatggctctcaatgacaccaaggaatggttggacaatacaatgacaaacgagcagcaaaatgggaacaggaatgcagatccgtctcgtaataccaagtggtcgccgccgggaagagacaaattaaaatgcaactatgatgcatcgcaccatgaaagaaacacagtttcaggacttggttggatccttcggaactctcaaggtactgtgatcgagtgtggtatggggaaatttcaaggtcgtatgacgacggaggaggcagagtgttcaacacttatttgggctatacaagcttcctatggcttcgggcataagaaggttatttttgagggagataaccaaaccatcacccgaatgataaacacaaagtcatctaatccaaggctacaacactttctcgataccatccaaagttggataccaagttttgaatcgatagaattctctttcaaacatcgagaacagaacggatgtgcggatttcttagccaaacaagccatcaaagagaatacccaatggtctctgtttcattcttgtccttattttctgagtccatatgtaaacaacgattactcttaagttctaaataaagttataagttgaaaaaaaaaaaaaaaatcataagaaaatctacaagttatgttttctcaatcacatccacttcttaagaagacataacatgtaacatgttgatatgaaaccatgtgattagtggaaatgaaaagcagaatgtaaggaggttacaatgtcagaacatagcaaatcatatataacttgattgttcctttcttcaaagcaacaatggaattggaatatagcatccactaaaagccttcaaaccaatcatacgagataataatgcgatttcaaaactgatcaagccataaagatgaataatgagccatagttgcattcgttcaatccgtgatttcgtaacgcgaaaggccaaaacgttattaagttccaatccaaagtaattgacaaaaaaacaaatggacctcgtgacaatgatgatatgaatctctcccaatcacaaaaatgagtaacaaacaaacactaaaaagattagggttaaaaatcataaatagtcaaaatcaacggccgtgattgaaagccaccctataaattctaataatcagtttctgagtgaagccattgttatttgttttcgttgccactctaacaca

SEQ ID NO: 2047 - DNA, 3000 bp, Unknown
  misc_feature (1)..( 3000): cDNA_ID_3065696_gDNA_ID_1620481_Annot_ID_158328 3000 nt of promoter + ATG
tttgtttccagctccgtgcaacatcgcgaacaatacgggtccacgtttatgttccgacgtcgtagattttcggcaataccaatagcccgggatgcatatcgccagagaaaatgttttaactttggtgttatgattttttaatgtctactagattgtagtaactatcaatacttcataatatttttacatttataattacaaaatttggtggggattttttttttttttttgtaatctagatttgacaaatttaatatggataaattcttgcaaaatttcccaaaaagtgtttacttagcaaggattattgtttttacacttgtcaaacaaatacgacggcgttttgtagttcatctcttgagaaaacgacgtccaatgtagaaaaagtgaaaaagcgttcttcaaagcacaaaccaattctcgaccaaaagatcagaacaaagcgaaggcggattttctggattctcgacggccggagattcatggcgacggctaacggagcaaagagtccgtcgagtatgggccctaaggttttgttttattccatattgctcacacttcagtacggagcccagcctctgatctccaaacgctgcatcaggtacggtctcttgcaacaacctatgcctcttaaatctctgatgttagtgatagccttgttcatattcgctgatttcgtgcgcttttatcgggaattgcgagatttggttgtaattagtcttatgtagcgagtagagatggagttcgatttctgggcatctgttttgttggctttctgcgaattgtggttgagaatagtgttgtaaacttacaatttcgaagttatatgcgacgattgtgatgtattctcgttgttcctgtggaaaaagacatggtcactgttaaactaagccattttctaaagtgttagagagatgaatttgaatctactagtttgctacattgatgccttgaatatagcttttcatcatagtgttttagttgttcatcttggttttgtagggtaccgtgtaacctttcgcgttatctagtactcgatatcgagtcactttgcctaattttgcggcaaaatgccatggatatttagaactagtagacttgtgttcactagtccatttgtttgtttcttcttaaacagttaatagattgtctctatcatggtttggtcactttaccgcattattgtttttgcagaaaggatgttattgtaacttcatctgttttgacgtgcgagattgttaaggtactggatctttttttttcctttctactttcgaaaattttgcatttatgaaatactgtttcatgcttctgctgtatgttcttttttataggtcatatgtgctctgattctcatggcaagaaatggtagtttgaagggattagcaaaagagtggacgttgatgggatccttgacagcatcaggacttcctgcagccatatatgcactgcagaacagtttgctgcagatctcatacaggagtcttgattccttgacattttcaattctgaatcagacgaaaatctttttcacagcattctttactttcataatactaaggtaacctttatttttcttgttcttatggtcttgtttttgataggatgcttgaaattttgagtttgttggatttgtattttcctcagcgagtgcctacatcacatttttgaattagagatttgtagtgtgattgcctgaataactttatttgggctgcttctctgctccaacgtgatacctaccatgtcttaatagtgtgattgcctgaatatctattgcttgaaaagtgtttaacacatcatctcgaatgacatcttgtaggcagaagcaatcaattctacaaataggagccttgtgtctattgatcatggcagcagtccttctaagtgttggtgaaggctctaacaaagattcaagcggcattaatgcggatcaaaagctgttttatggaattatcccggtcttggcagcctctgtcctgtcgggtttagcctcttctctgtgtcaatgggcttctcaggtcatccagagtttacatatcatattccaataaaaaatctgtacttcaattcattcgtagcctaaactgtcttaccgtttacaggtcaagaagcattcatcatacttaatgacggttgaaatgtctatcgttggaagcctctgtttattagtaagtactcttaaatctccagatggtgaagcgattaaaaaatatggcttctttcatggttggactgctttaacactggtaataaactatctcttttttttatccacaaaacaattcttttgatagcaaaacagtgaattctgattgtttgtatgcactgtgactgttgttataggtcccagtaataagcaatgctcttggtgggattcttgttggcctagttacatcacatgccggtggtgtaagaaaggtaaaacaaaaaaaaaccctcccagactgatattacacaatcaaaagctgaaatatgtaatgtcgttatatcactttgcagggatttgtgattgtgtcggcattacttgtgacggcgctacttcaatttgcgtttgaaggaaaaccgccatcatcgtattgcctagttgctcttcctcttgtgatgagtagtatctcaatgtaccagaaatacccatacattgacaagaagaagaagaaggtgtaagaaaaaggttccattcagagaatagctgctagttacaacaatgagatatcttaatgccattattattaactaagtagatgatagtgtgattcttggagcattcaaaagactttgtagtatatttacattcaaagatggaatgagtccaattgagtttaagtaaggcctatattaggcccatagcatacgcaaatcaacccattgattacactattaacaaaaaaaaacacatgatgtatacagttttgaatagaattatataattggcggtacgaatataaacgcgattcaatagccaaaagggagaagaaaagagaaagagaggcgaggatg

SEQ ID NO: 2048 - DNA, 3000 bp, Unknown
  misc_feature (1)..( 3000): cDNA_ID_2148840_gDNA_ID_1620481_Annot_ID_158323 3000 nt of promoter + ATG
atttgcaacgaattgcaaaaggcaaaacacttcccaaactattagccagagtttgccatcaccgcccaatgtgtccacacacaatttacccgatacaccgcaaaatataccgaggaaaagaacgatgaaacttatcggcattgtctgcttcgtacctgatgatcgtttgtttagaaagtaagtgaagacaatgatcattaacacaccgaaaaatatctgcacccaaactcgaacccggcagatgaaggtgttgaagcctgagttaatcgatgaaacttgtttaggaacccaccacgacgaacttttctcctcggattggtcgcatactgaggtagcatcctcgattctctttattgaaaaattgtaaacgccaagtaccatagaagccaacatgctgaagacacttacgaggagccaatccatgattcttgtgaccatctcttcttttcttgtatcttctaattcggttttgaatttctccgctctgaatgcagctttcgaaacatccaactctagcgccgctttccccaggttgtttgattcaaattttaatcctagcgccgtctctttgcaccttaactctcttatttgaagaccaatctccacggtctttaggtcgtttgctcgtgtttgctcttttaaaaacctttcgtctgtggtcaaagccattgctgaacttctaggagggacacaagagagttgtagagtctcttcgaaaagggcaagctcattcatcaaagaggttgctgttgcactgccttgcatcacttcataagcagacgtagcagatgaagtctccctctcaaatagctcggtgtctgagcatccgtctatggtagagcgatctaaattacaactcccaccatcattattgtttgactgatgtggatttgcacattcattggtcaatttaaggatctttagagtactgctgaatgtttgctcaaagttggtcgcaaaggaaccaagcttattaccataaacctgtaaccacaacattatgaatcagaaagtctataaatataaaaatgcggaaaacatagagggggattttagcttacattggctaatgattcttcgacaagagtagcaaagatctggagagcataatcaatgaagttcttgtatcactaccaaaacgatggcaaaagaaagattgaacagaaactgagaagaaatcatttgaagttcatactacttacctcaacaagatcatcaacataaacattctgacctgcggcattctttctcgcaataacctagagaacaataaaacagagtagaaacagagtaagaactacagagcatatgcaagtcaatgactttggcggctaggtaggatgaaatttggtgaaatcacaatcagaactacaaatccgagtagaaactagaaaggctcaagctttaaggcaagtgagagagaagacaatataaatttgcaatgttacattgaagctcgatcatagagacccccaagaagaacttcagcttctattgattgactctgattataatttgaggagaagatcctctcttcgattcagggtgaagaattcacgcaagtactgagagaagaaaattcagattcaatccttttgactctgattcagatcctctcctctgtccagttttgaatcaacaaagcctaaattgaaagactttgtatttaatactatctaaagatcaaaactttcaacacaaccaaaacctagtattcacgcaaggtcaactataggaacaacccgtaccagcaaagccaatttcgtatcaaaacagttatgtgatgcaataaagatcaaagtttggaaattgatcgaaccatattagcaaaagcggcaagtgaaaagcccagaggcttcgccaatttttcagcttgtcgttcaccaacgcttcgtcgagccatacctaaccgcatagggtttcgtaatctatgaaccactctcgtaacccttttagtagaatttgaattagaggtagaagatgtagaacaataggacgaagaagcttcgtcgttgtccataatctctttcttctttcccttgagttttctcttttccaaattcgatggattcgtatccttcttcttcttcatcatcatcgtctcatctttatgtacgtcaccagattgatgatttggctttgaattcgccggattggtgatttgattttggggttccggcgaaggagggaggaggagggcttccatagccttaaaatataacttatggggtaaatttgcaactttgagaaaagtatttaagttgtaagactttggtcgcttcgtgactagtgaaaagtttcgaatttccaactttttcctctgatttaatttgtatttttaaaaattcgtcataattagcttaatataggaaaaatacttgaccaaatatctgaattaacttgtaagttcaacgaattcttcaaattatacaatgtatatgttaatgtcaattaaataggtaataatatgtttactcgatttttagcgataatttgatgtttctaggtgctttctgttcaatgaataggatcggttcagtacttaattgaactaaaagtcatacatatagcttaggaccagattaacataccaagtagtcgagtttaggaccgaaccaatcagtttggtttgaagatggaccataaaagtgtttggaaaaaggaacaataaaaaaaatcgcacaatgtttgtggctccgataaataacacgatgaggtgtcttaacacaaccaatcaaaacacaagaacatctccttcactaatctcatcttatgccacgtgtccttttcatatccaccccttttattttatcataatttttttttttaacattctctgtggttcgtcatgaacctcaaaaaacctctcactgcaaagtgccaacaaacaacaagtcttcaccttcttcttcttcttcttcttcaaaatctcttgtacgcaaataatccatgagaaactagggtttaacttgagatctctcttccgaagtattaccatca

SEQ ID NO: 2049 - DNA, 3000 bp, Unknown
  misc_feature (1)..( 3000): cDNA_ID_2148805_gDNA_ID_1620481_Annot_ID_158313 3000 nt of promoter + ATG
gttgtatatacatgcccgaaatttcttggatgtttcacgtgtatccaccatatattatagcttacaaataaataaagttaaagataaacataaaaacaacatctaaactataaaaaatatgcatgtatttatcattacataaaaaaataaattatgtagatatgtatcaaaatacaagatttccacataattttgttatcaattatattatcttttaacattcaaatttagccaaaacagttatagaattttgtaaataaccgcgtttcaatgaaatttcgtagaaagtagaaaagaatataaaagcttaattcaagagaatattttttttttatttttttttattttttatttacgcgtattaaaaacttgtatataagttaaatcctttcttatgatcctctccacaaacaaacttgtactagaaaaatccctaaatctcaacaaaaccctaatttcaaggaagacgaagaaagaatgagttacagagtcgctaaagcatcgcagtatcttgcgatcaccggtggtgggatcacagacatcaagcttgcaaagaagtcttgggtgtttccatggcagtcttgcaccgtcttcgacgtttctccggtgaactacacgttcgaggttcaagctatgagttccgagaaacttccctttgttattcctgctgttttcacaatcggtcctcgcgttgatgatcctcacgctctcttgttgtatgccatgcttatgtctcaacacgataagcactcgaatcacgtcaatgagcttgttcagggtgttatcgaaggagagactcgtgttcttgttgcttccatgactatggaagaggtcttcaaaggtaaccaaacataccctttttgattatcttctttatttctgagttctgttttaatataattgtttgaactgtgtttgaattgtggaattgtaggaacaaaggagtttaagaaggaagtgtttgacaaggttcagctagagctaaaccagtttggtcttgtgatctacaacgccaatgtgaagcagcttgttgatgtgcctggacatgagtacttctcttacttgggccagaagactcagatggaagcagcaaaccaagccaagatcgatgtagcagaggcaaagatgaagggagaggttggtgccaaagaaaggactggactcacaatccagaatgcagccaagattgacgctgagtcaaagatcatctctactcaaaggctaggagaagggacaaaagaggagatcaaggtgaagactgaagtcaaagtgtttcagaatgagaaagaggctcttgttgctaaggctgatgcagcacttgcgattcaaaaggctgctttgtcccaaaactctcgtgtggctgaggttgaagcagccaaggctgttgctttgagggaagctgagcttcagactaaagtagagaagatgaatgcattgactcggacagagaagcttaaagctgagttcctcagtaaagccagtgttgagtatgaaactaaggtgcaagaagcgaactgggagttgtacaataagcaaaagcaagcagaagctgttctttacgagaagcagaagcaagcggaagcgacgaaagctgcagctgatgctgccttctattcaaaacagaaagatgcagagggacttgtcgcaatggccgatgctcaggggacttacctcaagaccctcttaggcgcagttaacaatgattactcagccatgagagacttcttgatgatcaacaatggcatttatcaggatattgccaagaccaatgctgttgcgatcagggacctgcagcctaagatcagcgtgtggaaccatggtggtgctgagcaggggatgaacggtggtggtaaagctacgatgaacgatattgctggactctacaagatgttaccaccggttcttgatacggtttatgagcagacagggatgcagccaccagcttggattggtacattgcgtggtgctgagcccaaacaatcacttcatgctcaacaacacagaggttgagatctcaaatgttgcttctttaattatacttttagctgttggggtttgttttctttttcttatgttatagaacttggaagttagagtttgaagttaaaacaatagtatctgacaaatgcgacttcgactagtgatttcgataaggatgtgtttttcctttttcaaatgtcagatttattattgcgtgttgaagatacctttcttctctcttgatacactaatataaataacatgtttagtggtggtctactaaaataaacagaaggggattatcaacacatgattgcttcaatagttgaatgcaattgtggagatggatgtaccttccagatggataatcaaggaatgatattattatatctacataaattctgtcaccatcggataaatagttcaacaacacctaccactttattatgatgctactttttgtaatgcatcaggcagggctcaagggaccatgctccaattatttgttcctcatatcggaatatctttaagagtggtcctcaccacctctctgtgaactgcaaattcctctttttagcagaaaagtatcatatacggaagctgcatgtttattgaataatatattgaccagtcgatgaaactgcgaggatggtagatgataccactgcatttaaattatatatttataaaaatatattgactatagtaaaacataaaataaatagctgaaacagtttataattatttaatagtccattgaaccaatttattattctggatctcatgggtttttaacttttaagggatataggatccgatctcgacggcctaaaaaaggcccaaaatacggccttgaaaatggcgcccattcacgagagtttccttacaccgcacgtgatgatcacgtgatctcactctcacactctctcaagagcaacaaaatatctcgactgtttttgattttgtcatctggtggattagagtggagtggagctttgaattggatgatcattatccatg

SEQ ID NO: 2050 - DNA, 3000 bp, Unknown
  misc_feature (1)..( 3000): cDNA_ID_3065727_gDNA_ID_1620481_Annot_ID_158305 3000 nt of promoter + ATG
attattaatatgctgttttagtaagggttaaaacttcagttttttaacaattgtctcatggattcgttgtatagcgttacttaataacaattataaactgtaaaatataaatattttataaaaataaaatttgcaagttttaatatatattaactttaaaaaataaattataccgcagtataccgcgggttaaaatctagtttatatatatttcacttaattttgtctatgttcactatacatatgtaaactcaagagtcaagactattcaattatatcatcatttcgcaaacttataataacaaattatataatatagtgataagtgaagttttgcttactatttatcaaagatttcatcttattttcaacaattctttcaatttgtaatgttatcagtaaaaaaattgtagtatataatctgctagttaataatacgaaaatatttgttattattgtacgaaattatcaattatgataattgtgtagtcatatcaatgtaatgaatgctgctgaccattctatttcttctctccttattcccctttgctcctccttacttttactaaaattccctcaactcttacgataagagcagagagaagaagaagaagaagaaagtaatcgtgatttgagagagagattcaaacatacttttttcgatatctatgttaattttatcttcacgatatgcaatgaaacgagatgttttaatcattgtaatctttacagtgttagtattaatcattatctcccgttcaagttcgatccaagctggaagattcatgactacaggaagaaatcgtaatttgagcgttgctcgatcactatactacaagaatcatcacaaggttgtgatcacggagatgtcaaattttaataaagttagacgaagatcgtctagatttcggagaaagacggacggcgacgaggaagaagaagagaaacgatctatccccacaggtccaaatcctttgcacaacaagtagagtactgactactgagaaagatgcaacatacttcgacttcgtaaattgttcgtttggtgtatatatgtatcgttataagttagtttacttttcaagattaatagtctttaattaggttgggttggaaactctaaaatagtatgagataaatttcaattgtttctagcatttaaattttgtatgctcaaagttgctggaacgatatggcaaacagaaataatggaatcgaaaaaatatcgtgatatgttagaataaactgagtaaaagtacgtttttgtgaattttcttttgtcattgtaatttgttttaacaaaatacagtattattcttttttacgtactaataaggtatattgttgtatatataaaggtcagtaacttgtaactcatcttttttttttgtttttttttctgttttagctgataggtggttggtgttcattaataaatgtccatatatcactttcaaagcaattcactaaaatatagatatgtaattattttttattttttcagattttccccttgaaaaaggggttctttcaattagaaccccacactaacacactccttcacttttggccagccgcccttctttttcagtctttcagtttatattttagcctcttttttaaaaaatactatattttattgctttttcttcttcttaattactttagttaatcatagttaaaacacatttttttgtgcaaacgtttaagttttaacactatctgattttaaacttttaatcatttgcatgtaaaatcactcaaataggtaatatttatatgattccagtcatgtgtttcttaaaaacagagccacactacatgtttctgtgtttattctcagttaattagtttttatgtttgttttaacacaatacagagagaatattattgtagttacaaaaacaattaagagtggcaccaagaaatttcgtcttaccttttaagacaagattaaaagaccactttgaaattttgaatcgttgacttaagaatagacttagcaaaaaaacttggtcatacatatatgatatatgtgtgggtcaacgattcatatatgtatgatgatacattgcaatgtgccaaaacttctggaagaacaaaaaacgactaataagaaaaaataaaatatataaaatgttgccaacattaaaaaacgcatttgctgtttcccatcaatattggagtatagtttatataagatttttaacaatattataagctagttaattaatagagttaatctttggtaaaaaaacagacggaattttataactttcgaaatcatattgatctgcatatatatatatatatatatatatatatatatatgtggattcaccagaccagatgagataaccattttgaaggatttgctaaataaaagttaggccaaaaagaaatcaataaagtttgtgacaatatctttaatagtataatttacatttacataattcaataagtcaaatcttattgtgtcttggtgtgcactgtaaagtaaagtcctgtctgcttcaaacgcagcataagcaaacttacaacttaaatcctcagccgttgatccaaagaccaaaatccaattatcaacgttacctaatgtagacgataaaatctcttaaaatgggcccgtaaagcccaagcaaaaaaacaattactttaagtggaagctcacttttcgccacccttattaacgtctgtccatacgtcataacagatgacgtcatcatcatattccttttttcacacgtggcattgaagcaccttcctagtatctaccctgaaattgcttgacataagtagtagttgtttaataatctttatctcttaattatcctcttttcttaacaaaaacttgttacaataattttcatttttatataaataactgaccattataactctttctcttctcttcttcacttgctctagttcttggatgctttaaacctctctctctctctctctcaattatttttttttctatttcaaaaacaaaaaaaa

SEQ ID NO: 2051 - DNA, 3000 bp, Unknown
  misc_feature (1)..( 3000): cDNA_ID_2148790_gDNA_ID_1620481_Annot_ID_158309 3000 nt of promoter + ATG
aacttaaactcaaaatctgaagttgtgaagtttggtggggtatataaaattaatttcatgtgtagtcataaacagcaataagcaaccaacttgaccaaacattgaaggaccacattttacccaattgctagaagaatccatataatgcttacaatattagattctcaaacctaaccaacccaagaaggtccacatcaaatgaacaattcacaaacattatcatcctattcatcaagaaaatatgaatcttacaatggatattcaaagtgttaacatgtaaatgcaatcaaaaacataagtttcaaaagtttggtattggtatgagcatgaacaacgaactagggtaaacaatgtgtgacccaaacaaaatctacccattttgccagaaataaaccatataaggctaaaaagttggatttcatatcctaaccaagtcaaaacacctacctaccggtttcaatgaacgcaggagctaatacaaattcatatacaatggactgacattcaaaacaatgaatctttaagatagagcaacaagaatcttacagaaggagagtgtgggtgatggtgagagaactcattgcggttgttgttgtcactgtgaaccgtagttagcttcttaggcttggcagtatcaacaggaggctgatcatgaaaagggttaatgagttcttcctcgttgccaagactggctcgagaagcatctctcttgttgagtttcctcatctctctgatctttgagaaatccattgagtaatcaattgatcctcctttttgatcccaatctccaaactgtggtactgatagccatggcgagttcttgttctgccaaataaatctccatttcaattacttttattttcaagaaccattagaaagaaaaaaacacaatcctaaaaatcaatcacacaaaaaaagactttttcaccaagattcagagactaatttctcacatcaaaatcgaatattaatgcaagaagttgacatgaacatcccattttatttaatgtatcactttaactttaatattatgtaaggagaaaacacagaagacgaagggattagaccagaaaataaaaaataaaaacctcttttcgatcttccatgtgatcaaagcttctgtagctagcagtgaatcctgttttttttttttataataagttaaagatgatcttaggaggaagatgggtgatacagagcaatttataagcgaaagaaaaagtataccaaaatttaatacagcaaagtaacaggtcgattggtggtgatacaactatactgtacacaacatatcaaaaatatttttgttttattttgtttttttctgcttcgggaaaaggttagcttttgtgcattaattacgatactgccattcgttcggacacgcacacacgcttaatccgcgtcagctttgctctcatttcctgttaaatgacgtcgtttagtatactgtcgattaatggtctaacctttaagttatgatattaaaacataagtttattggtgaagatttgaaggccggcaactgattttattaaatttatagtgatatgtttttccaatagcttaagcaaaatttgtttggagttgattagttcattttcatttatcttttttgttcctagagcggttagtgaacactgaatgaatacacacactgactccactaagaacccaaaaaaaaaaactcacatcattttgtgtattttgttagataaaatcaaacctagccgacgttagtgaatctgtatccacttaaatatcatctacagcaacaaaaaagtccacaataagatataaataagtacgactttgcttcgtcaactgtatgactgctattaacaatcccgaactatttagtcatggaggcgattaacataaattcatgtttaatgatgcgagccgttacatgatatatatacatgttgattcttaattttcatttccaatttcactatttcagtcatatttgagaaaaaagatgtgtgctcgtacgttttaagttccatgaacagccaatttaaaattaacgggtgaataagttgacgcatattcatttaaaattgtaattacgaattcaacttactaaaaccatatacataacgaccaaaaacttaataaaactataaatttaaaaagaaatcaagttgcgtgacgatgtggcgtgaagagatccacagagaaactgacgtggttgatgatatagttagacacgtggcagagtatgagaagtgtctgtttttcaaaggagctatgtgaaccacaaaagaggtaacttcaccggatttgttatctcttcaagacttctaccctctcttctccttcttcctcaccacaaaattagattctttcgtttgttttttgtgtgtgttatatttgtctttatttcatatccatttattgactttgtaagaacattgcattgcatgtggcagagaactcaaagttagtaaaaatgaatactccgatttgtatcacttctttcctttggcattatatcaaaatatggtcttcaaaaactagaattatacaatcgtagaatgcatttacttgtcattcatagaaagttgcaatacaactaccattagtacttacaaacattgcaaccaaatacattttttattgtaaaatagtactccatacatatttcatgctccatacatatttcgatttttcactattttcattccaattttttgtgataactgaagataattttattgggtttttcttttttggtcgtcaataatattaatttattttctaagtattgattttatttattgataattgataatgatatattttcgaatatagagaaaaaaatacaaactaataaaaaaatcaaataaaatctggtggctcacgctcaaaacgatagagagaaactcttatcaaagcttttgatttctctctcgagggtttcttactctgctgcttcttcttcttcttcagtagagcgagattctctcgcgctctctatcgctacatataaccatg

SEQ ID NO: 2052 - DNA, 3000 bp, Unknown
  misc_feature (1)..( 3000): cDNA_ID_2149260_gDNA_ID_1620482_Annot_ID_158358 3000 nt of promoter + ATG
cctatgttgacaccaaaacatgctaaatcccacgaaacgttgacgtttcactgccctcactctctcaatcaagaaaccggttttagtccactttttcacttttgccctactcgctacaattaatactcatctgttgtgaaaactgtcttcacttatcgtcacatttaatactaatattataggtatcaatgtagcttattttcacattgttgttatgtgttactgattataagtttataactcacatcatttcgaattggaagcactttgtaattataatttttaagttagttaaattcaagggaaatgtatagtctacaaacttatgaaattcaaaaacgagaagataacatacgggtccatctcgattattacaaaattggaaatttttcacaactttgtttcatatagtcttgggactttattatgaccttcgatttgttgttctcttttttctctctcgaaagatctgtgaagaatctatgtgacagcacagtgggaacaaaggatgagtaaataaaaaagaaaaaaaaaacgttagaaggaccacagacatatatacatcgacatgtctataatatatgaatatgattggttaacctttgcatggtagtggccaagctgtctcttagtccattgtatgttgataattctgatattgaacgatattcgatgcaaatggttacagattcgattggtaaatgatagcgttgtaactagttatggtaacatcaatacaacttatatgagcacatcgcatgtctttgagaggcaaggtctagtagatacaaacattctagttaataagaaaaagttaaataaaatcgtgcgattattacatttagttggtagttgggtgatccaattaccaaaaagaaatatactgtataaaaaattgttgtttgatactaagttaaacgataattaagaataaacctttttgcatatatccaaatttgaatatcggaaacaaatagcatagtttaattgtttatttgtttaataatgtgtaatgtaccaaagctgagataggctgcctcccaaggcaaggtagcaatacaatcgtgttcatgtcccaagcatcatctatactcgttgctccactaacaacccactttatattaataatcaaattgaatcaatatcaaattatcaaaaaaataatcagtccaattattttcgcacaatctagcaaacaaataaaatattcaccccatagaattttacattgttgtttggttattgaaaataaaaaatcgtcccacgtgagatatcccacaaaggtcccaacatcaccacagagagtctctgatcattacaatatccttaagattagatttatatagacattttcttataatatcttcttgggcaagtgctctgtattcttctgacacatttctatcgtcttcttctttttttatttattcttttgttttctctttgaaatattgaagaaattttgatatttttcccctttcttgtattatcttttcttcaatgcctttttcctccttcctcttctctatctcttttttttttttgttccggataaattctcatgttctccgtgacaggataaagttcatgcattcttctctgttatcattggtgttattgtaatctaattatataatttcataccaaatgcatgtaaactaaaccatgccaatcaaaaatgggatcaaatagtattcgagatagtcaactttgatggcattataaggttaccatataatagtaggacaatttaactgcaaaatcgaaccaattatatgttttaaaaaaaattcctctgcaaaaaagtcaaaatctatatcttagaaggtagaaacgtcctaaaacgaaaacgtagacgtactcatttttatgtaatttgaaaggataaaagtagtagaattcggaaaagaatggggacaagcaaataggtgggatgataaagattttgattttattgaatataatatagtatgcttttaaaatgggtaggtattgttgggaatgcagatcccaattttatctattttggtttttgtatactttttttatatatatatcttattgatctttctattctttttgggttttgttgattttcggtattttggtgcattctttgactactcgcatctagtctcttgtgctatgttaaatgtactcatttataatttcccggtgcacctcacacgacatatgaaaaacaaaaccataatataagataatgttttcatttcgatgatatggatatcagaatatttcctcctttcgtttatagatttgtaatttgtaaagtatcacgtacaataccactaatatgcatccatatacgatcatatcagtatatatatatatatataatatgtatacattgttttggttcttggtaaacagacaaatatcaatgattcaacagatctagttgttagaattttaatcaacggatatatcatcagaaaagaaaaattatgttcaaactaacgtcttttgttaatttagtcctataggtttacataattatatatgtttagttatacattttgataaatgttgtaccatttttatttaaattatgatcaaattgttaatttgaaaatataatttttaaaatggtataattcacatggccttattgtgggaaaagaaaaagttgggttgaaagatcactattcaatgggcacataacctatattgtcagcccacaaataggcccactatattataggttaccgttggggatttttttttttgttagagatgaaaactctcagaaattttaaaattttccaaaacattaaacccacgtgaaaaattcatattccaaaaccaaatgtgtagatcactgttgcaaaaaaaaaacaaatctcgttttccacaactccaagtatattccaaatctacaatacggtccattctaacattataaatagagttatacgtacataaataattgcattcgtacaatattctagtactatactaacacaaaatcgaatcaacatg

SEQ ID NO: 2053 - DNA, 3000 bp, Unknown
  misc_feature (1)..( 3000): cDNA_ID_2149290_gDNA_ID_1620482_Annot_ID_158373 3000 nt of promoter + ATG
cagggacattactatcaacaggttctaaaacatcactaaccgaaacggatttagctgaagcgtggatgaatttgacacctgagccatcacaatcgacgtaaaacgacgccgttccagcatcttcgttctcgaccttgacaagacgaccagcgaatgggtagaagatcttcaaagcgacagagagagatgatttcaactgagagattatatgggtttccgggtcgggttgaggaaagagaagacctctttgtgggtattcggatcgaagaaagaagagatcccatggagtgagatggatcttaacccgatccgattcctcgttgtagctctctggtcgaacaatgctcttagagatcactactacttcatctgccattttcttttctcgagtagatagatgctgataaaattcactagtccactactagtggagtgtataatttctttatctttatattttctgtttttggaatcaaattcagacatgacataccaaactagtgaactacaacgtgtttcatgttatttatttggttatatagttaagcccattaattgtccctagcccctaggcccattatcaacctatcgtcgaagtttgatggaattttttacagagctcgacggaatgttgcaaccccagcggcgagtgtttccgattccgttcaggtacgttactatatatataagaatctctaaattcgttgaattatccgaatctgtttgttcatggtgatgttgtgaaccgaacacgaaagaattgcataggcttattattgtattaatttgaaaaacgagagagaattggtgtttggcttagttaaattcacattgctaaaccaaatcatctcatacaatgcttacatattcgttaaattcagcatctttgactaatttttccactacctgaggcagtaaacaagcctgaaaatcaagacttgcttctccaattcctttgaaaacaacgagtcttccattgagatacggtggtccagctcttgcagctatcggtttaccccaaccgaaatcattacagtacacatcgaaccggtgagagtttgtgacaactaaatctttgctaccaacagaaaccggaatcttgatatttttcacccaattctctgcaaatgctttggctttttcatcagtttgtgacagctccatgttgttgatttgcattgcagcccagcctagtccatggtccagcagctctccaaccgtgaccgtagctatcccggtttggcttacattcccaaaacactcttcttctagtggcggatttagccgttgcctcatgtttataggtaacctgcaatgagtctcttcctctcggctcatgccactgtgtttaaccattgaacgccatatatatgctaacaccgcttgaatagaagagatcttttgatcagcctcgtcgttggctttagcgtcaagtttcaaaacattctcttttgtaacatgaaacatcttctcttgtagattggttggtgttgttacataactagttggttttgtttcagggtctggaatatggattggataatcaatctcgtcaaagaaccaacctttaaggtgaagacgacgttggaaagtttgggatcctgaagaatctttcgagcaaatctctgaccatgcattgatgaacttccagattgaagtggcatcagccacggtagagttgtaaccaaaaccgatgaaaaccccgtccttcatctctgtcacttgaaccataagtagagatcttgagacaccgtggtagttcttgatccccgttgcagggaaaaaggaagcgaaaaacccggggacagaaccggataactcaaggacatcactgagctcgatgtttttagccactgcgtgaacaaactccacacctgaaccatcgcagctgatgaaaaacgagacagtatcgtcgtcgttctttagcttcacaagacgaccagctaaaggatagaaacgatcaagtgcaacagagagtgaagcttgtaattgtttgacttcaattttgtgaaagagaagacctctttgaagataaccaaaacgaaggcgagagagatcccatggagtcagctgaatcttcttcacagaagtcggtttcttaaggcttctgggattaactatgctcttcgagattaccaccaattcttcttccatcgttttacctttttcttaatcagtgaggttttgggttacgtgaggttttcaaatgagtacatatattgaaagcactaattaaaaaaagaccaagatccaagaaacaagttacatcacactttaataatgtttgtgactctgtgtggcctgagttgtttttcattatttgctttgtcattttgtgaaatttccacgtgtataacaacaaactttaagaatatgttaggaaagtgaataaagaatctctatgattggtcgtatttagcatgacttaatcttttttttttgttaaagtatgactatatcattaacaaaaaagaagaaaaaatgactttatctttcgttgatgtagacgtacgagtaataatgtatgtcaataaatttaacaattataaagcagtctttatttagtgtagaatacgaacagagcgatacatggatcattatcaaagtttaaagttaaactggtgttaccgacttaccgttaccatatatctcaatacatggatatatatttcttataatataaatagataagtgtgtgaaattattttcttaaaaagataaataatcataactacagtattataaatacacaaattaagaaatatgtaacgtgtttaatccttggtttgatcagaacttttaattatccgatgtgtataaattttgaagaagggcctatagttttgtttcttgatgggccaaatcaggcccaataatgtcgtacatggttgttcttcatgtaccggagattcggcggcgacgaaaccgtcctcattgcgccgccgcaactacccgacaaacaactagctttcgtattacttccttgtatctgatttgata

SEQ ID NO: 2054 - DNA, 3000 bp, Unknown
  misc_feature (1)..( 3000): cDNA_ID_2149310_gDNA_ID_1620482_Annot_ID_158379 3000 nt of promoter + ATG
tttcaggacctgaaactatctaaagaaaatcgatataataagcatctgttgtctttttctttcaggagaaaggtggtttggcacaaaaaatggttgcgtttaagctgagttcaggatcaggagcttgtttatacgttcgtaaaatggttcaagatgaatctgaggagaccaaagaggcaaatgcaaaccattgtgaggatgatcatttaaaagaaatggaagaactgaaggaaaaactcaaagctatggagttcgcaatcagctgcgaaggtcattcaaaagaaattgaagaactgaagcagaagctcaatgccaaggaacatcagatacaggctcaggataagattatagccaacctcaaaatgaaactggagaagaaacagtcaaagtctcggtcatgatttaacagaaatcaaccatggctcaagttagggagttcactgcacctgtttttgttgtctgaaatttttgctgttttaaggttaagagaagtcaggagactatgttgtcttccaagttttgttttagagctaagtatcgatttgaagaacttaaaacatctcatatgatttttgtactgtatacaatgaagctaatgcacacaaaacaattttccgatatttacggtgaaaaagaatatgaaatgaaactcgatctatctatagaagcttcttcagctagttgctgacactttgacaccatcgaaagctttaggttcttgtttctccttatagctcttgctcttcgacactcttggcttagagttgctttttgcctctttgatcgccgccgctgggagctctgaggaagagtctggccagggtgtccgctttgatggcactgtgatttctaaaggtgactttatgatccagctgcgttcatacaatacaagttagaagactgcaactcagcaagtgataatgtgatgagaaatttgctttccatcagagagaatgattaaagaaaactaacccaggtgggaatttgctatcagctcgagcttcaactcgaagccaccaaagcaagacacgacggccacagcttccaagtggctccaccatggaaggatccttcaccaaagacaaaggactctcaatttccgcataaccatcatccaacaagctgagatctttaacccatgctggtttatcatctaaagattccttccagagcaatctagaattcaacacaaaccctgaccattccatcttactaggcatcacaggcgctttctcatcgatatacactgcagtcttcttggcataaggctgtgtgttgaaaatgtgccaacccactaatttctcagaggaattacaactaggaccttggattggcattgaaggtttctctttgttcttcccttgttcattcttcaagatcgatgataattcatctgcattaccagaatgagcaagtataccaacagatagagcaccaaaccatttcacagtttgaatctcatcaaaaagctccatactatgcatattgctatcatcagcaaacataacaatcccatctaacttcttctctctcacaactctgatgagcaaacatcaacacaagaacaataaatttcaagtcaaataagaatcaatcaatcaaaacagcaaaacaaaatgtgaatcaaagatttaacctcaaggcgtgaagtctcattttggtctccaatttgtgacgatcttcccatgtattaggcattttctgatcgaatcctaagtgaatcgtctttaatcctgattttgcgataaacgaagcagtctcgttagtgattccaccagcttccacaacgatccaaaccaaatcgtacggaacaagcataagcgagtgcataactccggtcaaatgaagcgcctgaaaagtccgtacataagtcggcgtcaccacaatcacagtcctagggctcctcacaccgtacatcgatttctgctctttctgtactctcacaagcaactgatgagctctcaatacctcaatcggattcgggtgaggccatggacggatccggatcccgtgtcttccaaccaccactcgagagttcttcttcaccgtgctgttagtcgctgtttccagaggttttagccggagaagctggcttacaccgccgtttccggcaaagagaaatggcgttgtgtatagattggtgacggaagtcgagaaaaggaagaagagtactaaatggctgaatcggaaccctagaatcaagctgatcaagcagcagagaccatgaatcacgaaccaaaacacagacgacggagatttgccatcgaatgatggatccaacgacggcgatgatctgaaactacttcctcgacggttccaatagctcaatcgaaacacagagagcttcatcgtcttcttcttcttccttcttctcaacagtgagcgaacgaaaccataaaagagggaaaaaaatgtctgttaagataaattaattacttaacaattacggtttaataaataatttaatatggttaccacccttctgctggtacaacggacatattggaaatcgaaaagaaatagcgttaggagttacacgtggcgagatattagtgagaggttgaggcgtttattatgtcgtgaatttggactggagtgatgattaaggaggagatttgggtaaagcacgtgtataatagagtaagacgtgacattaactaatgattggtgcttatttacgtcagcagtcaacgcaagaataatagtcgtacgatttgggttaccatcttctctttatttctaagcaaaggctttaataagcaagcacacaactttatacaaatgcatataaagcccatcctttaacttaaatacattaagcccactaaagcccaaaaactgtcaaggaaaattacaaaactttgaagcgactcacttcgacccctaatttatggcggcggcgatgatttcgtcttccgtcgtcagctcatgaaactaaatctctcgaatctcagatttctacgtacccgaaaatcgttaatctcccagacgcgagcaatg

SEQ ID NO: 2055 - DNA, 3000 bp, Unknown
  misc_feature (1)..( 3000): cDNA_ID_2149314_gDNA_ID_1620482_Annot_ID_158380 3000 nt of promoter + ATG
tcgatgttcagtacacgaccaaagctcgtgaggcgcgtgagcttgtgtcggcggttaaagaagcggcgaggaacgagtgtcgtccagtgcagaatcttctcttttcagattgtaaattaggactcaatgatttgccgaatcatgtatacgatgttgattgggatgtgatcttagttgatggaccacgtggcgacggtggagatgtaccggggaggatgtcgtcgattttcacggcggcggttcttgctcggagtaaaaaaggcgggaatccgaagacgcatgtgtttgttcatgattattacagagatgttgagagactttgtggggatgagtttctttgccgggagaatcttgtggaatctaatgatctgcttgcgcactacgtgttggagaagatggataaaaacagcacgcagttctgtcgtggtcgtaagaagaaacgctctgtttcttctccatcggcttgagttaaatgtgcgctaaaatcttgtggactgtggagagtcaaaccaaccgacacgacggtggtcattgacaccgtcaatcgcggaaggagtttgtgtaaaataatacgtttttctacctttaaatattttttcctgctttttaaactatgtgaaaattcaatcagatcaattaaaatttcaaaatatctcttcgaggtacaacaattcgtttaaaataccactatagtatttggatactgatgatttggtgttacaacataaatgataaaacccaatgaatcaagaacgtatagtttcaactctctaaaccctttgtggagagtcttgtggagtcagagtatctatcttctttttcttgtagagtggaactcttcctccaagctctcttagctgatccacaagtccgtatagaaactcaaacgtcaatatgttttgagcattaagttgctctctaacttgtggatgaattctaaaccattctcccaacatcttatgaacgtgagatcgaatcatcctccatggaaccggatgcttctcacacagctttaaatactcaacaactaaatctccctggtctaaccctccatcgacgaatccctcttcttcgttatcttttgcccattcagctgttctaaacccagcaaaggccgccgggttttcaagaagcgtctccgcagagagaacaccttcaacacccgtctctttgatgcagttatcgacatcttcgatgcatcttacattcccattcgctaagacagggattctcatagcgtttttcacttccttgattgcgctccaatcagctctaaatttcttcccgtctttctcatctcttgttcgcccgtgaacagctaggagcgagcaaccagcatcttctagcatcttggcgtacttgagtgtatcttccaggttcgggaagatccggattttacaggagacaggaacattgaggttctgagctaacttttcaacaagtgatttcaccaaaggaagattatccatcaagaatgcaccataatttcctcgcctcgctatacgctgaggacacctgaaaccaaaatcccccaaacattcttactcaatcaccaaattacaagcggtcactgtgctcattcggtacccaaatcactaaatccaaactatgatttaatatgaatattatagcccatgtgtcaaactactaaagctcattgaactctatcgttcccagaaacttggaactcaaatcattgcattctatcttagttatcagagttcacgaacttaaaacagtgaagtcataaaggttcgatcttaattgaagaaccctaacatacaagatgtgaaaagagggaaatgtacttaccctaaattgatatcaacatagtcgcagtaaggttcgactctctttgcagcttccaataacgtatcaggatcattagcacagaactgcacaaacaatggcctgtcctcctacaatttcaaaatctaatcaaaaccttaaattcaaaactgataaatctctgagaaacgccaaaatcaaatgaaatcttaccttacaggtggtgaactcctgatttctatacttctcagtctcggtgaagatcctagaatgcaacatcggagtataagcagcctgagctccgtatttctggcagagcaatctaaacggaagctcagagttatcaaccattggagcaacgatatacttgggtctacccagttttttccagtgtgcccaagctctctctactctagtatcaatgcttaagacccgacttggagagcccaagctcgccggcgctgtgtcgactgtttcctcaatctgcccatcacgctgctccgaacagaggatatcgtctagaacctgcgatggatcaggttttggatccggattttgagtcattgctcgcgtctgggagattaacgattttcgggtacgtagaaatctgagattcgagagatttagtttcatgagctgacgacggaagacgaaatcatcgccgccgccataaattaggggtcgaagtgagtcgcttcaaagttttgtaattttccttgacagtttttgggctttagtgggcttaatgtatttaagttaaaggatgggctttatatgcatttgtataaagttgtgtgcttgcttattaaagcctttgcttagaaataaagagaagatggtaacccaaatcgtacgactattattcttgcgttgactgctgacgtaaataagcaccaatcattagttaatgtcacgtcttactctattatacacgtgctttacccaaatctcctccttaatcatcactccagtccaaattcacgacataataaacgcctcaacctctcactaatatctcgccacgtgtaactcctaacgctatttcttttcgatttccaatatgtccgttgtaccagcagaagggtggtaaccatattaaattatttattaaaccgtaattgttaagtaattaatttatcttaacagacatttttttccctcttttatggtttcgttcgctcactgttgagaagaaggaagaagaagaagacg

SEQ ID NO: 2056 - DNA, 3000 bp, Unknown
  misc_feature (1)..( 3000): cDNA_ID_3065750_gDNA_ID_1620482_Annot_ID_158381 3000 nt of promoter + ATG
agttaaaaattattaattattttcttaaagttctaagtttaaaaccttttagtgaaaattattattatttaaaaaaatgagtttaagtgtcaaatcttatattacgagaaaacattgcctaactccgaacaccgcaaaacttacagaacaattaaggatgggaagcctaggcgcgattagtttccaacgtttttaaattttaacatttgaactaattttaaaagtaataatgaaattaacatggttttagttaaaactaaataattattttcttaaagtttttagtgaaaatcattattatttttttaaatgagtttaagtgtcaaatctatattacgtgaaaacattgccaaacttcgaacaccgcaagacttacggaccaattaaggacgggatgcctaggcgcggttagtttccgacgtttttaaattttaacacttgaactaatttttaaaagtaataatgaaattaacatggtcttagttcaaaattattaattatgtacttaaagtttaagttttatttttttttgtgatttttattttattttttaaaatgagtttaagtgtcaaatctatattacgtgaaaatattgccaaacttcaaatactgtaagacttacaaaccaaataaaggacgggatgcccagacgcggttagtttccgacgtttttaaatttaaacacttgaactaatttttaaaagtaataatgaaattaacatggtcttagttcaaaattattaattatgtagttaaagtttaagttttaatttttttttgtgattttttattttattttttaaaatgagtttaagtgtcaaaactatattacgtgaaaatatttccaaactttaaatactgtaagacttacaaaccaaataaaggatgagatgcatattaaactaatttttaatagtaatagtgaaattaagatgattttagttaaaaattattaactattttctttaagttgaagttttaattatttttttagtgaaaatcattattatttcttcaaaatgagtttaagtgtcaaatcaatattacgtgaaaacattgccgaacttcgaacaccgcatgacttacggaccaattaaggacgggatgcctaggcacggttaatttccgacgttttaaaaatttaacacttaaactaatttttaataaataataatgaaattaacatggttttatatagtaagttttatttctctaaatgtattagtgaaagatttaaactatttaattatagttttactaaaaagattttttaaaaaaagaatgaataaagaaatacctggttggatttggtagcaaagaaagggcccatataaaaaagcccaccagcgtgagcccaccttgcgtcgttgttggaaactcgtctgaaattctccgtcttcttcattcgtaatctgagaagcttctttgtctttgatgattggtttcttcctccagcatcgtcgtcaatggaaacgagaatcctttgatctctcctctcagtcgtctctctctgtcgccatctccgccgtcgggctatggtcgtcgtcaatggaaacgagaattcgaagcccaccgtgtcgtactctgagaagtttcttttcgtctttgatcaaaagttgatcgtctctcatctctttgtctctcgtagttggattctttgattgggggttttctttctcgtagatggattctttgattgggatttcttcctcatgttagaagaagaagaagaagaagaagaagaagaagaagaagaagaagaagagcgtgatatatatttataagcaaacaaggttctcttgggttatttccttttttcttaaacagagtatctttgcttcactaaatgatgatttgatattaatctacccgttgggatttttcactatttctaataataagagatctaaattagatccgatttccatttactaatttcaatctaaccaataaggaaatttcgattggttgtttccttttttcgatgactttggtttgttttccattcgttgatataacgtttacaaagactcatcttttttttgctcacaaaatttaatatcaaaagataaggagaacttggtgaatgatgaccaattaataaggtggagatttttcaactccattactagttttattctaattggtttgtatacaaaacagatatgttgtggtggttacttcaagcaatcttggtttgtggagcagaagccagattctacaggacacttcgttgatatcatcaggctaccaatgctggcaaaagtgtttttggtaaaactgataatgcagtgcaaggattggcattgcttcttcttatatgagagattctgtgagcgtgtgtggcatttgatgtatcatgttgttaagagtgtttttgtttggttatgttcttttgttggtctatatgtaaatcacaaaaagaaacagatacatagttacaacttgtacaagtaagcaacagaaacaacaattaatgaggaggtcatcgaatgcatcgataccttgaacacataaatttttaggaacatatgatgagatctcagccaaaaggggtttcaatacactctaaaatatcatacattacaaattttacttaatattgaaccaacaaaataaacatttcagaattgagaaaaaatagtaaagacatagattttgttctagatgaatcagagataaatacactaggagtggtctcaaagacttcttcaatgtgttaaacggaccaatgaggaggcttatattagcaataaaccttcaaaccaaaaacattagtaaaattaaaaatctgaaattttatcaaacaaagtaagattaaataggaggacaaaacagtaattaaaacataagcttcccgaactaaaattattaaacaagaaataaaaaagaataaaaccctaaatttcgattgtccgtcttccccaactctcctttctccaactcgccgcctctttcaactcacagaaccaccgtccgtcaaaaaaactcttggtaatg

SEQ ID NO: 2057 - DNA, 3000 bp, Unknown
  misc_feature (1)..( 3000): cDNA_ID_1011058_gDNA_ID_1620482_Annot_ID_158374 3000 nt of promoter + ATG
attggtcgaatatataaaaaaacagtttatttatagaaagtttctcgaataagaatataaatatatcggctttagtgcacccatcagtttcttgaattccaattcgagacaaaaaaagttttttacaactactagctccgaatcatagcttctagtcagatgacgatgcccggagtcgtattttatttatttcagcgattaaggagattattaaaatatttatggttgaaaattatttgaaacgaaatttgttaaatcttataatcttgctcggagaattatgcaagtatactgtatacatatatacacaactatcaactacagtgatataaaaaagacattatgatgattcgaacagtggctgtgttagtacttgtaaatttgaaagaggtagatacgtagcatgtttttattcacgtgagtcacgtgagttgtggagagatcaagcttccgtgatcttaatgaaaagtggagcccataatttcaactgtctagattcaccgacagtacgaggatgattttatcgaccgtccgatgtttccaagctgtcatcgtatttttatttttttttacaaaacatcagtaataataataagattttctagtttgagatgattgtgccgacacacttttggtgttatgtgtctctcaatattttaaagtttgtacgcattcctaattatattcactagtcaaaagtttcatacagcccacgtttatcatgtacttaattttaaacagtctttaaaccagattagtttaattcatttaaatagtaattacgttgtttagtcagaaactggattatagatcatgataaggttgaataagatgtggacaagcacaaacctatttgaaaacgtcgttattcacattattacgcgtgttacttttgttaaaatgtgagtctttcgaagtttgaaattggattttgataatatatgtgaagaagtataaaatatatgaattctaaaaccaataatccatcataaatactgaacatacacatatatcctagatttgatttctatagattcgctattgaataaaaatatatggtacatgcatgctaatcactgattaatactttggtaacaatatatcttcttgtggcatcttcaaattggttggattccatgataggggaaaaaagctatctacaatcaaaaagaaaaacgccatccgatatgatttgttagcgagacaaatgtggggctaagattgccattatgggaaatgtggggctaagattgccattatgggagtcgatatatgcgtagagagaaagagggagagggagtttttgtaattactacttagggaaagaaacagagagcatcaaagcatcgtcatagttccattaggggaaggtttggctttttcctcccccacttgtaatattattctttcacgctttggatctccttttacccacacctattctttgctttagtaactactaaacacgtatttagaaatatgcgttttgaaattttttaaatacaaaaaattctgtgtgtcaatatagacaattttattcgttctttttttttttgggtcagcagacgctactaattaaacttgaacttgtctcaagagaaacatgcaagtataagtacgattctgaaaagaaaatgatccactacaaaaaaaataagtataactatatcagtatcaagattctgttaacatcattataaaaaaagtaaagtaaaacaatagttgcatacttgcatgatgaatgattaaccagagttatgattatctttttataaacgataaccaactgttgcaataatttttcattgctgatttcaaataaaacattactttaacgatatgggggaatttttaagaaacagtagagacgttaataaaaatcccatatgcgagaaatctcaaaaaggttatatgtcgaatacattttcaaattcatctattttttttctttctaattttcttaattttttaaataaaatgtcgatgtatatgaacataataaaaaatggagagacaggatgattattctttctgagttgatgtaaataccttaagtaaatgtgaaaacaatgattaaaaatcaaaatgtgaagggagagtgagtacacgcgcgtataacaagagagtgaaggtgtaatcaaagcaatggaaagagagaaaaagctgtttcccgtactcttggataggggcattttaggtattacttcgttttttttcttttcccatcacattatttccgtttccttttcttctcctacgaaactcttttacacggatttgttcatcctgttttttgtttttgtttttacacatttgtaattttctatattcaacaaatatacagggaattacatttttaaaaaagtttcgctccactaaacaaacataaaattttgtttgtagataacaacatgattatgttgttgatgttgaaaataatcatatgctgctgaattgatgtcccaatttgttttcggagaagaaagaaagatataaattatagtcctaaaatgataaattgtgagtagttggagtaggagaaattaaataggacaataaataaaaaataaagatactcccatctacatcctacattttagtccataataatttcagcaaacttttgaatttctgaatttacttgccctttttatataaaagaaaaatgtgatgtcaatactcaggagaccaaaaactaggagacagtctaatacacttgtattgggaaagaatcaattttcaaaatgaatttcttcataaatatttttttttcctttgactcctttcattgataaaaaaaaatcctgcacctctctaatgatgaatacttgaatagagtcagatatttattctattaaataatttagttatttatttagaacctacctttatttgctttgatggttattctcatctgagttttcttcttctctcttatttctctcccaagtttcttattttttttcctctttactttacacaaaggaacaacaaataatg

SEQ ID NO: 2058 - DNA, 3000 bp, Unknown
  misc_feature (1)..( 3000): cDNA_ID_2149274_gDNA_ID_1620482_Annot_ID_158364 3000 nt of promoter + ATG
tcgattatctttctccatgaatgtgaataaagatcgtatattcagacataatcacacggaataagagaataagtttaaccaaagaagaaaaaaaacaaatcttttgcaaagtaaagatcaagactcttggacaaggctcgtggccaccacagaacagctcacttcaaactcagcttcatcttcatcaacccaactcaccaatccataaaccacgttctcttgtaaccctcttggactctccaatctcacagtgtagcttagcttctcgtttttctcgctgaacattagtttctttggctctacgacgacgtttagacccttcaagcctctcactctcacgatgtagcttctctttgcttctcccacgtttgtcaatgtcctcttaaagatcttgggactgctttgatcagacgtgaagtaggcaatgattgaagggtaattgagatatggagatggctttttacaagcgtcggagatattcgatctcgtgatgatattgatcaattttcttgattgttttgcctcgtgacaaaggaagtttatgaaatcttgtggagttgtatcatagattaggccagggtttaagactttgttcgtactcacatgccctgctccaacggctaatgggttgtctaaagtcaaagccgttgtcataattgcagattttatagccgatggactccaatttggatggacttgctttataagcgcagcgactccagctacatgaggtgcagccattgatgtcccggttaagagattgaatccgctgaataacggtagtgctcgagttccggtgatttgctcaaccgacggccaagcagagagtataagtgtcccaggagctagaatgtctggtttcaggatttgagggaagcttgtgaatggaccccttgagctgtatgtgccaacttctggcgctggttttgtcccgattaccgttttacgaaactccagctttgcggtcgcgttgtttttgttgcttgatgcgtagctttcaatagtttctcggtgttttgagccgatgaatgctactggaaactggaattttattgtgtcttgctcctcaagtaacttatctgttattaaaactactgctgcagctccggtggatctgatttgatgaagtttgctaccgatgtttatgttttcgttacagacaacaattctgtttgcgagagtcttgttttcaacgctgccagattcgatgtaagttactggaaactgaaccgaagggaactctccaggaaacagagatggaaaactgaaactaactctgtttccaaacgttagggttccttgaaattgcctaccaattgttcccgctccaaccgtcataatccacggcgctccgttaatcaaactccagtaatatggcccgtcgttaccgccggaagtaaccacgaaaacgcctttttgaatcgctgcaaaagatgcgactgcgattggatcattttctagaccgaaaccatcattgtcgtcatcatcctcaaaactcaatcctagcgacagagatatcacatggactccatctcgaatcgcttgatcaatcgctgcgattacatctgatgagtaaatcccttcttcccacgcggctttgtagattgctagatgcgcgtgtggtgcgattcctgaggcggttccttgggcgtaagagaagtaagacgcgttcttaacatgattcccagctgcaatggctgcaacatgagtgccgtgtccgattgtatcgtacggtgaagagtattggccaatcttggtttctctcaaatcagggttgttggcgaacaaacccttgttgaataccttagcaccgattagtttcttgttgcacaaggaagaagaattgaattcacatgctcctttccatttagacggaaccgaaccaaccccatcgtcgtgaaagctgggactatcgggccaaattccggtatctataataccgattactataccagctccataattcgagaccggccatgtaccggatgtcgaatttaaaccgataaactttggagagaaagtggtatgaagcttaaccggtaaatctttggtgaacgagacatacccgggtttgtgtttaagacgttggagctcagagttggtgagaaccgcgctaaacccgtgaaccgaatcggtataagcgtagataatctttggttttctattggttataactgaagtaagagttgtggaaaaccagctccgatgatcggaaaatggcaacggtttagcggataagtccatgtggatgatgtaaggagaggtctccgccgttacaatcgctacgaaaaatgagaacaccagaataattacgacggtcatccccatgtctgagcaagtttttttctctggtctcttcaaagtgaaatgaattttggtgttagtaagaaacaattatagtgttgttgttaatagatgtttagtttttattatgacaaaaaagttgcagagaatgtaacctttacttggcttttgcttttgttaaagtggttttaggtggtcggcaacacatcatctctcatcattgtttttttttcttttctctttcaattgggctttatcatagagaacaatgattttggatatgaacttattagtagtttcagcaatagtttagactttcgaatcggtaaatatcagtaacttagaactcaggctgaaactttgattcttttactgtatttagctagattctacacttggtggactccatcagcaattacttcacagaccgaggtagctcctacaactctctgatgcttgatctcgttcaaatagatgtctcataattgcttcttttttgtttttgtttttgggctttattaaagaggagtaaggcccattaagagaacccgtttgtttgttggattcggatttggcaaatggatagcgccaaaatcgtgtcgattttcccgccatctccatttcttaatctgggttcttaaacctaaatcagttactcagcttcaccaaaccaccaaattgaccggatttgtaaaa

SEQ ID NO: 2059 - DNA, 3000 bp, Unknown
  misc_feature (1)..( 3000): cDNA_ID_3065785_gDNA_ID_1620483_Annot_ID_158394 3000 nt of promoter + ATG
ctgagcaaccagagagatcaagaactttgagaaattctaaattagccatgtttggcagacttcgcaaacaagatccatgtgcattcaagatttctagactttgaggaagttgtggcacttctcttattgcagtgccaccaagatataactgtttcagaaaacgagggaaaccctgaatagaattaagacttgagcaacccgagagatcaagaacattaagatctaaattagccatgtttggcagactctgcaaacaagagcaatctttcagctccaagcaaataagcttcccaagatcttgacaagatgagttagattccagcagacttgttaaacgctcaagttcctctgaaagacccggaatttctgttagaaaattcacaagctctctatggtttggcttaacagtggaaactggtaatgctaatatgccagttccctgtagatgtagtttctcaatatttggtggaatttctaggacacttttaatctttatgcaacctgagagatttacaactcgtagacgtagcaatcgacctgcggctgggaaattctgcagtctcgtacaaccttggagatcaattacctcaagattttcagcttttaagagatcatcgatatcaactagatggtgggaatggcaaagcctgatcgtcctcaacatctccaggttctgagaagacaaaaaaaaagcaagctaaatgaataacaacaaaatttgtcaagtaatgataagggtgaacgacgcatatcagagattgcttaccttggttccaccccaaagtttctgaagttgactatacggcatgttgatttcgacaaggtgccttggatcaaaattctgaggcaaagatttcagaggatagttctcccaatggaggagtcttagctcattaggaagagaatgcagagagcctgttgggaaattgattacaggatggacttcaggattggaacaataaattttgagcaatctaaggttcaacatattcttaaaggcagagggctgcagatcaaatcttaagtttgatgtgtctagaaacaggccttcgatctcttcagagccctgaaaatattggaagtggatatattaggccgttggctcataaagtagaaaaaatatgaaactatcaaaatataacaaacctgagcacgtttgaaggttgttttaggttctccatttgctttgtgttcattatattctaataaatatttgatgctccaaggttcccacagtcttctgcgcctctcgatctgtactgtttctccatttatgatttctcggccgatatcctgggtcagcttatgcaaccaaactcggttttctgaaatagttaccagacacttgtcaacaaggacatcaatttcaacatgtggaaagaaaccacaaccctcaagcagttgtatcacgtagttgacattttctccctggaagaaacaagctatgtccaaaaaaatgttcttttcgttgtcactgagtgtgtcataggtgcttttaaatgcatcgacaatcttaaatggaggacgtcgcttgagtttgaggaatgcagtctccatttctgagagttttttcttacctttcagctctcttccataaacactgatagctaacgggtttccattagcataatttattactctcactgacaactcctggagattctgctctcccatatcctcctttatagacgcagacagcaagaaaagttgacgagcctctttctcatttaaaccctggacctcatatatttgattgattccgcaaaggcaaaacacttgtttatctctagaggttatgatgatcaggcttccgggtcctagccagtcaaacccctcgagaaaggactccccaaccagagcattgcgcacgtcatcgagaacaacaagaactctcttactgttcaatctgtctctgagcgagctcagtttcataatggttgcatcattgcccggcaaaagttgttcctccagcaaacaataaagacccttctcatgaattgatttgtcatagtcttcgataaaacaagaagcatcaaaggcgctagacatttggtcaaagactgctttagcaagtgttgtctttcctatgccaggcataccccaaattccaacacaacggatgcctatcggttgcttgttaaccatgttttcaatctccagcagcttcgaatagattccaattcgtccaacataaaagtgcgtctcgtacacatctctcacaatctcttctacaagtatagagtcactacattccttcctgcaccatatttcatcaaatattgaaaacactacactagccatccaaaaagttttaccaattttcaacataaggaaaaaaaaagcagagagtagaataaagcgaaaacctggattggtgaattcgtgataagcctctgaaatccagctcgctaagccattggtcccgtaatagactgtcaccgtacaacactgaaaccaccgcctggtccttgttgttcctttggcactcgagaaccttggcgaacttgtcaagccatacctcggaaggatcacagtttccgggtaaaaccatcacagaaaccccagctttctcgatctttgcctgagactccttgaaaagcagatcatcgatatctacatctacgaccacattatttatgccttttcgacggagagcttcagagaggtggctcacgaaagagtaccgtacctcttctacgcagctgatgcacacgaattcctcatccttttcacaattggtcatgatttcgcgctttgatactttgaactaacctttgatttcgccggaatttttgtttatgccgacgatgctttttcattggacattcaaccactcaaatctcagttgtttttttacatttgatatttttccaacagcaaaaaataacaaaaaggtatttaaaaaaagagaaaagaatagtcaacaatacattcttgctactctaacgcacaccagtgaggaaaagtccaagtacaccgggaaaaagcttttgggccatg

SEQ ID NO: 2060 - DNA, 3000 bp, Unknown
  misc_feature (1)..( 3000): cDNA_ID_3065766_gDNA_ID_1620483_Annot_ID_158407 3000 nt of promoter + ATG
ccaaaaacctaatgaaaaagttgcattcaaatattctaataatttttttaattgtgtagttttaaaaaaataatataaatgcaacggaatatcaaaagctcatgtttactttctttctttctttctttctttgtgtaccttgcgctacaattgtttttgctcaaacacaaacaaagtattactttaaatgcaacgcaaattgtgctttgtcgtgaaacaaacacataagcgggttcccttacttttttacgacaacacacttgtaacacttacgtacaattaatgaagagaatactaaatgtcatcaatcatgttttcactttttaattttttatgtatatccaacatacataatactttttttttttttgggcacatccaacatacataatacatatagatttatatccggataaattctggatggaaaataaaacaaataattaaagtgtcattccaaagctgctagatcacaacatttggcttaaagcatgtacttgtattgtaatgtaccgtaaacaaattatattaattttatgaagtgtataatgtatcaactaaattgtcactttgaatatattctctatattaatacgatacaattaataataccagcatgattgcacatttgcacgccattcttgatagataaattccgtttgacaatcatataatataattaagtatctatatactataatacaaaatttaatttgatgaagaagtcgtaccacggcactgctacgtacaatgagcagcaagaggcgagatcttatgccgcgtaacgatgcaacttacatatttattcaaccgcgtatatatgtttcttgttgaaagacattaaatttggaatcgttctatgattaatttccccaactatatagtcactgaatacttttcaaatttaagatttttgtatttattaaattatggggagatgtggatgtttcttgaatatgaaaagtcacatatatattcttatcttcaaaaagatttatatggaggccacaaccttgataagacaaatgtcactaaactatgtgttgatcataagtttgtcgatctctgaccgattttgactgcctcaacattaattttcttgggtcaaagtgtatagttgtattgtgttcgtttgcgcttcgttaaagtgaaaatatgttatctttaacttctggatccattataaatattatcactattagattctagataaaagtagaattttctaattaagctataaaaaagttcaagatttacacaatccatgcatatcagattgttccacattaactttacgtactatagttcgtaaattatatgtaatcattttttggggtcaaacttaatatgtaatctatggtggggcacatgattctatatattttaggtgaaatagttgttaaaattaatatgtactacttaatgtattaattttacaagatgtttggtgatagttagacttctctaacttccaaaattaataaggacgtagacaaataagtattcaagtctttggtcctagatccctcaagaaattttatgtttttatttcacaggcagaaagtcaatttgtattatatagatacaaaacaaaagtcaatgaatattaaaactcttatcaaaactataatacttatttcatcaataatttttgtaagttaaacctacttctatgatttgaaaaatgaaagtcacgtttagcaaaagaagaaaaatgaaagtcaagttttatttttatatgtaatctgattaagttctaagcacatatataggttttgatttttgttggggtcaaccacataggttttgattaattcgtataagctactaataaagtaataatatatggctgtaatgcagggcgaacgtgggagagaaattagtatctatgaataattaagttagtataacaagtgggcttactattactgacatatataatcataagctactagatcataagtaattagtcctgaaaacttggattatctgtcttttgttttcaatgaccacacgtgggttttcccattaccgtttaatcactagtttcagtttttctttagtgcaaaagtaaaatttgttattcaaatgacttattacgcatagaattataccagagaataatttagtatgaaccaagtgaaaaacataagtccttttaacttaagacattttttcagtcaaacaattgtaatcatttgttaaaatgacaaatatatctaatgctatatagtaattatgaatatgtcaaattgtcttcctttagcaacaaaaaaagaaaaagaatgtcaaatagtcatttaaatattaattttaatctttgtaaattcttaaaacttattattaatctttttattttttaacaatggggttttaataatttaaaaactttttagaaaactatttcgttaaaaatacaactctaaatcttattttcaagatactcggacccaaatcatacatacacttatatcatcattcattaatcactattgaatcctaaacagagataaacacaagagtgttggacttggttttaaagaactaatagtataattccatgaagtgtatagcgttccattaacatggcaaaacatctaataaaaaaaaaccgcccattacctcctttcctttgtctatacttaagggccaaaattgcccctttccttgacttaatccataattaattaaagaggcataatttaattaacggtggctaaatttttggtcaaaatctcacacgctccttttttttttttgcatgctcttggacacgtgctctcgtcactctctctcaaattagctggctccaaaaaaggttccttttaggaaactcccttctccaatttgtttcctcatccttctctctcctccactgcctataaaaccaattcatctctcccacttgatttttcatctccaacacaaaaaccaatccattagagagagaactcacaaaacatacttcgaattcccattgtttaaaagacgaagataatg

SEQ ID NO: 2061 - DNA, 3000 bp, Unknown
  misc_feature (1)..( 3000): cDNA_ID_3065770_gDNA_ID_1620483_Annot_ID_158406 3000 nt of promoter + ATG
ttaagagctgctacaatcttatctttcacatttagagaagctgtcgaagatgtcgaatacgaaggtatgtacaaataaacgatatgttagatcaatatgttacatatgaaataagctaaagtcttaataattgtattttactatctttacaggatatttgataccaaagggatggaaagtactgccactattcagaaatattcatcacaatgctgatatattttcggatccggggaaattcgatccgtcgagattcgaagttgcgccgaaaccgaatacattcatgccttttggtagtgggattcattcttgtccaggcaatgagttagctaaacttgaaatctctgttctaatccatcatctcaccactaagtacaggttggtacaccttcaaaatgataatagtccttttgggaattgacattattttgagaagtgttttctgataaggggtgttttggtaatttgcagatggtcaatcgtagggcctagcgatggaattcagtatgggccgttcgctcttcctcagaatggattgcctattgccttggaacgaaaaccatagatgaattacgagaataccatttacctttcttaaattagaaagtgaggaattttttttcttatttaagaggaaaatctaattcttttttataatagaaatgaaaagaaagtagaagaaaaaaatcccaagtgggaccccccaagtgtatataagttttagtttataaaatgtagagaattaaattttcggagaaaaaagagaattagttatataaatgttccatgtgtatgtaacttggttcatgcctctatatctttatttttgtaattttctcaaattgtaaattcctttattacgaatgtaatgactgatggaatgctcatagagaatttcagaattaatcttttaacaaaaaaaaataaaaacaattcagcattagtcatcgttttaagtaacagaacgatatgtttactagactttaactaaaatcaaacgttgaaatttgcagtaatcagtaaattaactactcctgttatccttttttttttgggtcacactacaacaatattactaatctttttgtttatgctattttatgagaaatagttgtaaagtgaggtgctaaaatacgatatgatcgcataatttcccactacttccataactttattgttcttagttacacccttaatcaaatgttttaattttaactgcagtagcataaaaatatgttcgcgatttgatttcttttttagtgatcaggatcttaggttataatatgcagtatgacgtcgcctaatatatcatgtctaatagtttaccattcatttgatttctgatgtaacagtttgattcttacgtaacaaattatcatgagacaataaaaagatatgataactgtaaagaattaaataccttttgacattcaaaaaaagaaaattaaaacatatcgtgaaaagttaaaaaatatcaaatcaaagacaaattttttttgactaaaatatcaatatcaaatcaaagacatttggatctttgagtaaaccaattttgaaattattttataaaataacgtaagaattggtaaaagtcgattccatcttttctacggacgactttgaccatttagtcgtaaattatgtgcccattccgcctatattgattaattactggtgtatgaattttggatcttacatgaagttactgctacggatatgatcgtcagatgactactataattctaattaacattttgtttatttttctttcgagaatacatatttctagtctcctccattggttgctttcataatcatctttatttaccaattatatatttattttacccttttacttaaataaaccaaaaaacaaaatcagaatttgtaacatactgatttagtgaaactgttagattataaccctaattgaatgtcagttgggggttcgtaattagcttaacagatttttgttgtcatctataaatatttgtattctttgactcgaacaaagaactctatcccccagcaaaatcaatgtatttgactcctaaaaaatgttttttttcttccttatagtttctttagttaaagtatcttatcaaccaatattcaacctcatactttcgttattaggtaagaatagtatctttattttgacaaccggaagaatattatctaattcctaaggatagtatccttattaggtgatgagttattaaattttatggttatattgattgcgaagagaaaacagtgtcatagtgcagaagtgactgtacactacaatattaatttgattggttagctgtaatccacggtttaataaaaattagtcggataaattaattgtgattagcgaaggaagaattgaatgaagatacaaaatatccaaatcgagagttcacaagaagacatcaactagaattctataacgaaatcaattagataaacaggttcatcatagaaattcatacaattgcatgttcgaaaatatatttaaagagtaaactctctattataaatagtgtaggggaaaatatcatcaagagtcaagactcgatcgagagaatgttatatgttgttaattttgttttagttgattcaagaggtattactactttttaattattaacatgcatggcacatacatacgaaaataagaaaataaaagactcagaaatatatgtgcctatgtggtttgggcttgatcactatagaactgtatgtgaatttaagagcataggcctaattttggctaaaaaagaagaagaacatgggcctaataaaagcccaaatattatcaaagatggaccaacggcacacagatctccccgcctttatatatcacgacggagataaactcaagccacgacggttctccgagagagagattttttaaaaatcaaattgcaacagaagagagataaaaggaagaaccctaatcgatttcgcgctctgattcgttctactttttccactgattaatctcaaaaaatg

SEQ ID NO: 2062 - DNA, 3000 bp, Unknown
  misc_feature (1)..( 3000): cDNA_ID_3065774_gDNA_ID_1620483_Annot_ID_158400 3000 nt of promoter + ATG
agtaacaaaataaaatctaataaatgtctacacatttcggaaggttagtatgaaactcggattttgaaattctttagatttaaatattatagactacatgttatggtctatcacatattcaaaattttcagattatttaaatacaaacatcatgtgttcaaataaatgtaacaaagtcgtgactcaaaagtcaaagtcaaaacctatatgctctctctgtattatttagtacttgtattattaaacgcgttttggttttggaaatatataacataattctcattttttctgtttagagaaaaaacaaagaattttaaaaattggtaaattgtaatcgacagatcttccaggccactttccttatccctttctcctcctagtcccacggaccctaccttcctcttacatcatttggtaatgatctttcccaaattcatttatttttatagttagacatactacatcaagattcatactaattacagacttatcaactatacattaatcaatatgagataatttttctcttttcttgaagtagtccgctaaaattatagtaataaatactaatatacctatagacatagacagataattgtaatatccaaacaattttaaataagtttgatgttcttttgatcataaatctaccttcataatgaaacatcctccaccagcatatcataaatggttttttgacgtatattgaaaaattcaccatgttggtacgtaaatttccattttattttaattggttatgagatacacacaaccttctcaatgacaagaatatatggttcttctatatataaagaatctttttaattgaggataaagaacgccgattcaaggattatagtaagctacttaataatttgacttctgcaccgaaacaatatcaatcattttttacaaaaatataatgaagagatataaatctgtttaacttctaccctaatattcatttgtggagaaagaaggtaaaaaattaaagtaatgattcatttattcaagttattgaatacattatgaagacgaggaagacaaaaagtcagaataatgtaagtaaattagcattaggtcttaaactctcggcattccgcattaacttgattcggtgcatttggaggaggaccgacacaataccacacgtggcaaattaatttccttttgcagaaataattcaatgtcatgtaatttcaaattttaaaagttttgaagacaaaaatcatctcatgagccgaattgatatggacactagtacagcagcttccttagattccatccagacataacttttgatttcgatataggtcatcgctattgtaccaactactacgtataaaagaaatactgcatcctcataataaatcataaaactttataataaactaaacaaaaatagaattcatttttctgtttatttattgtaatattcttatgtgaaactattaataaattgaacaaaatacttaaaggaattagattatatacgatatgtgaatactggtcatattactacgaaggtagttttcttgagagtctttaacgttgaattctcgtgacctggcaaatacatgaaagtaacaataaaacttttatatttatttttattaaatgaagcaaaaaagaaaaagaaaaaaaaaaggttttctttcgacgtgtggtattctgtatccatctatataacagagaggacatcaatggctttctttgaacttgtaaaccttactctcgaagagtcctctgttactcatttttacattgtaaaaaaaaacttcttttcttctctacgtgaataagaatctgaagagtcattttctcaaggtaaatcttcttcgtctcttttcctaaaaatgaagtctctattagaatttgtttaaatgaagtttctgttattatttctttgatagtttccagttctttcatattgatctacgagttaaaactcagattttcttactcaaccatagcttattagatatgttttgaaaactagatatgttaattgtgagtcatttcttggatttaaccaagtaactattagtagagaaacaattacggtcatataatcgtgatggaaaagatcttgcaatgttttgatttcaatcctatttttggcattttttttcttccaagaagtggtttaattttattttcccccaattagttggcggtccaataatccacttacaacaaattgcaatgtttggtttcaacaaaattgtttttgaatttaaaatgatataagtcgtaatctcatcatatgcatggttctcattttggccctcccgacgccatgaattgcggtctgtttaagtttggtctagaagggtattttcggatacactcacattttaattcattcattgttcatagagctaccattgtaccatctaaatagcatttaatacaaatatatagggacgaaagattactaattgaatattgcaacttatccttctaatagttgttcgtgtcttcactgattataactatgagtaagtcgttgttcctaatatgattaatattgaagggaatttatttatatatttcgtatttatagtaataatattataaattatttttcggtggattacatcaatcgaggaaaatactaatgcacacacatggactggtcattttgtttccccaactttttgaatggaccaatggtgatattttcaatatagaatatattttctcaattcattaagttcttactttgatacagaaacaacaaaagataagctttatattaaaaccatgtgcaagttacacataacacatgtacgattacttgagatccgaacacatcgcttgatctcaaagctttttgttagagtcaatcctctacattatttgggagataattaacattctattcgattttgtcattatagccataataaattatgtttggttcggacaagttcatttttactaatttgtgagttataactttttttcttttgttatagaatgacgtggctaaaacaa

SEQ ID NO: 2063 - DNA, 3000 bp, Unknown
  misc_feature (1)..( 3000): cDNA_ID_2149406_gDNA_ID_1620483_Annot_ID_158401 3000 nt of promoter + ATG
ctacaagtaaaaatattcacacctgtagcttaagtttgaagtctctgataaggttaaagagctccctatagccagaccatacatatttctgagggttccatccttcaactattccccaccaacaatctattactactccatcgacatttaatgacttcatgtaacttaattcttgtcttacaccttcaggatcaaccaactggccaaagttgtctataatgccaacctgaaagacaaggtacagaactttagcacaggaaaactaaggatcgcggcaaaactggtaagaaatatatgtacactcttttttattgggcaacatccatatatatacacttaaaacacaaagttctctcatcagaagctcactggaagcatggcgtacacagggacataaaagctctctgtgaagtcattacattgctctgcggaatgaacatcttgtataagctgaaagaaaaacaaagtggttagatgaaacaacgtccagcttaaagtcaattctcctaataaggaaatgaatttatcattcacctgattggcttccaagcatccaacggaggtgataggactaacactagtataccttccattcccgggatgatcactctcggcaataccaatagaatcaagagacacaggagcaagtttctcatcgttcctaagaactgaatgctgctgagattcaattgcagccttagcacagttcttcaatgtactagaagaaagtggactctcaatagatctcgtcggaaactgtacctaatccaataatattaaacaatctatgttacattaataacagaacaaagcttataactttaagagcttcacacatatttgggatcaaatttatcatctttccactaaaccctaacttaaatagcttaatatgaaagtttgaattttgagagagagagtttcgaagtttgaaccacatgatttggttgctgtgattgccgataagtagtaccatcggcttcaacactccaaccagcttcacgagccaaagcagcgattacgtcattcatatcagcacgcgccggtaacggaaaattaccgtactgtcttaatccggcgagcattctactagtgattgctcgtctatgtctttctctaagcttcgttctctctttttccttctccctctctctcttccctttccctcctccacctcctccgccgccgctgcttccttctccaccgccgattccggcgatgtttccgttgtttacatcgttttccgttggagctatcgacgctgctgctgctgcagcggcgaatccgcgagggcggcgagattgtggttggttgcggttccggttgggaaattgatccgggtctggaattgggtcgagattcggatcttgcgaaccggtggtggtggtgatggtgttgttgagagtatgcatttttgtgcggtgaagttgctcgcttctgtgctgttcccacatttgagatttttttgtaactttatggatttacaaatcaacgtcggtaattattataaattacgttaaaagtctctcattatcaaaatcgtcaatattaacccctccttttttttttttttttttggtcaaaaacctctcttttttttttgttcaacaatagccaatgtgaccagttttgacaaagtgatactgaattactgatgggtttgttaggaatgacacgatgggttttacggttttgtttccaatcctttttttcatggttttattagtttagaaaagaaaaactgaataacataaatacataatttgtcttttgatttgattttggtttagtaaatcaaaccaaaatcatgttaaaattagtttacatattttgactcaggtttttattttaggtaggttttagtaaaattaacattataattataaataaaatgttaatgaatttccgtttatttgattcgattttatcatgttaaaattagtttttgtttggtctttaaatcgactttacagggccggtccaacaaaaatcttctgaagctagaatgccactatatctaaattgtaaaatactgaaaacaatcacttcataaaaaaaaatgatttgtatattttagtttattgtgatttacttttttcaactcattttttttttctatttttaatatatcttttttctttctttctttgaagttagtgtagttcaattatattttaatttttgagaatatagattcgattttggttcgattttggttcgattttgtatttctgcttcgcaatttataaaaccaaaaggctttgtcaacaaaatttcagttttgagtatagtttgaatattctagtttggtttggttacaactatttttcatctaagtgatcactgttcaatgaccatttcaaagcttttttctcaattatagtcctcaatgaagtccaattatgattgcaaaaaagattaaaaaatcgaacgaaaacaaaagaatgttataatagtttgaaaaagaaaagaaagaaaaataaagaaatggtgagtttggttttttgttccctctcgttcgaacatcaagacacactcttcccgtaaaagtctctctctctatcgcagataggtgctttgtctccttcttcgattactccgatcacctaaaaatctttccttttcttcaaagcatttctctttgattcaaagacaacacacatagcttagttcctacattaatttctcgcaataaaaaaagttcagatttcgaggtattcttgcaatctcgatcgagtttcagatctggggattcaataattagggcttttgattctgcattgtcaatgacgaattcgggtttcaatgtaaagatctgaggaaaaagtttcgatctttagattttgacttggaggtttcttcgattggtggatttgaagaagatggggaaaagacttgtgggtcttgtgtcaatgatgtaattttagcagaaagttgtttgcttttgagaagaagatgggatctggccggagcaaatcatgtctaggctcgtcggcgatg

SEQ ID NO: 2064 - DNA, 3000 bp, Unknown
  misc_feature (1)..( 3000): cDNA_ID_2149420_gDNA_ID_1620483_Annot_ID_158405 3000 nt of promoter + ATG
taccataataacaacaacaacaactactactcaaactcgggttatggttactactctggtgggagaggccgaggcagaaacacacatttctgacctgctgagtttctatcttccaaggctttattggtcactcgcgtacacacatttctactcttagcccttctttaaagttttaaattcagctttttgggtaaaaacagttgtatggttaccacatcgcgagatgtgtaggcatatcatattggcaagttcatgttcctttttttaatctgatgaactttagcctcaggagagaatgtttgttcatgtagagaaaacaaaaagtactacgaacctttttggtaaacgcaaatcattaagtatatatatgcatcatatgttctgatatttattatttgatttacatatgtacacattagcgaagttagtaagacttacaagttaagaattacgttagacattatgtacagaagaagaagattccttaaaatttagcaagtatacaactttatccaattatgtatgttacttgctaagcccattttgcctttaccccaaagtaaagaaagataccaagactttccccaccaagtagggttaagtaccaaatccttcaaattccattatcctctctcaaacattaccccaaaccaaccaaaaggccaagaacgttggtcccaaagcctgaatgctgtctcatcgaacccgaactaaaatccgatctggtaaaccccataataatgcccagattgacttctcgtcatggtaccagtcctttcatctggtgtgcagccatcatttgtgccataatctctattgttgtaatcgttggtggcattatagtcttcgttggttacctggtcattcatcctcgagttcccatcattagtgtcgcggatgctcacctcgacttcttaaagtacttgttatattttccgcaactcttccctttattgatcatgatgaatcttggctctcatttatgatcgatatctttttcttttctcggtttgattgatcaggtatgatatagttggagttttgcaaacgcagttaacgattgtgattcgcgtagagaatgataacgctaaggctcatgcgttgtttgatgaaactgagttcaagctaagctatgaaggcaaacctattgcgattttaaaagcgcctgagtttgaagttgttaaagagaaatcaatgttccttccttacttggttcagtcatatccaataccattgaatccaacaatgatgcaagctgtagactatgcggttaaaaaagatgttattactttcgagctcaaaggtggctcaagaactcggtggcgagtcggaccattaggatcggttaagtttgagtgtaaccttagctgtcagcttaggtttagaccttctgatcatagttacattccatctccttgcacctctgctcataagcattagaaactctatctctcatttgttttactttctctttcacttaattagtttttattttactttttgggattcatatatatttttctttctaaaataattgctgtaggtagtattacaatttattcataatgatatcaaatgaatatgaaagaaattcatgaaatttcgatattttcgcttacacgaaaatttgacttgaagtgtatttgattgtttggaataataatgaaagagtaatatatttttgtaagttttttaatttcaactaaaatcacaaatgatggatttattttaatgttttgtaattaagaaaaattaaattatagataaaattaataagttaggaaaagtggagggaatgaatgaaattgagcaaaaatggtgaatgggcacaaatgtttgttttaaaaaagaactttatgtatatttgtattttggtttaagcagtttaatgaccccatagcttttgtatataatgtcactttatttctacatggattctgtttaacaattcttttgtttttgtttaatgtgtaattcattgatcaaaatggggaaaaatatgtaaaactcaagtgtttttatcgacggcagtaaaacagagacttacaaagataggaaatagcttttaaaacagagcaaataagcaaaaaagctattatcgtcccattgtgatatgtttgaattttttacaagtagtatgtacatttacagatgtagacacttttgattttcttacaatagtatttgactatttggtattgctttttttattacaacaacaataacgtcagctcctattattcgatcatattggtgaattgttcaacattcacttattgcacatcattctgcaaatgtgcatcctctattttgtaagtggtattgtaattaatgctttgttgtttgtataacagtgaaacagcttgttagttatctgaattcaaacgatactagacttgtcctaaccaaaaagccttatttgtaaacaaaagcacatctttgataactaaagaaaaacgattgactgattatcaattccgacaaaacccataccattaatctaagttaatctttttgttatttttatattttatagttaattattcatttttattgtacttttttttataacagaaatgtattttaagttttgactttctctgataactagaagaatttcaaagctctgatctttatccaaatgacttgagaaatacactcatcactcaacgtgtcgtccattgctttcctctctctgccacctctctgtttttgtccctatcatttttcttctcttcacttcatactctgttacaacttctggctcttactcttaccttaaaaaaggtaagcttctaatttcttctattataagattctatcagagtttggatatcgcttcaataaaaactagaatcattttggttcattagctttattaagattggaaatttgaactttcaaaaatcttgaccttattttggaaattccattgagcagtgactcaaagtttgtgtgttcatatttttgtaggggaaaaaaatttggttaagacaaatg

SEQ ID NO: 2065 - DNA, 3000 bp, Unknown
  misc_feature (1)..( 3000): cDNA_ID_2149413_gDNA_ID_1620483_Annot_ID_158403 3000 nt of
gtagggagaccgaaaacatgtatttacctcgaagagagcttcagctagcaatactatccttgagatgctagctcttgcatttgtttcatcggttgttgctgttgtcgaaccacggttagtaactgcacggcatgtgcagcgacctgcttgatcttgacctgataagacacaagatctatcatgatggactgcgacattctcaaaccggcttcctaatctttgaagagcgcgaacctgtggaattagttatatcagttagttagatcttgagttgatcagacacatcaaggaagagagaatcaatgagtttcaaacctgagatcttattctcctccttctttcaaggaaatctgatctgtgttctaataaaccttgatacctcccttctctcacaagagcagctggtgtctcatgatcctgaatgccgaataaggtccttcgaatgctagaagcggaacgatttagtatagacgttgaagtcacaggagcatcctctgctgctgcggtttcagcagagaagagatcagtatcttcttctccctgatgtggcgagggacggaatgcgaaatcagagagtgaagatcggcgaagaactctatcacggagtcttccaacactcagagttctactaaatctaacattgcgctcaatagaaggttctcgtacaacatgtcttctatcaagaagtccagcataagtactatccataccattaactactctcggagaacgtaagctaccatcttccccaaatctcatggcatcaatatctctaactacattgtcaatcacaggaattctcggagactcaactctatcattgagcctaatagcagattctgaaggtgaagtaacaccatcttctctatgagaagaagagactggataagtcgtgttgaaggatcttgaacttgaagctctgctaagtctagagcttatgttaccaggaatgaatttgaaatgcgaaaaaactcgacctggagtagaagattcttgaatcgaaccgctaacatttctcatctgtacattgcttacactagcttcctcttcttcttcttcaacaccacactcatcatcaagctcaagctcatcacaatgtctttcgttttcagatttcttatcatctttcaattctttatcatagcaatctgatgcatctcttctcgattccattctacgccgtgtaacacttccatgactcttcctcatccatccattacacacctgaagaaatcaaaactcatgaacttgacctaatttcagatttgaccaaaataaattaaatatcaaaaccagacctgttcatcattatcatcatcactgtaatgagaagtagaagatgaagcaagacaagaagagtgaagaccacaaaaaagactctttgatcttcttctccttccaccaccactagaagacgacggaggaggttgagccacgtcagaagcttctctcgccatcgccgacgagcctagacatgatttgctccggccagatcccatcttcttctcaaaagcaaacaactttctgctaaaattacatcattgacacaagacccacaagtcttttccccatcttcttcaaatccaccaatcgaagaaacctccaagtcaaaatctaaagatcgaaactttttcctcagatctttacattgaaacccgaattcgtcattgacaatgcagaatcaaaagccctaattattgaatccccagatctgaaactcgatcgagattgcaagaatacctcgaaatctgaactttttttattgcgagaaattaatgtaggaactaagctatgtgtgttgtctttgaatcaaagagaaatgctttgaagaaaaggaaagatttttaggtgatcggagtaatcgaagaaggagacaaagcacctatctgcgatagagagagagacttttacgggaagagtgtgtcttgatgttcgaacgagagggaacaaaaaaccaaactcaccatttctttatttttctttcttttctttttcaaactattataacattcttttgttttcgttcgattttttaatcttttttgcaatcataattggacttcattgaggactataattgagaaaaaagctttgaaatggtcattgaacagtgatcacttagatgaaaaatagttgtaaccaaaccaaactagaatattcaaactatactcaaaactgaaattttgttgacaaagccttttggttttataaattgcgaagcagaaatacaaaatcgaaccaaaatcgaaccaaaatcgaatctatattctcaaaaattaaaatataattgaactacactaacttcaaagaaagaaagaaaaaagatatattaaaaatagaaaaaaaaaatgagttgaaaaaagtaaatcacaataaactaaaatatacaaatcatttttttttatgaagtgattgttttcagtattttacaatttagatatagtggcattctagcttcagaagatttttgttggaccggccctgtaaagtcgatttaaagaccaaacaaaaactaattttaacatgataaaatcgaatcaaataaacggaaattcattaacattttatttataattataatgttaattttactaaaacctacctaaaataaaaacctgagtcaaaatatgtaaactaattttaacatgattttggtttgatttactaaaccaaaatcaaatcaaaagacaaattatgtatttatgttattcagtttttcttttctaaactaataaaaccatgaaaaaaaggattggaaacaaaaccgtaaaacccatcgtgtcattcctaacaaacccatcagtaattcagtatcactttgtcaaaactggtcacattggctattgttgaacaaaaaaaaaagagaggtttttgaccaaaaaaaaaaaaaaaaaaggaggggttaatattgacgattttgataatgagagacttttaacgtaatttataataattaccgacgttgatttgtaaatccataaagttacaaaaaaatctcaa

SEQ ID NO: 2066 - DNA, 3000 bp, Unknown
  misc_feature (1)..( 3000): cDNA_ID_2149382_gDNA_ID_1620483_Annot_ID_158395 3000 nt of promoter + ATG
tcagttcttgaagagctttcagctcaccaacacggcctggaatttcctctagcattttgcagtctttcatattcaatacaacaagtctctgaagcttctccatgttcataggaagctgacttattgctgtgccatctaagtatagagtttctatattatctgaaatcaacggaaattccttaaaagttgagcagccgctgagagtaagtgttttcagagaaatcaaattcatctctggaagagattcgagacttgtacaccccttcagattcaagaaagcaagcattttcatttttttcatatcatgtggaaacgctttcagtgttgtgcaaccttcaaggttcaacctttgaagcttttcagcttttgataaccctgacaagctgcacaacttacttgagtgattgagatcgacccaccttaagcatggtgtgtcctattacagaaaaagaagaaaacaaagtttagccaccagtcaaacaaacctatccaggtaaattaaccattcacaaaagcaatcaacagattattcagagacacaccttgtcaccctcccaaagttgttccatttcactgtagggcagcttaaggtcgacaagattaattgggttgaaatcgtttggaagtgtctccaatgggaatttcagccagtggaggcatcgaacttctttcaatggtagcttaagtttatcagggatgttgattttattgttggttttacattcctgtggacaatgggaattgtagaacttgagataccggagatttcccatatttatgaagtggtcgcggtctaagctcgtttcgtcttccacttcagacaagtctaggaaaatacctctaacattggcagctttctaagcaccaataacaaacacgatcagtgaagagaaaaaaatgtaagttcttaccaataaaactctagaggaacttctggtctcaccattttattttgcaatacattgattatgcctcccttgattatgtgttgatggagccacagcctccgttgtctgctaccatcctgattagatgccttcagatcaacttcccttgaaaatttatataatagatcatgcatctccactcggccatcacaagtattaatcaggaacttatccgtgagagatttgactgcactcattgcttcagccgaaccaaggtcagatgaagccagtagactttctacataatccttgtcctgtgatctgaaacaggctatgtcgagaaatgcatctttctgcgctgtagtcaattcatcataactcacttggaagacactgacaatattagggctggggctctgtgcaagtttcttcattttcgaattccaatgatccatacttttcttattaagctctccacccaatactttgagggctagtggatggcctctggcgtaatgtacaaacccttctgacagcttcatgaaatctttcttttgaggattggcttgatcatcaataaaggcatgatagtgaaatagttgtaagctatctctgtggttcaaattttgaaccatgtaagtatcatcaaccaaaccatttgttaaggacatgtcgcttgttgcaatgacaaccctgcttccctccttaccctccttaatccagtctagtatctcacgaagagcatctatttgttcccttttactaacatcatcaagtacaacaagcactttgcgttcatgcagttgactgtatggatctttgagattgtctacgtgaggatggtttaacttggacaactcgcctaagagcatttgaggcaagcgatccaactccaagtgcttggactttacacggatttgatcgattagcgcatgcctcgaaaacttgccctgccacgtcttatatagctctttcaggagtgtggttttaccaattccgggcatcccaacaactccaatgatacgagttcccttgtatttatcacgatccaacttctcttccaaatcttttaaccgttgttcgtttccaaaagtctcatgctttttgtctcctgaggaagttccagcgttgctattacctaaagcacccacgacggcgttgtgacttccctccggtggtattccggtcaacgctgtcttcaccgccttcacaatttcattgactttctcactctccacactgcaatttcaaggctaatgagatcatgacctccctaagttccataaaaggttctagaagtattcatagatctgtctacaattgtaatctaatcactactgtgtctaggtttgtaactgagtcaaaaaaaataaaaaaaaatggtaccttttcttgtcaatgatgatgcccataatgttaggaatcaagttaaaagcttccttccatttctttttcctctcatcacccttagccatactcctaaatctatcaccgaactttcctttcaaatctctaacggtggatggctccagcttgtagaagattggaatcgcaacgagtgttccttcatccgtacaatctttgatcttctccagctctctcacgcaccagactgactcggtgtagttgccggagaagatagccaaaacgattttggactcctctatcctcttcagcagtacatctagaggttgacctctgtcttcatagtcgtcgataaagacgttgatgttgttcaatttcaaggccgttacgagatggctgacgaatctccggcgcaaatctgccccacggaaattgatgaacacctgatgctgcggtggcttgtcttccacagtggaaatagatgatgtctccatggcccaaaagctttttcccggtgtacttggacttttcctcactggtgtgcgttagagtagcaagaatgtattgttgactattcttttctctttttttaaatacctttttgttattttttgctgttggaaaaatatcaaatgtaaaaaaacaactgagatttgagtggttgaatgtccaatgaaaaagcatcgtcggcataaacaaaaattccggcgaaatcaaaggttagttcaaagtatcaaagcgcgaaatc

SEQ ID NO: 2067 - DNA, 3000 bp, Unknown
  misc_feature (1)..( 3000): cDNA_ID_2047242_gDNA_ID_1620484_Annot_ID_158411 3000 nt of promoter + ATG
atcttggatgatgtagagtccatgagtgaagcaactgaccgagtatcctccatcacaaaagagcctaaataaaacggaaatttaagtaatgattaaaaagtcccgaacaaataaaaacaaacatgagtacaacgacattagaggccagacacaatattgttaccaattcaaacaagtccaatctccaagctgcgaatagagagctccacgaaatctcgatccttgaacaacaaacaactacaaaaaaaaaaatcatcaagaacagataaacaaagatcagtcaaaactatccaatgacaatatcactcgttaaagataaaaacaaattagctctgtaacaagaccgtacaagtcatagtggacaactatgtaagaaaatggcctacaaggcaagtaaagacaaatgaacaagaaacccccaaaaaaatgaatccattcaagaaaaattcacactattttttagtcacaaagataattcaacctcaagaactaatcagacgtacttataaaaaaattagctgaaataatacaaatacagattaagagaagagtagatgacgaaatgagagtagaaacaagcaagctgattcagtgattctatgaaatcccagcttaatccatcacataaacaaacttcacgaccaaaattcaaggtcatagcagaaattttgagctatattgtggagaaatcaacaaaccctagctacagtgaagagaacacgaacatgaactcaaaacaaaaaaaaagtatatacctcaagagaagataaaaaaaaagcaactttaccaggaaaatcaaacgaagtaaaaacccgtaagaagaagagatcaaaaaacttcaagaaggaccacatgatcgtagatccatggtgaagagcgatcgagagaaatcgaggttaggcagagagagagagagagagaagaggaaagtgaaatccctaaaaaggaaagaggaaagtagaagagaggcaaaataaaaggaagcaaagcgatttataacagacactttattaagcacacccaattttacttagttggcacgtgagagagactggtgtggtttaatggctcgttcttcactatcatatctggttcggaccagacagcttatgtggctctagtcaaaccctttaaagtttgcgtcacgtgagtttgtctgaaactgccgggaacttgtaatttactctttcctcctttttttctattaattggtatattcaccatctatgtgtatcaatcactctttaaattccttaactttttttaccaaacacccaatctttttaacctgttgacgaagctttggcttcatgcttaaggctatgttataatggggaaaaaactagattgcacaatctttcatagactgatattcttcatcggatgtttcgatcatataaattgtctccaaggatgaaactatgtgtctaatttttttgaatgcaaaatttatatatgattgttttcttaataagagcaacaatgaaaatatagtttggttatacattggtatttgtcaaagaggaaagactaaaccaagagtaaataaatcttacaacttcccaaattgttggaattctacaattgtattatatatggtgaatgatttggtacaaaacattacaaatatcaaatgaatttcgaagttggttcaggtcacgaatggcggatttggcttgggagagactagaggttgtgattcgtggtttatctcctctctaaaatcgttatgttacaaactgactatcaaggataatcatatcaatcaagataatgaagagaatcaatatcgtcaatcacgttaattgctcataatcattgtatacaatattaagtttccttcagtagctttctagtctttgtatataaacactctgtaatcatcttgtttcatatattcgatatactcttagtctacatggtattagagtctctgtatataaacactctgtaaaatttctaaaatcgttatgttacaaactgacaatacataaacaacacgaattaacattttggggtgtttgctgaaccgtggttggcgggtacatctgctaaatgaacaagctttttatatatatatatatatatataactgtcaacccataatttaaagattccaacaacaacaaaataagtactactcctaataagtatttaaatatgtgacatgatattcaatttttgtgatacaaattattatgcattggtatttgtcaaaaactaataccaagaaaacatttcttgtaaatgtcatattccattctttgatttggtcaaaacaccaaaaccatttacaaaatatccagaattatctaaaaacgaatgaaaagcgaaaaataccaaatggaagaaaaatttgtccatctcctaacaaacaagataatatatatgatgatgttgaaaagtcaaaaagagaagaaagaaaaaaaaaacatttaacgcgcaaagaccgatttggtttttgttgggagtcattgcgttctcatcatcagtgtctctcttttctttgccccattcttcacgaactttcactagacgacgacgacgatccaaagtcccagtcaactcactcacaaagacgactcctttattaaattattcccaactcctttcttcatcatcatcatcatcatcattcataaccacttagccacagatgcgattttcttctccttcttcattgtgctcttcaacacttatgaacaagagcaccaccaccacgacaacgacgactacaaagaccaaagctttcgttttgtgtttctgattttgattcgtaagttgttgtaaatttttctaagtcaacttcaattttaaagatcgctttagtctttttgattcgctggcgataatccaattttcgttgttgctaataaagttttgatttttttttatttgcttacaggattttgatgctcatcgaagagaacccttgattttgttgctgtagttcatagagattttacacattttgtggaatttagtggatttatgatgatg

SEQ ID NO: 2068 - DNA, 3000 bp, Unknown
  misc_feature (1)..( 3000): cDNA_ID_2025303_gDNA_ID_1620484_Annot_ID_158427 3000 nt of promoter + ATG
atcatttggttcattcgcttcaaccttcaattttcaacacatactagatcataacccgtacaacacgggcattaatattttttataaattaaattgtatactttgttcgaattacacaagaaatagtatagtataaaaatgatgtcataatatttttcaatgtttgtactatttgcatataatgctgcattagattgactttgtttaaaaatgttatttttataataaatacaacatatgtagttttaagtaaatgtgtaaaatttgtatacaagttgttttggtaaaaaacatgttttctttgtaataaaggatataatttttggcgtaacttagaattagtctttgtatagtattttggttatatatgtgaacctaattggggcctatattagattatctttaatagggctaactaaagaacggacccgataaccaacctaatacccgaaccaaaaaaccgggttaaggcgggttaaaattttaggaaatttccttattgggtagagttttagtaaactcgtggatatccgattggtccgtaaattacccgttacccaaaaagattattcaaaaatccaaacattaatttaatatccaaagtattaattatatttaatcgtaatattatctaattatctaagattataattataaatctaaatatatcaattaattttggacctaaatatttaaaacaactaaactattcaaaaattatttgttatgtttgtcaaaatttagtaaaatatattcaaatataattaaatttattaaaacttaacaaatttaaaagtttttttttttttggagacccgctatctacatacaaatttctcgtttctatttttttttggtatttttagggtctgaaacattttgtgcaaactgacccaaacccaactggatccgacccgaaccagaaccgaatatttaaaattattctattaggtagtaaatcatatacccattaatcccaaatccgaacgggttctacccgaactcgaatgggttactcatatgcccaaccttattctctgatttaattatctaaaaactccccaaaaaaacgtatgttttgctgactactttttattcaaaaaaatttacatcctcttctgccaaaattatttcataagacatcccaaaacccttggaataatgattccatgaatgaagaatcctaatttgaatataccaagaggttttgaaaggttttaagtttttgataggtgtgtatgtgagaaggtacagacatcgtgatggtaatctgcttatttataattttaacttgcagtataccgcaggtaaggttatattttagttaaactaaaaacttttattgtaaagatgattataaatatatgatattattttatttaattttaaatgtatagtaaactgcgagttgtatatgttttgttgctattatttatattgtttagtgtttaaaattatacacttgtattttgattgttaattttttagagtttcacttgtagtataccatcttgtattagtatcgatttaaacccgtcaattctaggattttccagcttgtattaaaaattgaatcacatcatacacataaaaaaatataatatgttattaattattataatatataagattataaattttaaaataatatgtatgaaattgaatataaatattcaaattatgactcagtactcagtagaaaattttcttaaatctatttttgacccgttataatatttttcatgtattgaacagtttatattctttttaaaaattcaagttatgtcatatgcgaaaaaaatataattattcttttataacgatggtattattttttgcaaaaatagaatcatataaagatgagaggtgaactataataattaataaaaaattaatatgataatttagataatgtattttgttttaattaaatttaattaattaaattagtatttgactttttaatttttaaagagatgaattaatttactctttaaattttatttctaatggcatacctatgtaattacttacaaaaaataagattatatttaaaatgtacttcccaaataatatagcaggaagttttcatttttaattatatatgtgccttttcatttaacaaattttccaacatgaaaagaagatatgttggtaaatggtaatctacaaacccaaataaaaaagaatataaaaaaaattttagttaaagataaatataaattctttatcaatactatttccataccaacttgtaaatcttcaaattattttgattagtatctatctacaccaagtaccggaacaagtttttgtgcaatacggaatcttcacctcaaaccaagcctaacataggcattcatcaaggctgaaattgtgcacaataacacgtacaaaaaatcatcgtaaaataaatacgaacatctctcgaaacagagaagtggtcaatggtggttatattttttctttttttgtggtggtgatattatgtaatatgattagtcattgaagaccttttgtagagagaagtggtcgatgttgcgccactttagcgttaacgttgacgtttggaaataagaagcaataaataaatcgacggtcaataattcctgctccatatatgttgacctacacgtgatgccattttggaatcttccaacgaaaattatttagttttaattcaattcaatatattatccattttgtctttctacaatacacaaatgaaaaaaacaaagtaaaattgaccaactaatatttatttactgatttgattggtcacaaactcacaagattttggccacaatatagacttctcggtcaacaaaaatttgtatttgatcataaataaataaacaattatttcccacttgttgttatgcgttttgaccgacttctaaaaaaatcaacgttctagaatagataacgttttggtataaaatcagtctcttcttctagtgactcaaaacaaactgtaaagtttattaagaaataataatg

SEQ ID NO: 2069 - DNA, 3000 bp, Unknown
  misc_feature (1)..( 3000): cDNA_ID_3065801_gDNA_ID_1620484_Annot_ID_158430 3000 nt of promoter + ATG
gttgatcccactccctccaatgtggctccgccactgatttgacccatcaaaacagtgtcacgttttatggccattagaaaacactcaccctacaaaattagtcatgtggtaaaaacccgagtcacacgctaattataaaacaaaattaagttgaagcgaacacttggaggatgaacgaaacaattgttattgcaacttgcaagttagtaataaattcaatatttcttttgtgtgtttgtgtctgttactctcatttgacttcaaatccagtctccaaaactatcttagaagaggtgaatgttacagtttgttaccatcgcaaggttcttgaggaaatcgtggagtggtcattcacttctttgaaacaagttcattttaaccactaactcatacattacgaccaaccaacaccacacaataacatcatttcatgtactcattatgtgaatatgaccaaataaatatgtctcatttgagatttaatcataatcatacatccaatatccattcttcagttttaaaatgcagtggtggtcaccatgactcacctatgacagttagtgtatccaaactaaaccgaagactgaaccaatgtgcaagacggaattatcagtttaccactggaaccttaaccggcctattcaatcaaaccaaccacccaattaagtcaatcaatcaataattcatgaaccaattagaattctagttaaccggtctagcttacatgttctcgaatttgattcaaactttaaacagatttaatgaagcaatttaaacagatttggaaaaaaatctcaaaactattcaaaccacagtaaaatatatttataaaatcacaattaaaaatatagcattaatcaactaagctagctagcgccatgcacttataattttacagagtttctaaaatatcctgactcttttttaaaattaatactttgttaacaatgaccaagtctaaaacttatctaaaaacgtgtcaaataagaaaaaaaaattagcaatttgaataattcaagatccctttaactcggaactaaagaaggtaattatttttaaatagatatgttctgtgtgaaaaaatctaatatcttctatatatatacataacctttcttcttttcagttttaaaaccatcaattcattttaatcatcgatcggtgatgaagaaaatctttcaactgtcatttactgtttttattattttcatcagtcttgtgctaggttagtctatacatttagaattatattaatatattacatatactcgttctacaacaaactgattttggatatcatactattattgtataacatcagttacactaagttatgtaaaattatagcaagagttttcactataaaattacacaatatcatatttagcattcttatgtctgtttcacaaaaaaaaaaaaaaaagcattataatgtctaattcattttagatttagacaattgagttgctagacctaaaaaccaatttcgaaatgtatatgaaaaataaaacaaatttccacctattttggttaattattttaattattaaaaattcgtcctgatatattgtaagagttattgtagtataaatttatacggcatatttcccttgttttatttcatcttcgattctttatgttcgtggtgcaaagatagatatgtattttgcctcataaatgttatgctccatagtttttgatataaattcatatgatatccttgaataaattttacgtaatctgtttttagttacaatatacaaagaactctctaaacatttttctagattagaaatatttttctctagtttttattaccaaactgacattttatattttaaatattatgaaaacaggagtggtggggaatgtacaacaaaaaagaagtaatcgatgtatcgactttccagttaacccaaaaactggattgtgtgttctcaaagattgtgagtctgtgtgtaagaagacaagtaaagggttagagggtatttgctggaagtttaatgccaaaggaaaagatcctaagcaatgcaaatgttgtggtttatggcctccactttactaatgttgctacccatttatttttaataaatattcgtattacaaagtaataaaatatttttatgaggtttgggacctattattttttacttgtattcacttgaaaaaagtaacatgaagctcagaattgtgggtgtaaattgcggatcgaatctactccttctcgcctataaaaagaacacctcctcctctcattttcttcattagtttttgctcagagctaaacgaaattctctcctatttttctctttctttttaaagtaggtctcaagagtatatgatttatttaaaattcgaagattctactatcgagtattgcgataccgatcttattgtgattgtattctttctttttatttttaaatcaggatttcgtgattttaccgttgggtggataaaatcgaatagcggagcgaagttagataattttttttcatatgaagtaaatcgaggtttgaatacattagatgaggaaaaatcatattataagcatagtgtaaataccaaccatcactaaacacccacaaaccttaattcatttgttatccgtaattgcttagcacaagaaataatcaaatattatttaaatagaaaattaaaaaatggcaattttgtatagcaaaatatgttattcttttgaaaattccatctgttacacattcctctaattctatcgattggaaaaatagtattagttacaattcccttctaaagcatccaatggccataatttttttatgattgttaatgaagagaaaacagtggacagtgtcatcacatggaattggttgtggataaaacaaaacaccccactccatacatgatccactcttctcctctcaatcttcatcctcactaatgaattaataatacatttaaatataaaattattgaattcattatttgctcgattcggaaaatcgtaattgaattcagata

SEQ ID NO: 2070 - DNA, 3000 bp, Unknown
  misc_feature (1)..( 3000): cDNA_ID_3065806_gDNA_ID_1620484_Annot_ID_158426 3000 nt of promoter + ATG
aacatgtggaaacaattactctttcagagatgaaacatgaagagttagaagcttttgttgagtttatatgcagtgatggctcaatgctttctgccaacgtgaaacaacatgctcgctcactctatcttgcggctgataagtatgagattctgcatctacgagacctatgcagaaccgagcttatatcttctctgagtttgttgaattctcttgacctccttgtgctcgctcaaatcccttttgacaaagtcctcaacgatgaaagtttcagttatataaaaaataatataagtacgattgctagctctgatgagttcaagttgttcgtcgccggtaacccaaatcttgccgtggagataatgaaggtttctctcattactcttactttacgctgttcctcctgtggttcaaaccatagtcttcaaggtatgtactgttgtaattgttgtcgctacggtactcttcgtttgatctagagaatcacaatgtattttaatttctgtcgtatcacttcgataaatctcatgttcacattttaaaagaattggatttcttcgttttctaaaacttatatagcaaatctcatattaaaataattggcttgtatatctatttatatctaataatatcttcttactatgcaaaaacaagacaaatgttaagaaaacagatcgattttatataaaccaagcgtattgtgtaactttattaatcatctcaaaggtacccgcgcacttggactagcaagcctttattaaagtggaatgtgttgttgattgtttcgtgattcctaatgagagaattggtgattgatattgatcatacagttattctactatgaatgatgaaggttgtgaatgatgaagaatctctctgaaggacaaattcgaaaacgagttactcaacatattgaaagttctcttaacggcctcacactttaagatatttcctttttaagtatgatatctcggtttgtagtgaattcaatattttttgtggtttttgaacccaattcctgctatggagataaatgtaggctactctgactccaacgattaatccatatagttcctactagcaaatctgtctagtatatgaattctatctcaataccactcgatctctagaatccattcactgctttaacttagggccataatgcaagcttaatctcacttaccccgcggcagagcttatatgacaaaagcagacaatcactaggtgaaaacaagtcacaaccaaattcgttgagggaccaatattcagagcatgacacaatcttcttcaacttcttcattttctctcggcaagatcaagtcaacttgaactcaaaggccaaacttagattatttatattagaatgacatataaaacatggaaaaaaaatatagtaaattattataaaataatgtcttacaaaaaaataatgtcttacaaaaaaaataatgtcttacaaaatgttttccaatgtacaacgacaaatagaattttcacaatgaggtatattcttctttttctcaatacaatgaaatgcacattgttggcaaaagataattttcatgtcatcgggaaaatgtccaatatgttcgtatgctggatcaatagtagagcttaatgaagggatagaaaactgagtttttccttctaaaatagattttgtcatgatatttgatgtacctagaaatagtttttttgaaaactttttaaattaaaatataaatataaattgatcaagaatgaacttacatgatgaaaccaaaactgcaatagttagaaagaaaaaaagtgtcttcattttcgttaaaatgttcaatattttaacaaaaacaaaaatggaatatatttgtgttttgagttttggttgtgatgttttaaagtcaagatagtagcatatttatatgtgcttttactaatgttacatagtactagtagttaatgttttatcaaacatattttcttagaaatcatagtcaaagaaactataaactttaatttacagtttttaatttaaagtatttcacccgtttcacaaaaagtgttgtttaattttttttttttttttttatgttttaaatcaaatctctgtgatgtagtttttaaaatcaaatctctgttttatctatgtgttttcaacttattaattaaaaataaagtgtaaaagaaaaatttagatgtttttattaatttgtgtgaaaaatggtacagttgttaataggctagaaactatttacctgttgttacatgtatattggcggtctaagcattaggcttaagttggtcgttttgctcttttatatgaatcacaagttataggctagaaactatttagggttcttggtgtgagtgaatagagtgtttaacatatctattgttttggttgtggggttgagaagattaggaattggtgactgactaattgtattaatgttgtaaatctgattaaagagaaaaagttcaattaacgttgtaaatttgattaagtgatttttcaattgcgtctacatttacataataacataattttctatcgttcgatccaaaaagaagttgatctcttccctcaaaacattattctgcttcttgagggtcacgttctcttgtagcatcgattctttttccttctccaaatttatggcatcagtttggaaactagctatggtctggtcatatagtcttatactatttttctaaggtgaataatctctttttatcgtcaaaatcatgatttaggcccatcaaccatatatgcataattgcattcaaacaaaataaataaagaaatacttactttacatagtgaaatatagacgtcgtatggaaaatggaaacaacatcaacaaaaaaaaatcaaaaatcaaaactcttcacaacctatctattgaaaacgaatgcttattgttttttacataactttcaaaattgaattagaggcaataacgacagtgagaatttcaaatttcatttctgaggcaatcgcataattcccaccggcgatcggag

SEQ ID NO: 2071 - DNA, 3000 bp, Unknown
  misc_feature (1)..( 3000): cDNA_ID_2047228_gDNA_ID_1620484_Annot_ID_158415 3000 nt of promoter + ATG
aaaggcggcacttagagtggctcatcgggtgcttggtgagagtaggggaggtgataatggttcgagaattagggcgaacgttgtggctcagctcgtgtcagatgagagagttgttgctctctttgctagtgaagctgtgactaaggagaggaaggcaatacattctgttctctggaacaggtatgtttttgccattgaactttcatctcccttggttaacattggtgtgtcatatttattgcatcttagttaactgagtgattcagcttggttacagtgattgataggttttgttgttgttttcttgagtgtatgtcttggggatctaatctgggtattttctgctgtttacagtgcttcagatcatttccgtgctaaagattatgagacaagtgcagagatgtttgagaaatcaatgctctatattccacatgatatagaaaatagagttttcagggccaaaggcttcagggttttgtgtctttgctaccttgggctctctcagctggatcgagctcttgaatacatagaagaagctgaaaaggtatacatttatccatggaacttctattttcaacggtcctagttggatctttcaactcagaattgctaactagttttctgtctctgcagcttgagcccaatattgcttgctcctttcttaaggtagactgtcttttcccccacagtacatgcttattcaacatatggccttcggctacctcgccatatatatgtatctggagattgtttgagaaaaattgtttcagcaacttctctttgcttctgattcttgcagttcaagatctacctgcaaaagaaggaacacagttgtgccattggtcagatcgatgcaatgacgtcctgccttgatttttctccagattatctttccctttcagcgcatgaagctatttcttgccaagcgcttccagttgctgttgcttctctttccaagtttctcagtttctatatctcaggaaaaaaaatgccaaccacagaggttgtggtcttccgtaccttagtcactatattgactcaagacattggcagcgaaaccgaagctcttaactttatgttgcaagctcagagcagggcttctaagcttgggacagagtgtttctttggattaggagagactggaaagcgagaacagaattggtttgctgcgacttgctggaatcttgggtcaaggtgtgggaaggaaaagaagtatgagctctgtggtgaattcttgaggctggcatctgaattttatggctatatagatactgatgagtctggagaagacaaactgatgatttgcaggtccataatactaagtgtcaccgctatgattgctttggagaagcaaaccaagagcgcactgactgaaacccaagtgaaacttgctgcagaattgctcgtgagagcaggaaaggtcttatcctcctctttattaatattacctgcagagttttacctttcagtttcactgatgtttggttatatatttgcagattatgtcttcttcgctctcagatggtaaagattgtatcatggagccagaactcatctttatgtacactttacttgcgtatgacatacacggaaggctcaacaattcggcattccagttacttgtggtaaagacgtttgctggttccaagtcttgtcattacaactatcttctccaacttggaattttcgcctctcaaagccctcagtccaacccggacgtgtcaacatttgctcttaacgaatgcctatccgctctgatcgcatctgcttcaccagagtacccaaccatagctcttataatcaggaagctgatctccatagccagcgtccacaaaggcgatacagacgatgaagaagcaatcttaaagatgtacaaacaagcatacagaatcatggttgggttgaaggaaggggaatacccgactgaagaagggaaatggctcgcaatgacagcttggaaccgagcagcgttgcccgtgaggctaggacagtttgagaccgctaaaaaatggctgagcatcgggttggaaatcgctgataaggttacaggtatggatacttataaagcttgtatgcaggattacttggctggttttcagaccaaagtttcttctgcttagtttcattcatattaactgtctcattagtttaaatgtccatgaaataaatctgagatatagaattgttgaagatgtttagttcatatagtacacactaaatcccctagaaaaactaattaaaacatgtaaaactatatttctaatcgcttcttgcaaacagaatctgctctaagacatattcatctctcatgggaattatgcaaatcttactaagatcaaaattcatttgaccgtagatttttatgatggaaagagtttgtggtcgtgtagagttattaagaattcacttagttttaggtggaggcctaaacttaagaaaggacataagatactgactaagtttgatcatatgagatcgtttacttttgagatgaaacgactttcacaattttcctctgcttctagatttatatctgtgaccgtctgattatataatccttggtacttgttgattagttcttgtcggcaaaggataatactctccaaaagctatgggattgaaaggtgtttgttttcttttgcttaaaattgacctttgacaaattctgtccaatagaatcttcatttttcatattgttcttcttactttcgtaactaaaataataactttgagagaaagataagtagccaacctttagtactccacaacgaaatttctcttaaattgtaatcggttgactaatgtcatcctcctaaaaatttcgttaactttgaatttctctttttcttcttacgattttcttaaatatatgtgaatagaatagagaaaatgtaaaacacggcatgtgtaggctataactgtttatataaaataataataatgatgtgtaaagcaacaaacgtgaggtctctccttcctctttagttggaaagaatttta

SEQ ID NO: 2072 - DNA, 3000 bp, Unknown
  misc_feature (1)..( 3000): cDNA_ID_2047224_gDNA_ID_1620484_Annot_ID_158416 3000 nt of promoter + ATG
cggttgagtatctctggcgtatgggctcatgatgtcgcttggagtctggcgagtgcagctgaagtgacaaggatgccaactgtgacatcaactctccttgaggccataaaagaaagcaggtttaagggtctgagtggtaactttcagttggatgatatgaagttgttatcagacaagtttgagattgtgaatatgataggatcaggtgagagaagggtaggattctggaattctaatggtagtttcagcaatagaagacaattatcttctactcatgacaatctggagaccataatttggcccggtgggtctgctcaaagtccgaaagggagaagtctaagagagagcggtagaaaaaagcttagggttcttgttacatctagcaatagattcccaagactgatgaaagtggagactgatccaataacacatgagataacaattgtcgaagggttctgtatagaagtctttcaggcatccattgcacctttcaactatgaagtggagtacatacgttggctcaatggaactaactacaccaagcttgcatatgcacttcatagccaggtactaagcatggctcgattttacaattgcaagtacttttaaaatttgcgtagactgtgtgtgggaactgacttaattccattgataatttttgttgcatcccttagaaagacaaatatgatgctgctgtgggagatattacaattacttccgatagatcgatgtatgttgattttacgttgccatacactgaaatgggtcttggaattgtagcagcaaaggagagaagtatgtgggtgttcttccaacctctaacaccaaacctttggataacaagtgcagctttctttgtcttgacgggtattatagtttggttgatagaaagagctgagaacaaagagttccaaggatcttggcctcaacagattggagttgtgatttggtttggcttctctacccttgtttatgctcatcgtaagtaccttttcacattcttatataccaatttggccataagagaagagattgtagtgatgcttaccttttgttgcttactctgtgtgacaggggagaagctacaacacaacttatcaagatttgtagttacagtttgggtatttgcggtgctcatattggttacaagttacactgcaacattgacatcaatgatgacggtgcaacaaatacgattcaacgccaatgaagattatgtgggtcacctctcgggatccctcatcgcaaatgcggccctcaccaattccagcctcagagcaatgagattattgggtctcaatacttcagaagattatgctcaagctttgatgaataaaagtgtctcatatattgttagtgagttgccatacctgaaaatcctccttggcgagaatcctggacattttctcatggtcaagacacaatctaccaccaatggttttggcttcgtatgtatccttcttctgcatcatcagttgctttactcttgattttacttgttgaaaaagaaatgtttggtttgttatactatgttccagatgttccagaaggggtccgagttggcgcctaatgtgtcccgggagattgcgaagctgaggacaagcgagaggctaaacgagatggagagaagatggtttgataaacagcttccatacacaaccgatgatacatcaaatcctataaccctatatagattccgtggtttgtttatgatcaccggagtttcattcgctttcgctcttgcagtacttctcattctttggctccgagaaagatgggaaatccttgtgaattcggtcaatatatacttctcacaacgacttagacatttcaggatcctcttcacaagaactatccatcctagtcccctcggcctcgataaccccattggcgagaatgcggttcaaatggctcaacgtaacagacgataggaaatgagtaacatagagagaaaacaattgttgtgatgtggtacgtctctgactctgaccttggagcagcaaagaagatcctccagtgatccactagctcctgatccaagccggcttacgtctgaaagtataaatgattgttataccaattttgtaaattatagtgtgatcatattcgcaaccacttttgtaaatagcaaaaaggtattggtaatatattgagttaaaatttaacacatttagtttgagtattttttggagaatatgatacttttgcaaagaaaaaaatactttaattcttcattttataaaccttaaaaaatgtaccaaactttaatcagtatgtaaaagactcgtgcatttcgtttgttggtatttgtgtttaatttcttccatcaatttatttgagatgagacgactttcaccatttttctctgcttctagatttatatctttgactgtctaaattgtcaaatcccttacactaagtacttttgttgatttgttcttgtcaacacaagttaatacaaccccaacaaatatggagtttttaaccaaaaaaaaaacaaatatggagttctacgtgtaaaaatttcagattaaaacacatttgttcctacgaccgttgacaaatgtttttttttttttaagacaaatgatttttttcttttgctaaaattggttagttgacaaaattttatcctatagaatccttttcgaatttattccgtatttttacctttttactttcttcaccaaacattttgatagatttagtcagattctcttaaataatgaaatgatttgagagacaaaagagtagccaaactcgatagcccataccgaattttacgttgactaatgtaatttttcttaaaatcatgatgtcatcatcttaaactttgaatttttcttcaaatatagtacgtatgttaatttttaaaattggaataattagacagatgaaaaacaaaacacggcatgggtttatataacaacaaaataaaataatgactaaaagcagcaaacgtggggtttctcctttctctctagttggaaagttttttta

SEQ ID NO: 2073 - DNA, 3000 bp, Unknown
  misc_feature (1)..( 3000): cDNA_ID_2047218_gDNA_ID_1620484_Annot_ID_158418 3000 nt of promoter + ATG
gcctaacgccgttaagttgttcgacgaaaagcctagcttacaaaaaacaacactaaagcaagcccagatgaaaacataactctatggaaacgtagaaatacgtactaacgagtaagtaacgattacatgtaacataaagcttaatgcctataagttgttcgacgaaatgccaagcttagagaaacgaaacaaaagcaagttttgatgaaagataactcaaaatacatacgagggtaatcatttcttcaagaacggaagtcacttgttcgcctcctttaagcaaagcttcatactcagctggatctaatttatctttgacattagtttgattttgctgagttccgtatctttcgaacaattcttcatcggtgtatccacctccgacctcgtaaggagcgcaaaattgaaccagacgcttcagtttctgggtttgctttggacggaacgaagaagaggtgaaaggaaatgagcaaataaccgatggaattatgagagattctcttttagaaggtgatggtgtggaggaaaaacgaagatgaatggactgtaacatagtttgttttctcgtttcggattcaaaaagtttgaggttttgggtttatgcaaaggaaaaaaagataaagaatcgaagaagacgacggggataaattggaaaaaaataattcgacaaaaatttaggaaatatatgcgccgtctgtggggatcgaacccacgaccacgtggttaaaagccacgcgctctaccactgagctaagaaggcttggtgcttattatgtaaagtttaaaattttatctcaaaataatatacccaaattacaacaaaaacaaaccatttcaagaattctttacataataagtttgtaatgattgattggtttgtcaaataataccggttatcaatattggttatttttataacactacttaacttgcagctttaagctaggtaaatggcacaaaaggataaaacctattaagctttttttttttttgttaaaagttattaaactacagtttttatcattaatattcttagtttgatacacaaaatcaggtttcaattatggaaatcttcctagttgagatcagcaaccatgtggaggaagcatggaggggtccaaatgatataatggtgttttatgattcttattaagttcattgcctacttagacaaagttgagcgatcctatttataatgccatataaagatctcaatttatttatatcaatatttttatcaaatggtaaaatgagaaacaatgtataaatgtgtatatatataaacataatcgcttaattacaaatataatttaatttaattgaagtgaggaagctatagataaagtaggcatggcaaaggattgcttcatattttctcaattattacaaaatctctctttctttctcattcactatgtctggcacatgctttatttcctaatcctcttttaggagtagctttttagtacactattgctatcaaatattttgtccatgcttataacattatagacgttacctataacagtggtttatacatgattattaatagttatagacttaagagtagaataagatgagcaataaagttatattttgtagtataatcggatcaacctttaactacaactcatgcactttttgctgactcaattttctaaaacataatggagatttgtcaacgagttttatgtgtgtagatcaaagcattgcaattacttcagaatgctttgatcgaaaaatattgacacgaaaaatatttgtcaagtgaaatattttagatgaaaaatgttcgtttaatatgcgaacttttaaaatatagttatttaatacgtgaaattcgtatatgggtatttaatacatgtaaaaattattgatcggtcatttcatataaacttaattattaaccacactaaaatctacccgatgttatttggcgttaatagacccgataacaactattaactagtcttcgttagttcccaaacgacgtcgtttcaccataatcgaaatggaaaacatgtcatttaatactccaacttttaaattatagccgttttatacatcaacttcacatgtgaccattttatacatgaactaaacgttaatctgcggttcgaaatatgagaatgcgttgattaggccaaaaagacatacgactatctaggcctaaacattggaattacggtttggattcgattcatatttatttggattcagataattcggttaagagaatttattatttgttaggattttataaatctacagttcagataggctcgatttttgggagaaaacactaaaaaattgttcaatttaaataaaaattagtttaattttactaaattttggctaaactttgcaaaaatatgttaaattttaatgaaaataactaaatatctaggttatttaggatatgtctcttatttaaatgctatttttggctcttcttttttagttataaataagttttacatcaaattttgtttgggcttttcatataaaaactaattaacagaaaaatagtaagaaacaaatattgagaaaaactagtcatctttttttgttcaaaaactttaagtcaataaagtttgaacttttaaaatgaatccaccttataggatgaataaccaaattactcaaaacgaccgttacattcagctccaactagtttattagccgtaacttcataaataccctatttaccctctcgaatgtcacgagaagtcattaaaggtaaagggtagaatcggaaattcacaaaatctcaaacgacaatacggagtcatggacccctccacaggtcacagttttattgccaacactaataaaaaagttgattgcgaaatttaaaatcgaaaaagctaaaaggggtagtttcgtcataaatttgaattttttctttcactgccagctctgctttagagcttctctacttcttcttcttcttcaagttcgcttaagagatcgatcggagattcggagtagagaaaaatg

SEQ ID NO: 2074 - DNA, 3000 bp, Unknown
  misc_feature (1)..( 3000): cDNA_ID_3065820_gDNA_ID_1620484_Annot_ID_158417 3000 nt of promoter + ATG
ctaattctacgtctttaaaccagactttttctctagctttcgacatgcatgatctatttttaatacggttgattacaaatatgttccattcaaaatattctcaaacaataatttaaccatttatacgcatattagcaaagatatgtcattcgaatttgaccaaaaatgcgcacatggttatcatatcctagaaaactttcaaatcagtgattatcacattccatattcaaactattgctatttatttatttcaatatatctatatatataatattaattgtcaacaaacatataaaaccacaagtagtgatgctagttgaagttttttctttttcttattaacgtataagtcttttgagtctatgaccatctacatccatcagtagtttttaaatttatctatcaacttgacatacatataggactggctttgcctaaatggttggccctcctatgtcaacttgatatacatatagtaatcttttaaaatatatatatctagttgttctggtcggaccgtattattgtgtgtacaagttcgtacatattaacgtgtgtgatgtctatatgttaaaatgtcaactctaattagctatatatacgttcttaattctcctagtaattatatccatatcttaaaactttccaacaatcttaaacacaaacacgcaaaagatggaaaagagtcttcttgtcctctgtctcattttgttttttacttatagttacgtctcggctaattactatccacctaaagccttagtatcaaccgtctctaagaacacaatcttgcctatcttcaccttcacactcaacacaaaccaagagtttttcattcacatcggcggtccctatcttgtccgtaaatgcaacgatggtctccctcgtcccatcgtcccttgtggctcccccgtatgtgctctaactcgtagattcactcctcaccaatgctctcttcccagcaacaaaatcatcaatggagtatgtgcttgccaagcaaccgcttttgagccattccaacgtatatgtaactctgaccaattcacctatggagatttatccatctcttctctaaaacctatatctccttcggtcacgatcaacaacgtttattacctatgcatcccccaaccgttccttgtagacttccctcccggtgttttcggccttgcggggcttgcacctacggctctcgccacttggaaccagctgactcgacctagactcggactcgagaagaagtttgcgttgtgtcttccttctgatgaaaaccctttgaaaaaaggtgctatttactttggtggaggtccgtacaagctcagaaacattgatgcaagatctatgctctcttacactcgattgattacaaaccctagaaaactcaacaactatttcttgggactcaagggtatttccgttaacgggaataggatcttgtttgccccaaacgcttttgcttttgaccgcaacggtgatggaggcgttactctaagcaccatattccctttcactatgttacgaagcgacatatacagagtctttatcgaagcattctcacaagccacatcgggtattccacgtgtcagtagcacgacaccctttgagttttgtctttcgacgacgacaaatttccaagtgcctaggatcgatctagagctagctaatggtgtgatttggaaattgtctcccgcaaacgcgatgaagaaggtcagcgatgacgtggcttgcttggcttttgtcaacggaggagatgcggcggcgcaggcggtgatgataggaatacatcagatggaaaatactttggtggagtttgacgttggaagatctgcttttggatttagttcttctttgggtttggtcagcgcttcatgcggcgactttcaaacacggccatgagaatgtcaaaacaacttgatagttgacattatcttgtgattgaatatttatttgtcagtactctggcttcatttgttatgtaacattcatgtcaagtgtggttttaaaaaatttagtcaatgacgaatgtcaaagaatgtaataaaacactaaagttttatcttattattaatgaaccttaatatataagttgcgtcgacaagtcatttcactttatataatattaaagatgttacataagtttgataaaccatgtcaattattgctgatgatttttttcttacttcctttgttactattagtgatttatttggttatttttcgtcaaaccatgtcattatattaaaggggttatataagtttaaactactatgactactaaacgatatgtagttagtgaagtgacttcttgcagatttagcaaatacctcagctacttggttagctcctttttcacaaaactacaagtgggatgagctaactctagtacatctctaattacagtatgttggtatggcaagatattttcgaaaaaccaccagataaaattacctaattaaaaatcaagcatcttaatatataagactctcattcaaagtgctacgtatctaatcttaaaacttaaatggcttataaatggatttttttcagtggtgaaaaatcccaaattatgttcaatccaaggatcgttcatttttgcactttttaagtttctaattgagtacaacgatatatgtcaatgtcagtgtaataatacaaaaaagttgtaaactaaagtcggaattatttgattttcttgtgttaaacccataaatccgattctccaatccaaagcatatgaagaacaaacactacatgagaaggttttgctttctttaaactacattccgttatgcgattctacctacaaactacatgacgtttttgttcacgtagtacaaacagcacgcatgtctaacaagaagatacaaaacggccaatatctcttccttgtctatttttgcatgttgttgaactcgaaactataaattgtaacaaacttcttattcttcctctgtgagtgaaaaatcaaaaatcacaaaagaagcaagaaaacaaaaaatg

SEQ ID NO: 2075 - DNA, 3000 bp, Unknown
  misc_feature (1)..( 3000): cDNA_ID_3065827_gDNA_ID_1620484_Annot_ID_158413 3000 nt of promoter + ATG
agtagcagcaaacagagacaattatagagccagattacaaaaactaacctacccatcatcataaatccactaaattccacaaaatgtgtaaaatctctatgaactacagcaacaaaatcaagggttctcttcgatgagcatcaaaatcctgtaagcaaataaaaaaaaatcaaaactttattagcaacaacgaaaattggattatcgccagcgaatcaaaaagactaaagcgatctttaaaattgaagttgacttagaaaaatttacaacaacttacgaatcaaaatcagaaacacaaaacgaaagctttggtctttgtagtcgtcgttgtcgtggtggtggtgctcttgttcataagtgttgaagagcacaatgaagaaggagaagaaaatcgcatctgtggctaagtggttatgaatgatgatgatgatgatgatgaagaaaggagttgggaataatttaataaaggagtcgtctttgtgagtgagttgactgggactttggatcgtcgtcgtcgtctagtgaaagttcgtgaagaatggggcaaagaaaagagagacactgatgatgagaacgcaatgactcccaacaaaaaccaaatcggtctttgcgcgttaaatgttttttttttctttcttctctttttgacttttcaacatcatcatatatattatcttgtttgttaggagatggacaaatttttcttccatttggtatttttcgcttttcattcgtttttagataattctggatattttgtaaatggttttggtgttttgaccaaatcaaagaatggaatatgacatttacaagaaatgttttcttggtattagtttttgacaaataccaatgcataataatttgtatcacaaaaattgaatatcatgtcacatatttaaatacttattaggagtagtacttattttgttgttgttggaatctttaaattatgggttgacagttatatatatatatatatatataaaaagcttgttcatttagcagatgtacccgccaaccacggttcagcaaacaccccaaaatgttaattcgtgttgtttatgtattgtcagtttgtaacataacgattttagaaattttacagagtgtttatatacagagactctaataccatgtagactaagagtatatcgaatatatgaaacaagatgattacagagtgtttatatacaaagactagaaagctactgaaggaaacttaatattgtatacaatgattatgagcaattaacgtgattgacgatattgattctcttcattatcttgattgatatgattatccttgatagtcagtttgtaacataacgattttagagaggagataaaccacgaatcacaacctctagtctctcccaagccaaatccgccattcgtgacctgaaccaacttcgaaattcatttgatatttgtaatgttttgtaccaaatcattcaccatatataatacaattgtagaattccaacaatttgggaagttgtaagatttatttactcttggtttagtctttcctctttgacaaataccaatgtataaccaaactatattttcattgttgctcttattaagaaaacaatcatatataaattttgcattcaaaaaaattagacacatagtttcatccttggagacaatttatatgatcgaaacatccgatgaagaatatcagtctatgaaagattgtgcaatctagttttttccccattataacatagccttaagcatgaagccaaagcttcgtcaacaggttaaaaagattgggtgtttggtaaaaaaagttaaggaatttaaagagtgattgatacacatagatggtgaatataccaattaatagaaaaaaaggaggaaagagtaaattacaagttcccggcagtttcagacaaactcacgtgacgcaaactttaaagggtttgactagagccacataagctgtctggtccgaaccagatatgatagtgaagaacgagccattaaaccacaccagtctctctcacgtgccaactaagtaaaattgggtgtgcttaataaagtgtctgttataaatcgctttgcttccttttattttgcctctcttctactttcctctttcctttttagggatttcactttcctcttctctctctctctctctctgcctaacctcgatttctctcgatcgctcttcaccatggatctacgatcatgtggtccttcttgaagttttttgatctcttcttcttacgggtttttacttcgtttgattttcctggtaaagttgctttttttttatcttctcttgaggtatatactttttttttgttttgagttcatgttcgtgttctcttcactgtagctagggtttgttgatttctccacaatatagctcaaaatttctgctatgaccttgaattttggtcgtgaagtttgtttatgtgatggattaagctgggatttcatagaatcactgaatcagcttgcttgtttctactctcatttcgtcatctactcttctcttaatctgtatttgtattatttcagctaatttttttataagtacgtctgattagttcttgaggttgaattatctttgtgactaaaaaatagtgtgaatttttcttgaatggattcatttttttgggggtttcttgttcatttgtctttacttgccttgtaggccattttcttacatagttgtccactatgacttgtacggtcttgttacagagctaatttgtttttatctttaacgagtgatattgtcattggatagttttgactgatctttgtttatctgttcttgatgatttttttttttgtagttgtttgttgttcaaggatcgagatttcgtggagctctctattcgcagcttggagattggacttgtttgaattggtaacaatattgtgtctggcctctaatgtcgttgtactcatgtttgtttttatttgttcgggactttttaatcattacttaaatttccgttttatttaggctcttttgtg

SEQ ID NO: 2076 - DNA, 2400 bp, Unknown
  misc_feature (1)..( 2400): cDNA_ID_2047330_gDNA_ID_1620485_Annot_ID_158445 3000 nt of promoter + ATG
gatcactcattgactctctctctccgttacacttatgttctcgacgcgaccttccaaccataaaatactaatttcatttttattttcacttcatcgatatcttgtgacatgtaatatgattggcttatcaaaaatctttcatacgaattttcaagtttgttcacatctctctcccaagatatccgtttaggagcctaggaccgttacttcactttattattttcatgtggaggaactgtaatatatatcacaattttgttgttcttgttgattgtgtaaatagtagtactggatactaaagaacaatgagtatgtatctcaaatatttagctcaaccgttttataaaaatactatattattaccttaaaattgtttgttgctttatcagtattaggtaattatgagatgtcactgtttaatctatttaaacgttttatgagttacattaatgaaaaaaatctgaaaagttaaaattatacgaatacatacctgtctgactctacctactgaattttgtaaaacaatttgttatattttataagaaagttgatgttgtagtgtttactgtctcataaaaaacaatctctatttatttgatttgagacttgaaatttttaaagcttgttttaaactatactgtttttcttataaaaaaattgtattaattttttttataaatgaaactgttaaaaaaaattgaaaatttagagatcaaaactaaacctttataatcattgaaatatattggtacatctacccacaaaacaggtcaatcgtctaggtttaattataattaagcctaacatgttaatgagattcaaacgaaattaaagtccacaatgccaactcaactcaagtatcaaatctttttcttctttttttacttagcaggaataccaaactcaagtatcaaatcttttaaaatttattttttacttatgtcaatgtgggaatgaccgagttacttaagagttatgattaatattaattcttgtttctaaccaattcatatatcattgtcttggaagcttcttcatatcaatgactcaactcttaatttttttcgaaaatctgttcttacaaggtcacacaattcaattttttttttgtattgtaaatgtttatctcgttatatttacactaacgagatttaaacacctaaaatcaaattgtacgagactagtgttagttattcaatagtatgatgcattgatgcaacaaaattcgttgcgattatttatgatccttatcactaccatgatcatttccattaaggttatacttacttcctttttgatgcataataattactcaccaacattgaagcgtggtcgacattttcattggcaataagcataacattcatttatttatattaaaacacagaaacaaacaattattaaataaagagttctggcatttctctattttagtccacttaatttaatactatcatcttcaaacaagatttcatcattaataatttaaaaaattatacgttacatagtgtattaaatgaattatcgttgggatacactttcacatttttcaaaaacgtatgaatcataatgtgacacatggagatttcccacaaccgaggctcccatagtagatgcttatgcaattcatattcttgcagcttaaactcttgcaagttcagtaataacaccgtgatatgaaaaataaaacttagccctttttaatttttgaacttattcagattaattaaaagcatacgtagcatatttaagaatataaagcagagaatcaaaataacatattgtttcaatggcacccattttagctagtcgatcagtaactgcattcgcagatcttcgaacccaccaaaaatcgacagcttcaaatcctttgagccaatatgacgctaaaggtcaaaatattatgaccctaaatgtcagaaattgaccccataagtcataagttaaccgacaccaaagctgatattcgttagagtttagactctccttttcttaatgatcgttagttttagttgggaactcttgggctatcggttaaaattaaataattgtggtcctcttggcccattagtgctgtccaaactggcccaatatgacccagtggatggtcccaacaaacgccgcgacaaaactccgtcgctggctgaggcaatgttcaccggtggtggtagcttttcttctactccgacccggctgaaaatgcaaatccctaaccctagacacggccatggtttataaacctcatcaatttcttctacttatctcttctcaaagctaaaccctccaagatattcctctattaggtgcaaaaatcaggtaaatctctatctgtccgatttgaaaccctagatctgcctttcttctctcttcttttgcttttctgggttttgctcaaagatg

SEQ ID NO: 2077 - DNA, 3000 bp, Unknown
  misc_feature (1)..( 3000): cDNA_ID_3065846_gDNA_ID_1620485_Annot_ID_158466 3000 nt of promoter + ATG
ggttatatctagctgagctttcaaaatgctcaacctcaaatcattctatttcatcctcacaaaaagctctcaggtccttaaagttgatcccagccgctgcaagaaaaagccttcctgtcttggtcaatcactgtggattactactctgcataccagtatgtgaaatcaccattttaaatcatttgttttgtcggatttaactataagaccatacattgattctcgtctctgtgttttcaggctattggcttcagttattgttcatgccttgaggcatctgcagtgtttcttccaagaataccactcggaggcggtcatagctcatttctctagtctagccatatcatgttgcattcattcaatactaacagacatttattcacttgtactgaattctcgtgaaacgaaataatatttgattcaagaatctgtatcctaggcaacttccgttattgaaaatcgccaattacactcgtttttgttttcattcaaagtttatgacagggaaaacgatcatactccgccttggccacctcgttcttttaatggttgaaatgatgaagtaaaccattgcttccaagctgcgtccttctgttgctcgacccatgagaggaaggcactgtctactaggcaaaagatgttgacgtaaagcaactggtattgcacgggaacatatctgaagtttgcaatctgaagaagtggccatgctccgccttcaagagctagagccggaagaaaatctctcttgagtccttctttcacttcagctgtgttctttcctgtggcgaatcccatgtatgtgaagaacaccagtagatctacaggtccaaagataagaccatccattgcaacttttgcagctacaaaacgtgttgactttggtacatatcgaagcttcagttttatgaatttatccaagccttcgtacctgtgcaaccgcaaatagaacaatatcaggtttatcaatctaccatagacaattctttatcagtatctgattcagtgtcactagtttatgtgagcggtaacacgaggaaaagctataacgaaatgatctgagatcagaaggaaacaaaccagaagtggccaacaggtccgacaaaaccaaatccaaacatgctcgtgatagctactcgcttccagttgactttgaattctgcatcttgcttccacttgaccttaatttctgcatctgcgtcagcatctttatttgtttcctgttatattgaacatggttttagtgcttgagccaaggtaagtcaataaaatctcaatatatagcctaaactcagaaacaatataccatgacctctaaaggcaaatgaattttaaggattgtctcacagcagaagatgttataagtaaagaagtatcgcataatttcataaaaggtaagcagtagactagagctgctaatccataacggcatgaacatgtatcaccaatggaccaaagggcgatttatattgcaatgttaacatgaaaataccacaccaacaacatagagagtcacaaaacacattgtctccattagtatcttttacgtattggtatcaccataccatataagctctcttctgaactgttcaaactttgaaaagaactctgaagctgtagtagcccacagttctggcttaagcattaaaatgtcttcgattgttggaaaaaatagccattaggaaatcatggaatctcagcaaacaagtaaatggacgttatactacaagaaatttcacacagccatagagagagcctagaaaagaatccgagtgctattgctcaattacaacttaggcaacacaacctaaagttccagtatctatctaatagagaccataagctaacaagaaatcacagaaaactgtaaacggagaagacgaactcaaatccttgaaagatttagcagcaagaaggtgagaacaacgggaaaatattccaagtatcaaagaaaaactccagaaacagcatcaaggtctaaggaagaactacataaatcaacacattgatgaagcattaccacattcactgaaatgtcgcgaatatactgatgcacaagaaccaattgacgcagatatatcacgaaacccagagatacatagatgcaaattcaaaaacctaaaactaatttcatcaatccgcacgaatcggagagaaactccaatttgaaacttcaatcgaaggtgagagagagagaaggagatcggaaaatgactaacggtgagacgaagaagacgacgtttcgcagtggaatgagtgatgtattgagcggtgacatcgccaaatccccaaagaaatccagaactgatgacctgagttttcacaggatgaaccgtcaggcatcgctggtaccatctccaaagcttcaacattatgtaccagccgtattcgccgtcgccgcgagagagagagattgggacctgtcacctgtgacggagagccgccgtggaagaaggcgattgtgattggttagaagaaagaggttgatacagtgcttaagctttcttcttaaacgtcttcttctctttttaattttttaatcacttctttttttcgagtcaacagtcaacactacaaaaaggctgttgcaatatcattgggcttttaccaatcaacattttctttccggcccattaacatttaacattctaatttaatttgttttttgtgttgacgatgaagaaaattgggtcaaatgagaaacctctcattttaacctctctattttttaggattttaaacccccaaaatttccctatacactctatcttgcggcggaagaaatctgtaatcacaaaggaaaaggttaatagttttttttctttctcttttttaaatattttgttttgtcgtcatcgaatcttttcgtttagggttatctgatgttacatcaaggttaaagaaaaccgataatcacagaagcatatagaaatcgtttttgaaggtacatcgatcatcgttgagacttactacgttacaacgatcatcgttgagacttaaaca

SEQ ID NO: 2078 - DNA, 3000 bp, Unknown
  misc_feature (1)..( 3000): cDNA_ID_2047274_gDNA_ID_1620485_Annot_ID_158464 3000 nt of promoter + ATG
aacacaatggcttggacacttttatacagatactgacatgatcagagcaataagagaatcctagttgtggagagttaataatcttgttcaatcaacatgataaaagagaaaaaacaagggtataaatatgcaagaaacagattacaggttttgtagaatatactaatcaaaaatgcactaaacttggaacataagagcacacaagtgggtaaacaaatttgtctacagacattccaaggtccacttgttcccaggttccatccactccaacgatgtaagctttgttgcgagaggacgctaaataacgtttttctttatcaaaaacaacaacaactctcttctcctcgtcgataaagaaactcgaagctctaacttgaaactgaaacttaagtgagtgcatatccacagctaagaacaccttgctgttccacaacaccgcattgggctcaattttggttgttacccagatctgcatctccaatgtacttgagcactgaaataaaacagcaagctgctcttctctaacactagatagactcacggtatctaaaacacacggctgactcggcagaggtaaacgcgacctaaatctctctcttgtgaaatcaaaacagactaagaaagtatggccgtatccgtgcctctctctagcaatccagtatgtatttcccttgagagacacgccacgaatataagaatctatcttccagtctggagacacatcaagaaccttccatgaatcagagttgatattgtagattttgaactcagaacaagtgggagaaaaatcaataaatctcaagattttgtagctgcggcttgatttgctgctcttcttgtatccgagagcatacgtatacatgtccaatttgtggaaattatttgtagactcgatccaccgtgtttgcccccaatacgggttccaaagaacgaccttagcgttatcttcgttatcttccgtgatgcatagcaataaaccgtcgcagtgaaagacttgagatacatcgacttcatcgcccaagctaataagctcaccttcaggcttaatacacgactcaatgtcattgtgaacgttgactcgaatcaaataaaccctaaaatccatcatcaggaccatcataaactctttttccttcgctgctactattgcttgataaccaaggtgattctttgcaaagctctcacctttagataaagtattccaatctttacaagtaagtcggacgtttctcagagatgttaacgaaaccctagagagcacctcttccgccaaatcattagggagattagacatcttcgtcattgtttaagtctcaacgatgatcgttgtaacgtagtaagtctcaacgatgatcgatgtaccttcaaaaacgatttctatatgcttctgtgattatcggttttctttaaccttgatgtaacatcagataaccctaaacgaaaagattcgatgacgacaaaacaaaatatttaaaaaagagaaagaaaaaaaactattaaccttttcctttgtgattacagatttcttccgccgcaagatagagtgtatagggaaattttgggggtttaaaatcctaaaaaatagagaggttaaaatgagaggtttctcatttgacccaattttcttcatcgtcaacacaaaaaacaaattaaattagaatgttaaatgttaatgggccggaaagaaaatgttgattggtaaaagcccaatgatattgcaacagcctttttgtagtgttgactgttgactcgaaaaaaagaagtgattaaaaaattaaaaagagaagaagacgtttaagaagaaagcttaagcactgtatcaacctctttcttctaaccaatcacaatcgccttcttccacggcggctctccgtcacaggtgacaggtcccaatctctctctctcgcggcgacggcgaatacggctggtacataatgttgaagctttggagatggtaccagcgatgcctgacggttcatcctgtgaaaactcaggtcatcagttctggatttctttggggatttggcgatgtcaccgctcaatacatcactcattccactgcgaaacgtcgtcttcttcgtctcaccgttagtcattttccgatctccttctctctctctcaccttcgattgaagtttcaaattggagtttctctccgattcgtgcggattgatgaaattagttttaggtttttgaatttgcatctatgtatctctgggtttcgtgatatatctgcgtcaattggttcttgtgcatcagtatattcgcgacatttcagtgaatgtggtaatgcttcatcaatgtgttgatttatgtagttcttccttagaccttgatgctgtttctggagtttttctttgatacttggaatattttcccgttgttctcaccttcttgctgctaaatctttcaaggatttgagttcgtcttctccgtttacagttttctgtgatttcttgttagcttatggtctctattagatagatactggaactttaggttgtgttgcctaagttgtaattgagcaatagcactcggattcttttctaggctctctctatggctgtgtgaaatttcttgtagtataacgtccatttacttgtttgctgagattccatgatttcctaatggctattttttccaacaatcgaagacattttaatgcttaagccagaactgtgggctactacagcttcagagttcttttcaaagtttgaacagttcagaagagagcttatatggtatggtgataccaatacgtaaaagatactaatggagacaatgtgttttgtgactctctatgttgttggtgtggtattttcatgttaacattgcaatataaatcgccctttggtccattggtgatacatgttcatgccgttatggattagcagctctagtctactgcttaccttttatgaaattatgcgatacttctttacttataacatcttctgctgtgagacaatccttaaaattcatttgcctttagaggtcatg

SEQ ID NO: 2079 - DNA, 3000 bp, Unknown
  misc_feature (1)..( 3000): cDNA_ID_2047315_gDNA_ID_1620485_Annot_ID_158451 3000 nt of promoter + ATG
gctatttcgtcgttgtatttagcacatatttatccatatatgtaagttggaaagtccatgccaaagaaagatttgcagaattaattactaccaaatgttaggggtggaaaatctattaccattagaattgggatcacttttaaataaatttcagtgaaaatattaaaatatctacgatacgtcatcgactttttatggattttttttgtcttaaaatttactaaggatctaaatggtaaccaatgattttttctaaattcgtctgaattgttgattcaggctgaatttttagtgattttcagctgaatctgactaaatttttacattttcaaatggtaaccgatgaatctaccttaatttttgtttttgtgatttgtggtagaatctgtcaaaataattaagactttaactgaaaagtatcataaaatatttatgaatattgatagaacaattaagaaaatataaataaaatagacaaaaatatctaaaattagtactaatgtctaatgcaaataatatattggttagcaacattgaattattcttccatatttaatttttgaaacattaaaaagacgtaaaataattaacgaaaagctttgtcaaagcattattgaaaaattaatttcaaaagttaacatgaatatatagattatctaattattattttttaattattccctaatactttaatcaataatatgtattgtcttcaattggtgattaactcaaaaattttaacttgatcattagtggtttagccagtgagacagacaacttggagagtcacaaagtacgcgaaaataaggtacttctgcaaactgatatggaaccgtaaatgaataaagaaaagatgcgacaagttggggcttggaagaagcatcaatgaatccattattgttctagaaaatgatgactatggactgtggagaagaagaagaagaaacagtttctttgaggtcaagattatcattcattggcaaagagaatacgtttcaagtctataaactttaacaagtaaagatgttcctccctgcgctctctactccctcctttaggggttacagaatgattaacaattaaagcgagtatattgagtttttagatttgacttccgattatgattatcaatcttgaaatacataagagagtatatagtttgaagaattgatatataacttttattgataaacttagattataatgcgattgtaaatattattacaaacattcacatttttgaaggattaggttgcagaatcctcccctgcgacactgaaaagtacagtcgatgtccctcttgcaagatggggatttgttcaaagtgtcattctcatcgatgataccgtactgtggacttgcggcttcaccttcaacaattacgtcagcaactccggtcagctttcttgcttctgctccaagatcttctcatccatcatttgcataaacaaaatggctttaaggttagaaatttccatccactaataaaagttctaaaagttaatacgatcaagatcaaaccaaaattttgctcgttggtaaatgttattttccaccaaaaatgaatcaaaacctagaaatgaattatccactacgctcttaaaacttgtcaaattgcaaaacaatataattattacttaaaaagattcaggattgaatatgttttcacgatattttagatattcagttagtatgattttcatatgttttttacttcttgtttctgtcacttgtaacaaaaacaacttcctacaattgttgacaaacgaaaaaataaacttactagatgtgatgaccaaaatgaagatcaagagtgggagcttgagagaagcgttcttcattttcaaatttttagaatgggagctttggatttttcaatgtttagtctcgtgaaagtttgctatgtattcgtagtcttttagccataaatttataatgtggcaaatcaattgttcaggctgttgcctagtcctggtcaagattggagatgttatcttaccaaatatgaagggtaaacaatgtatcaaaaactattagtcagatcttattaattagtcaaaattcaaaacaatatttctgtaattggtcatgtgtatcttgaccagaaaagctagcagaccataacttttgtaacaaagtataaaaagatatttctatggtgcttgatattttgtaaatttagtagcaattaactatagcatattttcatgtggaatttcaaatatctttgttaacgattttggatttaacaaaactcgaaaaactgaaaataataataatttgtaaattataacatttacttggctgaaattgtggaatatgcggaatagtcttatgaatatataatgtacaaaaataatttatcataaaaactatatatagcgtgcataatctgatttcaatccttagattatagattcttataatctgattttagttttacatgtagtagcacttcttcaaaattttagtgcgtaatattattctttttttttaccgtatagataaataatgtatcattatatacatagttgatatttaagtttatgcagttagttataattttttttaataaaagaataaatcaagttaatgaagcatgttcgtttcgttaccgccggtggttgcggcagcggcagcggctgcggctgcgacaaacctaccgcaggttgttgttcgttttgctgccgcaaccgcagcttttaattatcgacgctaaaattagtcggcgtccaaaaattttcgccgcaaaacgctgcgttttaccgcagatagttgcggcaactaaacgaacataaatagctgcggcgacgaaacgaacaacctaaatcatccaaactccatatcttgtaagtttcgacataaaaactttgcagtcttataaactaaatagtgagttatgagttgtgtggaccgcatatttggaaaagagaatgaccgccagtgatttcagaccatttgtatgtataatcttggtgagtaaactggttgacattgatg

SEQ ID NO: 2080 - DNA, 3000 bp, Unknown
  misc_feature (1)..( 3000): cDNA_ID_2047299_gDNA_ID_1620485_Annot_ID_158456 3000 nt of promoter + ATG
accttacacccatcgttacccacctcctcggcgatgaacaactccagtttctccttctcgtgtcggcgagaacatcggccttggaaccttattcaacgtcatctcgtctcttgacagtgaccaatttgttgtccattgattcgttcgtggaagatccttcgactacccgtgacctcacatgtgccatcatgccttatagtttgtggctcaaagctctcatgaattttatgtcgtttcacattatctatcatatcttggttttggggaatgcctcttttaattatgttttaaactttgtgatctttgaatcactccttcttatatttgttttgatttgaataaatgaaaacaaatctttgcaaaaaaaaaaaaaaaagattatatcgacaatgatattgtttaaatatatcagtctacatttatcatcttctctgttagactcgtcgttaaatttctatttttttaatagtttacacagatgttttcatattctaactatttctttatataataaatttgtatatctagtagacggatcttcaaaaaaaaaaacaagttctccccacatattaatatcaaaaaaattcttaaataccttatcagcattttagatttaattatgagcaaaataaatgtttagagatatgaaacttaaataattgtatcttattctcaacaattaacgaataaccaatttggagacaaatctataaactaataaatcttgcttctctatagggtgcgcttttgtccctgttacgtatgaagtgacgtataatcgtctactaaactattttatccgtacgacatcagtttcctataatatttgtgtgacactataataaaaatgaaaaatcatgttcgtcgtatacctgaattaagcaacgtataatgaataaactttccataaatacaaaaatactcgattagtggagtgtgcatcgccaacaaaaaagattctacgcaacgtgtcgaatcagtacttgttcctgagttcctccgtcactaaccagtgcggaccatgtcagtatccaagcacccacacgctcgtcgtctcttgaaaacatctcacacaaatacacaacggctcggactaataacttgccatctaagaaaagctaattgacctaaggctttgtggcacctgcatgtaaaaagcaaacacgaatttgccacgttattacaaagcataccacgtcaccgtctcactgttacactatctcttgttctcctttatttcgctatggacaacaaaaattataaggtggggaagagatgtctcaaaatacttttttatcgtcctctcaatttatgtaactgataataatcgaaatagataaatttaattgtaggttgacaaagcgctaattttaataaaaacatatattagtttggaaaattttgtcgtagtaagtaattaaacctatcaatcttgactaataatttcaagtatcccataaaaatcaaaattgtccttaggttttgaaattgtactactgatagtacgtaattaaacaaacaaaagctatagcttgtggattatagctaatcccatttggcgatgagagtaatatatatattgttcaaataaagttgtaattaagattcgattgaaaaggtaaattatagtttaagaaaaacaaagagaggagacaacaattaaaaaaatgaaaagtggagaactgtactctcgcctatacgaggaggtcattatctccaaggctctcaaggattaaggaccatgctttgattctataaatgttgttttattcaaactatttatattattatatcatacgtaatatgtggttagcatttgacccacgtccccttaattaagtctagattaatcccattaatctatccaattaataattaggaaaattttatataagattgctattggatttctcggtggtggtttaaactataaaatagtaatgcctttgatgcgtgtgattttttattggaacttattggttttaattcttaacctagcaattatatttgtagtagtttatgttaatcattgtttaataatactcctataataactcttgcaagtagcaacacttgtgtggctatttattccagagtccatggatatgtatgtataagaaaataggagtgcttttgcagattgaagagtttgtctataaaatcatgtttacttggcatttagtgttattgtttgcaattttttattttaaattagtcggatattttaagttaaaatctgaatacacagcatgttccttctaacgttttttaacataattgtaaactaaagaaaaattataatataataaattaaattataccctctctattcattgtagaagatttgtttgtttcaccaaatgtgttttttttttataagttgctctcactcttgagagttttggagtattttgaagaggacgaggttcttttgtgaaaaagtgaaagaaacaaatcatgtcaagaattagaaagaaatcatgacaaataattttgtttgtgcagaaattacaaatgaatcatagatatccttctaattcgggatcggaaaccagttgaaaaatcgatggactaagctttctatattgggactagcttacccttagaattagtcaagcagcttaaatcatctatgacttaaaattataattaagaaaaaacaatgcctaaatatgcatatatttcaaatgtatcacataacttgtgacataagaaaatataaacaaaacaaaaagggcaaaaaagacctgaaagcttagaggcacacctgcataggtcccacagttcactcgtgacaccgtaaaaggcaaaacacgaacccgccacgttatcacaaaaagcaagccacgtcaatatagtctcactgtcaactacacttaacttactattttcacatctcattttcctatctttatataaaccctccaggctcctctttaatttctttaccaccaccaacaacaaacatataaaccataaggaaaacagagaaagagagag

SEQ ID NO: 2081 - DNA, 3000 bp, Unknown
  misc_feature (1)..( 3000): cDNA_ID_2047282_gDNA_ID_1620485_Annot_ID_158462 3000 nt of promoter + ATG
cctggttattgtttcagcgatttttttgagtttgactacagacccttactccttctcaacgtcattatgtcttgtgacaatgaccaattttccacttctcggatcgaccgaagttgtgtctccgatttaccttcttctcgtatgtggcattgtgttctacaacttttgtctccgagttagcatggttttatcatcggactattgtatttttatctttattgcttttatttttgttgtactaaagtctgagaatgatattttcttaagctttgtactaagtttgagtgattgaacgaaaacaaagtttattgacaaaaaaagaaaaggaaaacggatagctttcttggctgaactatagcaaatgcaatttgcaatgttttaagtcgttaaggtactaactactaatctcaaaagatgaaaaagattatataagtgaataaaatatcaccgcaaagtgtttatatgcatactttatctttcaaacataccagtttccgataaatatacaacaaaccttgtgtttacgatgtaatggtgttctcaattaaaaaagaaaagagagcacttttctatataacaaatacaagttgagaaaaaagccaaaattgactggaccgaagctgtaggagaatgggggcgataggaccaagggagagttacaattttatcacaagcttgtgtgtgtatgttttgtttcttttctttaaatttggatgttgacagctttaattttttcctaaaaatatacactagaaaattagagaatatttagaaggtgagaccagcgaatgtcatgccacaaatcatgttcataatgttataccaaataatcataatgtccccatgtgacgctttacttttctatattatctcgtaaccccactcatacgttttagaagaattttcacacaactaagataagttgatttttgaggcaaaatattgtttattttttctatcaataaatcttcgtaagactttccaataagagaacatttttcttattcctctcgtgacagaagcaaatcatcccatccacacaaagtcacaatccaagacacaagcccaccaatagagactccatctcctcactaaattcatctacaatagtaattcattattgctattatgttactataattgctttaaaattgtttcctatgaataattgaatatcataagcaatatgaacaaagaatgatgttcaaatcaaaattcgaagataaggatataaagttataatcgtgttgagtcatacacttcgagctaaagtttttctttaaacaattgatttagctaccacttaatctagttggtactgaacaagtaacaacataagtagaagataaagagaagagaatatcttactttgggactattagccatgatgtccacgaccaaatcggcctcctcaaaatcaatttttgtctaattttgtaatgtgagactttataacttttccataatatatagcggacgttattattttactcaaaattgtatgtggcttccatttgactactaaatgaacaatattatgaaacaaataaaatgaacaaaaaagttgaacaaaaaaaattatttgaatattttatttagaaaaaatctgttcaataatatgcaaaccaaaatatctccggcatgtgtaaactaaattgactatactaatttaacaaattatcaccgcaattacgccgcgttgaatttgtttttccttagatttggcgtgggtcatcgaatgtttaattaaattaacataaaaccaagataggccattgaccaaaatacaataatattttcataaaaccttatattattttctgaagagcaaaaacattatctgagaatctggagataaaattgacgtgacattaagaaccttaatcgaatttgattaacaaaatatttctttgttgcccgtttcaattttagtggattattttggtgtaacttgacattttagataattctattaataatagattaggggaaatgtcaatgtaataggtggcctcgaatttgtgttggtgcactccagctgtcttccttcgctttggagcaagtagaatcccaactattttctccacacttaaaaaaccttaaattactcattctcaatcttatattttctataaacgcaaatattttatgaaattttatactattaataatctaattccctaaatatatatatattttgcattttttacatcatatctttttttgcctaaaattttatacgagaaattttatactattaagaatcttattgcctaaaattaaccacttctttttttggtgttctatttcatgcaccgatattaaaaatcgtaggaatatcgatggccaaaataaaataaaatggaagaggatctaaactttgtattttatactggtcctagtcctagaaaatcgaattattcagtgttttcattaaatgcatagttcaacatattatttggcatgatagattgtctgcaaatgacacatcacttttcctttctgcaaaaataaaagactctataaagtaactttagaatttattcagttcctcaactcgatctagtccctttaattaagcaaacataattatttaaacaactcttttgagaaaacattttttctctttggtcaaataacaaaacaaattaattcttatttctacattcaattaaaaacataccaaaacatctattaacttcttaaatattttttctcaaatttgtagtccaaaaaaaacacgacgcgtatgttttttttgttgttgttgtgtaataagaagagaaagaacgtaaaagaattgacgcggacgaatcgtgttagacccaaaaagaacagctttcaattccattgtccaaattccttatcaaaaaaaaactctactctcggtggcaccagatcactcctcctctctcttctcctacctttttcacattctcttcttcttcttctcgtgagaaaaagaaagagagattctttattcattagatcgaagcaaaa

SEQ ID NO: 2082 - DNA, 3000 bp, Unknown
  misc_feature (1)..( 3000): cDNA_ID_3065850_gDNA_ID_1620485_Annot_ID_158463 3000 nt of promoter + ATG
gtcgccgccgtctgattcttccgatggattgtctaccggagttgtggtaggaatcgccattggaggagtcgctattcttgttatactgactctgatttgtcttctctgtaagaagaaacgaagaagaagacacgacgatgaagctgcttactatgttcctcctcctcctccatctggtcccaaaggtaaattcaaagatctcaacttcatgaaataaaaatcgaatatttaaccatagttgttcaattctgatacgaattgctcaaatctgatacttgattatgcattgttatctgttaaagagattacctttgtggaaaagtttcaaactttacagagatttgatgttgtttatcagctggaggaccttacggtggtcaacaacagtattggcaacaacaaaacgcgtcacggccgtcagataatcatgtagtgacgtcattgccaccacctaagcctccatctccaccacgaaaacctcctccgccacctccaccaccagcattcatgagtagcagtggtggttctgactattcggatcttccggttcttcctccaccatctccagggcttgtgttaggcttttctaaaagcactttcacttatgaggagttgtcgagagctactaatggcttctctgaggctaatttgttaggacaaggagggtttggttatgtgcataaaggtatattgcctagtgggaaagaagttgctgtgaaacagttgaaagctggtagtggtcagggagagagagagtttcaggctgaggttgagatcattagcagagttcatcacaggcatttggtttctcttattggttattgtatggccggtgttcaaagattacttgtctatgagtttgttccaaacaacaatcttgagtttcacctccatggttagaacaaaactaaactctttcttttgattttgttacattgctttgttgttttcagttagtgatgatttgtttgggaattgaatttgttataggtaagggacggcctacgatggaatggagtactagattgaagattgctcttggatctgctaaaggactttcatatcttcatgaagattgtaagtctaaaaccttaaaaattatgtacagatgtttgataaatactgtctttgtttgtcactgaggtatatatataaatatttgcaggcaatccgaaaatcattcaccgtgatattaaggcgtcaaacatattgattgatttcaaatttgaagctaaggtatgtttactcgatatgttttgtgaagtgtttttgtaatttgtgtcactaaagctcttctttctttcaggttgctgactttggtcttgccaagattgcttctgatacaaacactcatgtatctacacgcgtgatgggaacctttgggtaaaaatcatctttaatctactaaacatgtacatttatgcagtttgcttaatgcatgtgatccttgtgcaacaagttctgaaacttttggttttgggattttaggtatttggctccggaatatgctgcaagtggaaagctcacagaaaagtctgacgttttctcatttggcgttgtacttttggaacttattactgggaggcgccctgttgatgcgaacaatgtctatgtagatgacagcttagttgactgggtactttactatgactgcagataatctaaacttctgatttttctacaatttaactgttgactaaagcaaaagctatgtgtgattgatggtggaacaggcacgaccattgcttaaccgagcatctgaggaaggagattttgagggtttggctgattcaaagatgggtaatgagtatgacagagaggagatggctcgcatggttgcttgcgctgcggcttgtgttcgccattcagctcgccgcagacctcgcatgagccaggtaacttaatccttttctctagagaagagcatattggtttggttctgtttatttggtagaataatatgtttccgtatggttttaaagaaaggttttgatatggtttttgtgagaaagatcggttcagttatgttcttatgcctagccctactttttgttacccatcatcatactatctaaacaacaccgattgaatatgtcaaaagaattggctgcagtttcttttgttttcattttgccaaggattgtcattttaacatatgttaatgctaatggagtgagtgatttgctgtacaaaatgagcagatagtacgggcgttagaaggaaatgtatcgctgtctgatcttaacgaagggatgagaccgggtcacagcaacgtatacagctcatatggaggaagcacagactatgacacgagccaatacaacgacgacatgataaagtttaggaaaatggctcttggaactcaagaatacggcacaaccggcgagtacagtaatccaaccagtgactacggactgtacccgtctggttcaagcagtgaaggtcaagccacacgagaaatggagatgggaaagattaagaaaaccggtcaaggttatagtggaccctctctttaaaccataagagtggagaaattgcaggttttttttggattctttttcttattaactgtaaagatttgaggaaattgccttactctctaattgatttactacgatatatgatacgtttaaaattgttttgctttggtttcttctttagatgttgtgatgttgattgattctggtttgaatattattctttcattcttttttctatttttcttctgaagaatttgtttgttatgtcttttgagcttttggcctagtttggttaagttccaacaaactgttcattatacatctacaaagtagaaacaagcacttcacaatacacaacctctacttcttataatttgaccatagaaagaccaaaaaaatcgaatgtaattgtgttattggcagtggtgaaagtgaaattacaaattacaaaaaccaaaatttcaaagtaaaataagactaaactcgaagtgacacaactcgcgagttcgctcgttcgtaa

SEQ ID NO: 2083 - DNA, 3000 bp, Unknown
  misc_feature (1)..( 3000): cDNA_ID_3065858_gDNA_ID_1620485_Annot_ID_158455 3000 nt of promoter + ATG
aaaaaaaacaaaaaaaacagttttcatcacttatcaaggtctacatttgaggactctcctctttgccagtgataatcttgacctcgaagaagagactctttcttcttcttcttgtccactatcatcactgtctagaacaacaatggattcagccattgatgtttcttccaataccgaattctcaaactcacctcgcaaacttcttgcatcttcattttgattcatctccagtttcatatcagtttgcgcaagtacctcaggtttgctaacttcattcaactctccaagtggtgatctcagggacagttttcggcttagtctattgttgtcactcttcgcagcagaagttcgaaaactcgccaaagtatcattacatggctgcttcagccccagagaaagcttctttccattcaaatttggttttttgttttctttgcaagcagctgaaacaccacgtgtgagctcttcttcaccacacaagtctttcttttgagattgagaaggcaatgcaagagataacttcttcctactccttttaatcccatcgtttccaaacgaattcccctcgccaaaaccaaccactgcttttcttttcccattgccatcctcttgttcatctctccctgcagtctcacgtttcactgtatgtgctatgcttaaagaagattccactgtcaacttaagcttaacactatttccactttcaccagacttctcatctccatgattctaaagaaacaacatcaacatttacttaaaagctccactcaacacactatataagtataactaatttatgcaccttaatttgtaagctggtgctgcatccatcagctttaaccttagcatacttctcagtcatctctcgtgccttataatcaaaagtttgtctattgtatttatactccctgctctgtaaacaaacaccataacaaaaccttaaagaaacaaagtcaaaatctcaaaagaaaataagtctgtttccttcaagtagaaacttactacttcacacatcaatccatcatcaggatttggttcactaagcaacaatctcatactcgtcaaaactgtcgagatattcaacgatggttgccaagctccctatacattgttaaacatgattcatatattccatcactagtgttgaatatagctatcatgaagaatcaacaaaggcatggaggaagatgatgaagcaaagtctaaccttgggagggagatttagaatgtcaaggcaaatccggccactgttatcgatgtttgggtgataaatcggtgtagcgaacgacacaattggtggctgaaatggatatctaatagagccaaattcacattcagattcaaatcatcaaacaccagaatcgagtttgatagattacctctcagggatttgaatcttcaaattgaagattccattagcatatacagtatcttcaggaccttcgatttctggaaaaaaatcatgaatatcaaaacagatttgaatttgaaaattgaaaaaagaggatatgaagaaaagctgacgagcatcgatggtggagaaagtggagaaatcgccggagccattggcggcggaagagagatgtggaaacgaagcgccgtgaggtggatcggagaggagaagctttagctctttctgcattctcaggcttaatctcgctgcttgagccattgattcagaaacttcttcgtcttcacagctttctgaaaaacaattgggggcaaaagggattttgcagtgattggcactggcgggggaagatattttggatctaataaggtttaattttcacttttaacttatgggccctttgacaaaaaaaaacttatgggccctttgacaaaaaaaaacttatgggcccaaaaccaatttggcccaatatagtgtatacatgtgaaagtttcttaagaaacatttgtgttgaacatatataacaagtacagaaaaacaaaaaaaaacatccgttgatcttctatatttcttatgataataaagattataatcatagtcttgtaaaaactataataattgttataagtacaataaataaattatttgatttgcaatctttgaacaaagtttatactactaataatatgataatattattgaagattaattgtttatagctaaacaacatgaagatgtgaagatagaaaccacataaccttattattattagtatgaatttgatctaagaataataataactcaaatatattcgatctataacaattttgtgtcaaaagctttagattgattgttatttggaagcatcttctaatttttcaaaaggatgaaattttatcattttcactctctataaagtactataaactcaattaaacgacataatgaatcttggttcactttctattattgaatcttggatcaacttaattctaactagattacatacgtaaatctctttcttccatcacctatgtttctcaaaaaattcgacaactctttttaattttgattttgatttgaggatcatgaaatcttttagtagtattcctctacatatttgtcttcttgaaagattatatcgagaaacaaaattggtataagctttatatatttcactcaatttaaaacatgaaacgcttctagacactaatatcgagagacttcttctgccaacggtttccggtgccggaggagctctagctcaccggcgccgtcaattctccgattcgcatgttcagtttcttctttgtatgtctagcctcattgcttatctttctcttttcagtaatttttcccctcttttaaaactatctcgaatcctttcaaacctttggcttctggtgagaacttcaaccaacatcaaaaggaaaagatggtgtctggcgatacccatctatcaccttcatcatgcaacacctctgtggaagtcatctataacgatgctcttgcgttttcaatctatggtagaaccaccaacttatcgctttgagatctcgttatcccgagcatttatcttaacccaagca

SEQ ID NO: 2084 - DNA, 3000 bp, Unknown
  misc_feature (1)..( 3000): cDNA_ID_2025039_gDNA_ID_1620485_Annot_ID_158448 3000 nt of promoter + ATG
ccacaattaataaatagaatttggaacaaccagcactccagcagcccaacgtcttatcttccatgtcctcctttagtttcccagctatatctctttaatgttttttggacaaaaaattgggaagctttaatgttttatctacatttcatgcttaatgtagttcaaaattaactttaaaatagtattgcatggaacaaaatttataagatttttacgataagtgtccaaacgatcgaaggggcacgccatacctacacccactctacctccataattttagcatctctttgaaaaaactgatttgtttgcttgttttttttttcttttgttttaacatttcatgtttcaagcaaatatttttttttcttctgaattcgagaatttaattcccaaatacgtgtaagctgccaatttagtttgcactgaacggaatgagatgaccgccgtttacttctaaatttattagaaaatagtttatttcaaaaataaaattttacaatttgttattatctattcaaatgttgtaatatgcttacatgaataatggacggccaaaaataattaaaattgtaaaaaatatttttataaacaaaaacctgtgtttaacaatttttaattacgaaaataaattaaatgaaatgctcgtgtataacattagatataaattaatacataataaaaattatgtaagctttggcagcagatcttgtcacttttatagttttcaacatttgtccaaaaaaaaaaaagagtatatttttcaacaaaaacaaaatgacactatttgacacacacacaagacaatgtgactcgttttttgaacttttcaaataattttagaataatgccatcgatgaccgatgtagacggggaaccaaataccacatttaagtttttgtattcaacttgctggatatataaaatgacaattggagattcaactctaagaaacttaaatattttgttttgacttaatctataaaaataatatcagcattttcaccagtcttagtttattagattttttaataagcatgattttatggaaaaaatcatatcaatttatttatcgtcatgaaaacaatatgaaaatctaatttatttttttacttatctgtcattaaattataaatgaatgagaaaaatataaaaataataataataataattgacatagccacaaacaataacggtaaagacattaggaatttaggtgaatgtacaatgatatgggtttacactgcaaggggtaacaatattggttcacaatgatgatgataaggtttatgtgagtgaggatgatggtaagaccaaattttctgaaaagttggtgattcatgagaatagtttaacaacatatattaccaaagacgcatttatgttttctgtaaatcatcttcagaaaaccacaatgagttagaagaaaatttagatggttttaacaaaaaaaagaaaagaaaatttagatggaaatctccaaatttattttaagtattatatgagtgaaaacaaattacgaacgaatatctagtggtgatatgtagaatatatcgccaagttttgtggactctccaaatagcgcacttgctatcatatgagggtgggatccatgaaccatcagaagtgtgggagtcatgtggtggtaatggtcggtcttggtttcagttaaggatgatgtaccctataagtgtagcttattgtactccccctgatttccttccaaattatggtgcacaagaaaggcttacaattatttatttgactagttatcattgaaattcacttctcgtttaatgtaactctttctgtgaaaaaaatctataaataaccatagtttagttataaaagtttcatgtgggcgacccattggaagtgtttttaattgtgttaataagcatagttagtcaacaagtcttttgagtttaccaaagtagcaatttggcactcggacaaggatgaaaccaatagcccaaaagtgtttggtctagagatggtggcagtcgggtattaaaaatggtattggtttattatacatgataagaattaattcaaccaacgaaaacaaatactgaaaaatttgaatgggtataaattatcaaaaaaaaatataatttttgtctagaaggtaaaaaaaaacaaataatatgaaaaaaatgaaagtgtctaaacatcttataaaaagaaacggatgaaatataatcctttctttttgttttacatcagcaacataaaaatttgtatgccttaaatttttgatatctgtaaaaatatcaagaacaaaaacggtattcctgtgtttcaaaaaatatttgtatacattttgtttagtaaataatgataaattctaaacttcaacaatgaaaattgaaatattatttgcttagagatagaaaattgttaatcgcaaaagaaaaagcatttataatcatattttttatttgttcctttttaatatgtgaaaatcttgaaacttggattacttaggaatatacttatatgtaatttaataatttgtatttctgtaaattttatagtagaaaaatcatatacgtattagtaccagatttaaaattttcaacgacattaacacaatgaaaagttattatttaaattgaacatttttaaaatgataaaaaacgataaaagacatatacgtatgataggggataggcgggtcaatcccgttttttaagatgtagaattttcatacaaatcgatttttctcatacgttttaattttattttttacatttcgcaactttgatcaaacgtggcaagaaaactcggtttaattaaaaaagaaacaacaataagagatgtatcggagtagaacccgtaatctcttcacgtgcatgcacgctcctagctacttaacagaaaaatccactgcctttgctgacgtgtgaatcgagacacttcgatataaatacgtagataacctctctgtccttctacgagcatagagaaagagagagagagaaatacaaagaaaaataaatg

SEQ ID NO: 2085 - DNA, 3000 bp, Unknown
  misc_feature (1)..( 3000): cDNA_ID_2149470_gDNA_ID_1620486_Annot_ID_158485 3000 nt of promoter + ATG
caccatgcaatatgcgacttaaaatttgacttattaaaaaaaatttgaatattatttttgggacaacgacattcatcactattaaatgaatccatttttatatggtatgttacattaatcagcatgtttatctcactgtcacacagtaaccttcaataaaaagagatcatcttccatcctaaaaacggatcacatggaatctcatataatttcagcaccacgcattcgatatgagctttataattcaaatgacaattatattaatcatcaattatcattatactacacaatcttatataataatctttctagtttacaaccaatatttgaaaagttgtgctaatttttataaacgtaaatgatcttcaaacaagattcgagctcattttaacaacgttaaaacaataaaaataacctttgaatttggaaagtgatatgttataaaaaaaaaaattattatttcacaaaaaaattgtgtaatactaagaaaagtaaatatatgattaagaccattgacgtatagtctagcctaagtgtctgaaaatagaagccagaaataataatttcctttcacaaaatcgtggattatattggtttcgtgatcgagttagttaggtaactatcattttataacaagaataaaaataaacttctttttgagttttgtagataaacatcgtaattcattagttatcgaatataagatttggtagttgattatgacatcaaagattgaatattcgatgacgcaaattgaagttgaaaatatatatatttcttttcacgttgaaattgaaatatagacctcgacacttggggtcgtccatttatacataattatctaatttaggtaacaaaagattagtgacccatatatttatagaaaaaaaaaagagtaaacagaaccaacttgtgacccactaggacgaaacattgttgcgtgacgtggctaactaatctacttggctggaataactgaatgaaagacagtttatccatctggataataatgaggatcgaatcagaaaggcttgtgaggttataaattaaaagtagtaaaggctttccacacacataacacgcacggaggtttggtttctgtctgaaatcaaactgtagttattgtgggttccgatttaaattatgacgtggaatgatcgtataaatgttataataacatgttatttgttaaaaaaccagcacaaaatcattgatatatatatcattattaggatcgtgtacgtaagtgcaattccacattcaaccactagaggttattttacttaattaatagaaagtgtaaggttagttagtgcatatataccttttacatcaaccaaaaataaatgtatgtatttattattatgtgatatctttgctaatggttatatatctttcaatatagtatttgattggcagtattgtacagtagaatgaaaaatctgatgaatgctatattaagcattaacccactggtaacaagatttgagacagccatctcaattatcagaaagcaacaaaaagagtcaaccaattctgattattaatttgatttagcgatagatgcatggaaaatctgagatgcatgacttacattattagccttagttactttatttgaaaagaaagatataacttatttttcaagctaccgtttgttagcaactacgacatatatttttttataattattttgttgaacatactgaaaatataaaaagaccggtttcaaattatattaaaacgaagagaatatgttttccagtaaatttctatatcaattatatggactagctagacgtaagctattcttgtatgcaccccggtttaaataaattatatgtatgttcacccaccatattttccgtacatattcaagatgtttaaacttggtaaaacaaatgttattgtaactaaaaccaaaatgaaccttaatttgattaccatatagttagcttacaatttccggagattagtgtagattttcagctcagaatatagaggcgcatatgtctttgagtctttctaatttctttaggccaagtccggtggaaggtggagctttaattacgtaatgaatgcggcaacttgactttcgttctcaagagtcaagatgaaaccaaagatgtgaactaatatatctcatcacattactacaatcttacataatgaaaaaaaattcaacttaagaaagtatatccatacacaatggcttttcgcttacaaaggaaaagaaactttgttttgtactctaaactttttttatgaatcaaactaaagttaatacattttttttgcttgcaacaaagtttacacatacaagttctatcatattcaatttgatcttctgttttttattttgggtcaacaatagcattaaaacatacttaaacacagtttttttcaaccatcatttctatgtaatactattaatttccataaatttttgttttatcacatacttattcttactcttgattattatttaattttcatcatcatttcagaatatttttatttctaactttcatttttttttttaactcactttcacataaatttttactccattgaatatcctatttacaacttctgaaaattaaatattttctagattttattttattttttcctaatattgttaacgcccctcatctcatgggtgaactacctagtcaataacagaacaaaataaaaagttataggaaaatgagaaaaaaatactcaaaaaaaaaatcaaaatagtaggttgtgacgtttcaaagtcacccgcacaaagcaaagagattagaagactctcttctatctttaaatcccttctcagaatagataacagatatacactccatcaaatctatacctacatcaacctttatatagttatatgtatcaccctctctctttctctcccttatatatataactccaaaacaatcatttaatccaaacccaacatatccttttaacagaatcttctttatctgaaaatatctaaagaaa

SEQ ID NO: 2086 - DNA, 3000 bp, Unknown
  misc_feature (1)..( 3000): cDNA_ID_3065920_gDNA_ID_1620487_Annot_ID_158492 3000 nt of promoter + ATG
cctaaaggatgatgattggaggtgggaaaatgaggaaaaggggtgaactgaggaggatgatgaggatcaccaagagatggatccatggatgtgagatttttgcagagcaaagagaagagaagatacagtaaaaaaaaaaaaaagaacaaaaaaaaaaaagacagaggtggaaggtgagatttagatttagggtttttttttctttttttttgttttttgctctgagagctcttttgatttttttgtttttgtgaaaataaaatttttgtgagagaaataaataaagttaggttggggagagagaggcggaggagtagagacgaaaggatgagaagaaagattactattaaatctaaccgttgatttgttttctatcgacggttttgacgaggatcgatgacgtgtcatatcattttgtcttttattttaaggattttgtgtttctttactttgatttttttcatttttgcctcttagaattttgctacattttcgctccaatgtaataaaaaatcaccaaaattttaaaaatggaccgccaaaattttaaattatttttctgaaaagaactcctcgctttcagtgtaaaacaattttgttgattttagaataacatcgaatgaagtatatagcaaacactgttacattaagtaacccatgtaacaaactccattaaagagtgtatgataagtaagagatgtattgagatgagtatggcaaaacaaatgcaattactaacttctatgtcctctgtttaggatttgaaatcgatacatttacataaaatttagtttcaaatttatattttctgtgaattttgttagagtatatatctatttgcgaccctttaacttaatcacaaaatgatacatcaaatatgtttttcattaaggaaaaattacaagacattaaaatatttttaaacagtaatgtatgatatttacatttgaattaaattttaactttagttgcattttaacaaaatatttgatatatatatatatatatatctatatatatatatataaatgtacgacgtaaaacaaaaataacaaataaatgtaaacctcttattatagatgatgaaagataactttatgaaaaaaataaaatatggaaaaatatatttaccaagtgctaaatacatttttcttttgtcttgtatcacaaataagcgtgatatatttaaaagaataattgaaatattaaatgatgaaagataagttttaaaattttcaaaatatggaaaaacatgcaattagtaagtattgattgcaaattttaatttgttttgtacaaagaagcgttatttatttaaacattataataaaaatgataaatagtgaacgatgaatttaagaaaatttaaaatatgaaaaactagaatttataattgtttaatgcaaaatttataacaaacaagcatttttaacgggtaatgtaaaggatacaaagtgagcgataattttaaagatatttagtggttttacatatagttaatgttttttttttttttttagaagaactttttttttcatttgacattttaatattgtttaatgaacttttgtgtattatatgtgtggattcaaaagggtagttggatagatttcaccatttgaattttgaagtagcaaatctcaaataaaatcaatgggactaagaacaattgataaatctatgggggaacaagtgtcacacctatctccttggtaaagccagcccatacatcacggtacccaaaaagaatcatccaacaagagaattgttggtacatattactgacattacaatacgatattataaagagtacagtacgtttatgcttatgcattaagcgcaagtaaaacccgatatatgctcatcattcaaactccaagtatcacctgagtcgtgtcgttttcatacaacaatttatgtatgctcattcttttaatactaatatatctgtgttgtgatgtgtgcatgcgtgtgctcgaatactttcaagcaagggtcaaacaaagtgcggctggtaatagacgatcagaagacacaatcaccagacaccaagtaagcagatgacaaaagacgatcaccacaccagaattccaacaaaacaaaagattatgatatgttttgtcgcctctgatatgtcacactacacagtacacacaacctcttataaacaacacttttaacgggccgaattatcagccttcaatataatgtttacttatgtgatggacctcaacattacatgggcctatctgttgcataattaacagttttaagacccttttatttttctctcgaatttgaaatgatttgtttatgttttttatttaaatgtttttgcatatttggttgggtcctctcgagtcacacacgaccggagacgtgcattagaagagttacagagcagacatttgctggcatcttacaattatctcaaacataaccttcttttattattaggctattggccctacccaccaccaccatttttattttctttttctcaaacacgctttttgaatttcaatattatatactgtccttatcaaaaaatagttatacgatttgttaattttgttagcctaatttttcctaatctggttatgtcacggacgcaagttaaattcatctgcggtgtttttaggtgttataaagccatgtgaatgaagttaattaaaaaaaaagcaatgtaaatagtcaaacatgccctttaagaaaaagagaaacacacgcttcacgtgagtcgcacgtgccaaacccacctttcatcttcttcttcttcttcttcttctatcttccgcatccttcggacaagagaaccaaaccagccaacaaaaaataatagtaatggagagtcgaattagaaagagagaagcacgccatacctgagagattcgtgcgtcgacgacgtgaaaatcattattatttactaataataattgttattgtcaatcgatgataattaaattaaaattagtttaaaagtggtggtggaggtgtttg

SEQ ID NO: 2087 - DNA, 3000 bp, Unknown
  misc_feature (1)..( 3000): cDNA_ID_2149596_gDNA_ID_1620487_Annot_ID_158510 3000 nt of promoter + ATG
attcttccttgtactcatatgaaagaacaaaaaaaatcggacaacaatatgactccttgtagtacacaagtgaagttgagactagattctttcatgtacatattttatcaaagagtctgagaaacgataaacagagacccatataactcaaatgatttctacataggctcagttttaagtcagcttaaaacaggagcaattcttcagggcttgatctcaagttttaatgtcatccaatatatgttattgcttatcttactaatgtttcatcaattgctcatcttgctagtgttccatcaagcttgggtttgacgtggtttaaacaatttctgcaatagcaataaagagcatagaatcatcgaccattctagtaaacagagaactatataagcttgatcaatcacaggcttacctttcttagagcatcaatcgaccgcactttctcatctctcttttcacaaaagcactctccacaccagctggagaaatccttgtgatgagttttgagctctctaaatacagaactgcaaggaacaacacgaaagacaagcttaataagaaaccaaataaaaatggaaagtcaattgcaatgtaaaaaaagatgcatggcagtctagaggcaagttttagatgctatttaccttctgcaccatagaagcatattgacccgatgcccgcatgttgtggctctggcaccatggcggtggcggccacggtgaagcacagcttgtccaggtatatgacaataatcatatgtttcctgctttcgcagaaaaaaaagagttgtttatattagctatcagccatatacagaatgttagaagacaagaaagcaacagaaaagagtggcatacatctgcctttgttgctgtgttcacatgtttttcacaccgtgtgcctctgaaaaatagctcccctcccacaaattgattacccaaacaaacattcagcgttacttctgaatcatccacatgaaagcctgaaaatttatataacatctgataattttcagccagaataacgtgagtattggaatatatctgcatttaggacaactagtcaggtcatgggaaattatacaggatatgtcaaagggtctcacctaaatcaacatccctatctttcccatattcaacaacaaaaccatggtgagagtccagagttgctccacccacatcactgaagaatactgcaaaacaaaagattcgaagtagctttttagttttaacactgtgaacatattaaacagactttccaataatagactatgtaatggatttaaaaatatattgcctttagagatgggacgtataaacccctccatgagtttgtcaagcatggtgtctagaccaaagtcgtcaagcacagcaccgtatttattcatggtgtttggtctcattatccggaatttggtctcacccacccacctttcaaaattgtctatctgcatggtcaaacaagagcaaatgaacaaaatacgaaggataagagaaaaacaaaaaatggatgcacattacctcggctagcatcatctcacaaaagctaggctggagcatgtcaaagacgaaaacaccaggagacggttcagatattatatttctgaagctttcctctgtgttttcatttatcgccttaaggaaagcaggaacgaaacatactgtgggaactagagtatacaactccttgtgaagtggctgcagtagaaaaacacttcaaactactaacaaatgactggagcagagcaatacagaacacaagaaagctcaagaaaggattcacacctgataatttgttgtaatcttcagcctatagtcactgtgcctttgagcctgtagcatcagccaaacaaaactacttaataaaactcttgagctcatattgacattttcaaaccattcatgcaatatcttctaccaaccatcatctaaccagattgaaatttccataaccacttaactaaaagtgaaaccagttcatagtagcaattagcaaaagctcaaattttcataatgaagtgtagcttctaaagcaattcacagtcatcaatacaagtaaaaacaaaattcaagagagaaaggtccaaatctagtacttactctggaacgctctccatgaggaagatgcctaagcataatatcagtcatgaatttgattttctcatcacgattcgagacgagcatattcggaggcaagtacttctccagactagaatataccgagtttgggaaatcaagctgcagatcttcataactatcgggtctatgctcgttgttagggtttagccttagtctctggcaagaaaccatcgtagaggtagctctcaatgtcgtgggagccgccgaatgagaattctgacctgcaattgttccgttaccttccaccgtcgtcgtcgtcgtctcttgcgaaccttctcgctgctcacttgacattactaaagaaggcagagaattcaagtgagaaaaaactagggtttcttcttcacactacattccaaaagcaaaaaatcttaaaggggaattgaaatcgactttttaagctctcgatctggagattctgatttttgagttcccgttgaagttagggtttctgaatgttccctcgaagatttttttatcttttatttatttgttaatattacgcacgaaaccaccagtcatacgccttataagaagagttaaatgattttctagcccatctattaggcggcccattaaataattcgaaccggttatttggtttaaactgaaattaccggtataatcgtggaattgaaatcattcgactttgagttgtctgttagtgcgttattggttaacacgtgagagatatcgatagtctcctctggagtttgttaagttcacacgtgtgaatgaaagctttcgctctcaaagcttggtgctttttcgtctcttgcctctgccaaaatcttttggccgccatcgatctttccgatcacggaacaaccgtacgaattgaaagtatctctgcggcgaagtagaa

SEQ ID NO: 2088 - DNA, 3000 bp, Unknown
  misc_feature (1)..( 3000): cDNA_ID_2149588_gDNA_ID_1620487_Annot_ID_158508 3000 nt of promoter + ATG
acatatcctgtataatttcccatgacctgactagttgtcctaaatgcagatatattccaatactcacgttattctggctgaaaattatcagatgttatataaattttcaggctttcatgtggatgattcagaagtaacgctgaatgtttgtttgggtaatcaatttgtgggaggggagctatttttcagaggcacacggtgtgaaaaacatgtgaacacagcaacaaaggcagatgtatgccactcttttctgttgctttcttgtcttctaacattctgtatatggctgatagctaatataaacaactcttttttttctgcgaaagcaggaaacatatgattattgtcatatacctggacaagctgtgcttcaccgtggccgccaccgccatggtgccagagccacaacatgcgggcatcgggtcaatatgcttctatggtgcagaaggtaaatagcatctaaaacttgcctctagactgccatgcatctttttttacattgcaattgactttccatttttatttggtttcttattaagcttgtctttcgtgttgttccttgcagttctgtatttagagagctcaaaactcatcacaaggatttctccagctggtgtggagagtgcttttgtgaaaagagagatgagaaagtgcggtcgattgatgctctaagaaaggtaagcctgtgattgatcaagcttatatagttctctgtttactagaatggtcgatgattctatgctctttattgctattgcagaaattgtttaaaccacgtcaaacccaagcttgatggaacactagcaagatgagcaattgatgaaacattagtaagataagcaataacatatattggatgacattaaaacttgagatcaagccctgaagaattgctcctgttttaagctgacttaaaactgagcctatgtagaaatcatttgagttatatgggtctctgtttatcgtttctcagactctttgataaaatatgtacatgaaagaatctagtctcaacttcacttgtgtactacaaggagtcatattgttgtccgattttttttgttctttcatatgagtacaaggaagaattggtgttatctaattggatttggtgatgctgctctcttaaatctccatattcgcctcaaatcgttgctctactgagttgtgcacttgtgctcttcaccaatggctagagccacaaataatggattttgctcttatagaaacccaaatcgattgcttcggtaggctcttttgaatataaatgagcattagggccattgtgcacgttattctaaataatggaagagagaagaaagtgtagatggtgttttgttgctgtcttgttatttcatggcaagacaaatcgaaattgggtgtgaaacggtactaccaacccaattagttgactttaaggcttatcattgaatccttttatggatctgttatttatgtctcttttatatactcttccattcattcttctcaccaaattcattttatttttggggtttcttggtatctttttgacaatctatgttgatacgatgtttatatatatgatcacactaattagcaatgtagatgaaaacacaatccttcatcttcatgatacagtagtataagatcaataaggatcatttgggtctgttttaaatcttaaaagattttgatgtctaggtgtgtgctaagtcgttgaaaacacaactaagttaacttcattctgcagatattcttaatgttaaaatctgagctcaatagggattcttgactgaattttttaaaaagatttgatgtctaggttttttttttttgccagtttgtttttgatattttggtgatctgatgattgtgttgttagttttgtgtttcagttttgatccttaattttcttttggattctgaagctggaatattttgattatatataattcaaactgagaattttcatatcatgggctgaaaaaatggagaatcttgcatgtgtccctctttagggccactagaagaaaaagaaaagagagtacatagtacaaattacttaaatgattgctaaacattatttaaaacagaatagtttcttaatacattaggtcaagttatatgtttaacataactttttggaagatgtcatagttttaaaatccaacctaattggtacatttgattgtagccgttttttggaatctaatgacatgaaacaattacaagttaactgaataaacggtggttagtgctccttcgaagagatattagtaaacttatcaatcaaattattaatggttttccacattcaagacaagatgcctaattatgagctagaccacatgctattcgattccataaactcattattacataagaaacgaatatataaacataatagaaatcaaatgaatccccaaatgaagaattcactagaaacacaaacttaaaatcaaattaaacatatatgtatatgtcaacattcaacgtgaacattgataaaatagtggtttgtattactattgtcgccgttgcacaacccaaatacaaatttgtaaatgtaggtgtatgaattttagatgacataaaggacccaaagtggtgtcctctcattgaacatgagtgaaacttctaacaatacatatatatccctaaatcatttgaataaaaataaaaatacaaacatatcccccacattatctaagtcacgtaaaacattcaacctccgaatcgtattattacagtcaaataaccatcttttatcagcattattattcataatcattaattataaacaactatagtggcccacttgaagaaattatgtaacatttatttcttccttaatcatccattttctttattgtgtaattgataattattgttttgtatattaaatcacaagtcaccaccacacactttagtataaaagcaatcctgatgtgctatcaaacttcaaaaaaaaaaagaagaagtaggaaaagaagagctcaagaagaaaaagagaaaatg

SEQ ID NO: 2089 - DNA, 3000 bp, Unknown
  misc_feature (1)..( 3000): cDNA_ID_2149576_gDNA_ID_1620487_Annot_ID_158505 3000 nt of promoter + ATG
tatcttcatcttcttccttgcacttttctgtttggtttacggggtaatctaaaactttgttgtgtggccattatcagcaaaccacatcatacgagctcaatgctctatctcaagaatggagacagctctgtgttaagaatatggagattcagtctgcttgtgccatgcttgagacacagatcgattcgttcaagaaagaagctgctgaaaggtgaggaaaatgttgtcttacttctttatatcactcgtaagagttgaattttaagcgtaaaactgaaactcgtggggttgtgtgtttcaggggttggaacttagaagagaaactagagaacgtcgagccacttcaaatgcaatgaggcgcctcccttgctcttaagtaacataggttcagagcaaaacaactgttggtcagtttggtttgagttgtgggttaagagaatcaaagacgagacagtttcagttatttgccagttttgtgaaatcctctgctctcctgtcaagtggtgtgtgggacaagtaattgcttttgaaagtatcgaaactctttaatttatcgagcataacgtttacgatttgaaatacaatataaatttttgtatttagaaacatatattctctctctatattaagatgttgcatcccttattctcctataatcagaatgcagaaaagctcctccgtccatttttttcttcttggatagattcaaaccaatataatatggttcttccatgatattacttcttgtggtttcgtgtggtacaaattgaattttctactcaaatttgaatatatccatgcataatgcataatgcattgtattgtaaatgatccttgagcttccctttgtttaatgttaattagacgcacaaaaaaatgtatagataaaagttaaagtgacggagccattgctcataaacattatttttcttaatcttataccaattttcacaaaacataaaaattatgcatttcctaccgactaccaatcctttaaataaatatatttgtatatacgtatttgacataattttcaatttaaatattacaattaaaccaaaaaaaaaaatcacatattggaaggtgcacacgtacgtcgtcatgcgacccaccaacgaggctataagacacggaactcgttagaatgtctctttcctacttaacaaccttcttatattgccttttaacaaagaaaaaaaatccttcctatattgctattattattatgatgcatcttattatcacctaattaattaatggaaaccccatattctttctcaacacatttcaattggatgttgaggtagtcaccgcacgtttttggatgattataaagtaaaagcttctcttaagtagatttagtccttcatccatagtaagactcaagttatagcaaaacaagcaacaacaaaactaatcattactgattgaaaatatgcaccatgcattatgcaataattaattgtaaccagtagattggtgatgatacaatttcagaattagaccagtcacgatccgcatatgacattatgatcacaattcacaaaacatatttactaacaattatctaaaaagttttgacatgtatatgtaaattgtttgtcatccattgacataagattgggtaacgattgctatgtatgtcttaactactctataagttttttcaacggagttagtcctgataagatggggatgcttaaaacttcataagaccatatatacatcaattattgaattcaaatatacaaagaaaaagaaaaaaaaagaatgtaatgagagattgttggaaaaagtccaaagtcgacaatcgaacaaccaagtttcacataagtctagaaaaacttcaccaactgttagttgattcatagctatcaggccacatttgattctgcctcattcgttaataggtctcaaggaaacaaaactaaacaattagcaatcaatcatttagattttggttgtgtctgtcataacagtcaactacaaactttctttcattttcattattttattaaagaaaagtactagttatgaacttctaatcaatttccatatgttcaatatttttatttaaatatatgtttctaactacaatctatatactctttttgtgtaagttgtagttgtgataatatgtttgcttgtttttttttgtcaaccacacattattatatataatgtatgaaaataaaaattcttcattgataatctaatttggaaaagaaaaaattgcaaataaaactaacatgtcctttaactatggctgaacaagctaagatgatttataaagcaaaataaattcgtccacggaaggtttgagaaagtggataatttctcggggttacgggacatttgatcagcttagaacaattgtctcgaagtctaaaacttttttatcctattggaataataatgatatattgaaaatttggaaatgtcacaaaccacaagaaagaaagaggttaataaaccacagagaaacacaatgctcatgaaaatcaaattcatgcttgacaattttattaatcatttgttattttattttggttgttcgttataattaatatctattaatttatttgaaatgaagctaaaaagaaaaatcgtggggagcattcattaagctgcttactaagacttgttcttcgactaatacttcatgccctccaaatccttcctctccaatgccgacactcgcctgatttataaaattaataagatcctcttcttttaataatacactaatgttcatctaatttttattttttaaaatctataacacctaaacgttctttccttgatcctgtcttaaaatccagacatttatagagacaataaacacacgaccaatgtcgtaaaagaagttcttaaatactttacacaatcctctccgtctttcacattcattcatccctctacattagcacgaagattggtttcaagagttttcttgtaacccaagaaagaaaaagtttgtgtaacttgagaaacaacata

SEQ ID NO: 2090 - DNA, 3000 bp, Unknown
  misc_feature (1)..( 3000): cDNA_ID_3065892_gDNA_ID_1620487_Annot_ID_158504 3000 nt of promoter + ATG
tcattatatacaaaattgactggtaatgttagtccattttattaaatgttggatttaattttgtacctaaataagcatatatatatatatatacatatatataactgaaagtatttcttgagctaatggatacaaaatctacacaatacggttcggtttgattcaatagccaacactatttgatttttctaaaccaacgataaaatcggtctactgaaattactaccgagtttatcagttcaacatctttcggtcggaacgtatatgtatatgttggttgacctaataaagcaaatagactttggttcggttaagttcggttaaataaagaaaaagcagattctgagctttgtttgtgagattcagtttccaatatcagagaatctctgtgtcgcctgaagtgataacattctcattattcacccaaggagagagatcggagctaaaaagccatctctcgccggaaaatttctcagttttcttattaccttagccacagacaacaagacgacagaggaatctaatcttagccccctttcctctctgtctctctctatatctctgtctttaggctttgagatatcttcaacacgaagctttttgcttcttttttttatctctttaaaaaattccagccaatggttcgaatccaatagtagcttcaaaggtcatggatttagtcaggtgtgttctaaattctgatctccttatgtattcctttctctcgctattggtttctagttccgtagggttttagatacgtttgcaactgaggacaattaggtttcttttaatccacatcacgattgattcaaagttcattgtgtttctgtaggggtttgtggaggaaacatagaaggaagattttggtgacgacgacttgtttgggaagtgggtatttgctctataaactatacaatgcccatactcgtaagctcgctgatttggaacgagagcttgctaatgagcgtgaaaacgacgagatcatcaaaacccagttgagtttttgtaacctctcgtctttattttttgcttgtttatcgatttctagtccttattggttttgttctctctatgctctatgttagaatgaaggcacatttcgataacattcagatgattgctgatactactacattgcctcacgcaattcatcacttgagtagtcgtgtagttgaagagattgatgtctcgagtattatggataagctaagcaaaggcaaaggaatattgattccttctgagaagcttcaactctggaatgagctcaaaattttgagtgcgttgttgttcccttacttgtacttctcgtgctctgtggcaacattggatcttctcattaatcaatctttttaaatgtgtttccttgtgttcaggtttcacgagaatggtcttgtccctttggtcggtcactatgcttagtttgtacattagggttcaagtcaatattttgggcagacatttatatatcgacactgctagaggtcttgggagctcccatttacttgtaagacattttacttttctctttttattgtcttaagaatcattgttaagctacttctagcaaattggtcattctgataaaattttgtgtactttcattctacttgttgcattgtatcttgagatatcaaaatttcaaattgagatttcaaggggtagaagttgatattttgcatcttttcctttcaaaattatcgaaattagtgtattcattggtcttagatataactcttggctggattaccacaatctttaccaacgtcatttccttgatatgtttttttctcaggacgaactagatctcatagagagagatgatgaacaaaagtttttgacaagcgctgattttcttgcgaccagtggcatgccgagtttgatttctaacatgcagaacgcagtgaaagaagttctcaaggggtaatttacattacaaacctacttatcaaagatgtctcccttgtttctcatccttgaagattgattttatggtgcctcaaactcaaatgcctatgaagaatcactatacttttatgaacgtatagcgaaatctaactatgtgtgtttaattgcagaaagcagttaaaggatgtgttaaccacaagtgctcttcgagaaactgtgatgcggattctcgatgtgtttatgagcacaggaagtccacaccactgggtagattatctaatgatgtcccaagacgcaaccactgatgtttcctcttctgatgcaactgttaccaagtttcatctactcataaccgagacacgggaagtactcacaaggtaaaaaaaatctctgctctttaacccgcaaaagacgaacaatttcacttctttaaagccttgtcctcgtttctgcttcaatgctcaaagcaagaatgttgcaatgtagcctgttaaacatttcttggtcttgttttcatgttgcagcaatgatttttcaaatgtagcagagatctcactcaagtgttgtgccgttgcgttagtagaggagatggaaacgcagaccggtctggccacagggatgcaattggcaaagctattaccacagattgagaaaaccatgccggagatttcagctgagccggagaagaaccggttcttgcaactcatccgagatttgcctgaagttaaactcttttttactcttttatacgcaaatatgcctcagtagcattattaaaccccattgccaaaaattgtttcctgatcactttttatcatatgtttcgatttacttcaaaatagtaaaaccaaacatctctagaataattgttcaatatctatatcaaatcatttactaatatagtaatattgcagcaacaaaaaaggacaccgtgtattacatatctttcagtttttagggccctagaagcccaaggcccaataaaaccgggtcggtgatattaacttcttcttttttattaacttgggtctctccatctttctcagttctcactatctggacactttcgatttctgaagttgagagacgact

SEQ ID NO: 2091 - DNA, 3000 bp, Unknown
  misc_feature (1)..( 3000): cDNA_ID_3065896_gDNA_ID_1620487_Annot_ID_158503 3000 nt of promoter + ATG
ctgacagacataacggctgagactccttggaagcttttagagacggcaacaatggcggctacgaaagctctggaatttgttttgccgacgggcttcttcatccagccgtcattgaaccgtcgcggaggagttaggctctccgtcgtcaagtgttccatttcttcagtcacctctacaggcaccgcatctggtaacgctcgccgatttccccatttccgtattttcacagcttgattttttcccagaactttagattcgaattggctttcgattcaaatgttatgtatatatatgattttttcagattacttgtaggctcttgattcgtgccttaatcatcgttttggttattgtttcttttagtttggatgagctgaaaatgtgtgtgaatgttgaaatgtgattcaaacaagagtaaagaggggagttaatgtgtgttaagacacatttgtcagttttggttttacaataaatttgggggtttttatttttatgtttgtaggacataatgagtccatgggtttaatgggtgcagatacatttcttttctatataagcatgtagtctcatttgtgagaaattatcagagatatcagagacatctgaaagtcattcacagaattaagtatcattcagctaaacagttcttaacctctgttctatcatctctgtttctaacagtgaattccttgttttaccggttttgtaggttttttagagaaaccatggagctcatacaatgctaggctagtgttagaagatggctctgtttggtcagctaagtcttttggtgcttctggaacccgtgttgctgaattggtatttaacacctctttgacagggtcagattcttttttagattctaatttagatttctagatattataactgggtttagaacattactcattttaatcctaccagatgatcttgacacacgggcaataacccgtcgattaagagaaagcggcagtcttaacggtgtgcttagcactgatggatccaaaaccgacgaggaacttttgcatatgtcccgctcttgggatatagtaggtctgaattctttcactgccctccttaaaatatgatcagcgtggaatatgtgattgagctctgtctatctgcttggttgaatattttaggccttgatctaataagcgatgtttcctgtaaatctccctacgaatgggttgaaaaaacaaatcctgaatgggagtttaagacaacctcctcacgtcacagggaatcctacagagtgagttgtactttctcttctctaatttacattctcatcgatttcctcactagcttctaactctgttttcatacttccacttcaaaaggttattgcatatgatttcgggatcaagcaaaacattctaagacgggatttcctcactagcttctaactctgttttcatacttccacttcaaaaggttattgcatatgatttcggcatcatacggttgtgaaatcacagttgtcccatcgacatggccagctgcagaggcgcttaaaatgaaaccagacgggattctattcagcaacggtccaggagatccttctgcagtgccttatgcagttgagacggttaaagagcttctaggaaaagttcctgtctatggaatctgtatgggtcatcagttacttggacaagctcttggaggtaaaacctttaagatgaaatttggtcatcatggaggaaaccatccagttcgtaacaacagaaccggccatgtcgagatcagtgctcaggtatgctccatttactatctatagattataaccacacaagattaaacagtctaatctttcagttctaatatagtttacaaatatgatgggaaaataaaaattattaatcaaaacttagttatatacttatatatgtaactctgagaacttgttgttacatggctgtcgagttcagcttctcacttcctagtacagtaaactaaaaaaaagacgtctctgttttgtgtctgctgaagattttgattgatattgtttgtgcggattttggcaaaaccataactatgcagtggacccagcttctcttcccaccggcgtggaagtgactcacgtcaatctcaacgacggaagttgcgccggtctctcttttccggcaatgcatgtcatgtctcttcagtatcaccctgaggcttctcctggacctcatgactccgacaacggtattaaaccattctttcttttcccttttgtctggtacctatcaaaacgtaaacgctactaaaacgctatgcattaatttttgcctaatcttttcatatatgcagcatttggagattttgtggagcttatgaaaagatttaaacgaagcacttgatctcggctaaatcagtgatctagcgaaggagttttgtttaggtggattgaagttggagttgcgaatttttttgtcgtgtgagaaataaaatagcataatgactgccgaaataagacaatttagttgagaaacttatgcaagtttgatatttatactaacatcaaaagtagcttgcttgccatttttgttaggaactggatctggtattttgctcaagtatggttttcttggcccatccacttctaatgtgttttgtaactaatgcaaaatgtgcattagaagtggattggtcaagggaagcgtacttgtgcaaaatgcggcagtccaattcctaacaagtttggcaagcaatccatttttggtggcttgtatgtaccgagctattacagactgacggttttgttttgtaactaaagaggagaaaaaaactctagtatatgatttcaatatctatggatcctccaatttagttttctggtttagatttttttcttccttatcttggattttctggtttattaggtttagaactaaataaaactgttatgtggttggtttgataagattttggtttcagttggaatatcaaaaaatatataatgggtcttcaaaacattaccattcgttgataataaaccctaagaaaatcaag

SEQ ID NO: 2092 - DNA, 3000 bp, Unknown
  misc_feature (1)..( 3000): cDNA_ID_3065916_gDNA_ID_1620487_Annot_ID_158495 3000 nt of promoter + ATG
tctatctatggtgagcacgcttacccagctactgtggcgcgatattctccgaacggagagtggatcgcgtctggtgatgtgtcggggactgttagaatctggggagcttacaacgatcatgtgttgaagaatgagtttaaggttttggctggtcggatcgatgatcttcagtggtctgctgatgggatgaggatcgttgcttctggtgatggcaaaggcaaatctcttgttcgtgctttcatgtgagtttggttttgctttttagataaagatttgatttttatagtgcttagctcaatgttgttttcgttgattttgattgatcggactaaaggttttgtttttctgctggtgttgcttttattttgttgaatcggatcgatattaatcagattgaaattgagcattttgtttcttcttctcaactttgatggattattgactcattgtttgtcttggtttattaggtgggattcaggatcaaatgtgggagagtttgatggtcattctaggagagttcttagctgtgctatcaagccaactaggccgttccgtattgtaacttgtggggaggattttctggtgaatttctatgaaggtcctccttttaagttcaagctctcaagcaggtcagatattcatgtgctccctttctttaaagaaatatgacactttcgatatctgtttaaatttcctgcttgtgagtttctgaattgtttacgagattgctgtttattggtcgacagagagcattccaactttgtcaactgtgtgaggtttgcaccagatggaagtaagttcattactgtgagttcagataagaagggaatcatatatgatggaaagacttgtgagatactgggagaactgtcttctgatgatgggcataaaggtagcatctatgcagtcagctggagtcctgatggtaaacaggtactaagttatatctgtttgttgttccgtattctcaactcttgcctgattccctcatattacgctcaaactacattaggcttaaacaaggtctactagaatagcgtatggaagtaattggtctaacctgctgcagtatgacgtacataaatgaactatcttgggtgtatctatgaagactgaatgacatattctctatcttctagttgttgattacatcatggttgatgttatgctacgtctgtactcacgtgttgtatatgtttgaatcatcaaccaggtgctcactgtttccgcagacaagtcagccaaaatatgggatatatcagacaacggtagtggatcattgaatacaacattgaactgtcctggatcatcaggtggagtagacgatatgcttgttgggtgtctgtggcagaacgatcatattgtcactgtttctctaggtggcacaatcagcatattctcagcaagcgatctggataaatccccctttcagttttcgggacacatgaagaacgtctcttccttagctgtgcttaaaggaaacgctgattacatattatccggtagttatgatggactgatatgtaaatggatgctaggccgtggtttttgcggtaaattgcagcggacacaaaactctcaaataaagtgctttgctgcccatgaagaagagatcgtgacctctggatatgacaataaggtaaactggttctcactttaatttttattcacatgtaggacttgtcaccttgatttctgcagtgtctgaatttggtgtttaggggattgaatgtaaggacgaaacaagtgaattaggtttttttctctctgaaatattggcaattctaaagacacaatggtctcttaagattattaacactttggaaaaatatactaatgatcttgtggtttagagaatttaaaagagcgatcactgaaggccaaatggtctttaccttgtaagactagcagtgactaatattttttatttcgtaggttatctaattgcttccaagcattattgttattgaagcaactaactcacgtttattcactatgtgattcttattcagatatccaggatctcctataaagatgatcaatgcacaaatgaagagtctatcgacattggaaatcaaccaaaggatctaagccttgcaccactctcacccgatctccttctggtgacctttgagtcaggagttgtgtttcttcgtgatgggaaagtagtgtcaaccatcaaccttgggttcattgtcactgctttggcagtaacacctgatggaaccgaagctgtcatcggtggccaagacggtaaactccatttgtattctattaatggtgactccctcaccgaggaagcagttctcgagagacacagaggcgccatcagcgtcatacgttactctccagatttgtctatgtttgcatcagctgatttgaacagagaagcagttgtgtgggacagagtctccagagaggtaagtaattaagattatttagaatctctccatgaatctggaacacaaacactgatcttatatcgtccctttttttttaaacagatgaaactcaagaacatgttgtaccatagcgcccgcataaactgcttagcttggtctccaaacagcactatggttgccacaggatccttggacacgtgtgtgattgtgtatgaagtggacaaacctgcttcgtcacgcatgacaataaaaggagctcacttaggtggagtatatggtctgggttttgctgatgattcccatgtagtgagttctggtgaagatgcttgtatccgcgtctggagctttactcctcaataagacttgacgtaaattataaagatctctggacaagtcctatcttgtctctttggaaagcttctactacttttgaaggctttttttgtgaatcttccgtttggccgtggctgtgttgatgtgtgtgtctgtttttttttttgtctgcatatcttttgtcaaaaatgaatgctctgttttggtctgaaactgagatcttgagtcagattttttttcattatcagaagattactgatacaga

SEQ ID NO: 2093 - DNA, 3000 bp, Unknown
  misc_feature (1)..( 3000): cDNA_ID_3065912_gDNA_ID_1620487_Annot_ID_158496 3000 nt of promoter + ATG
gatctaactgacaaattcttctcaggagaaacaaaagggaagggttgggattctactggattttgtttggtttgagccacttacgagtagtcaagcagacaatgacgctgctcaaagagcaagagacttccatgttggatggtaacggttcaaacttttggactcatatttttccagttacattttggtgagcttataagaatatcttttgtgtggggataatgtttgaaggtttattcacccaatagtgtatggagagtacccaaatacgttgcaaaacatcgtgaaggagagacttccgaagttcaccgaggaagaagtgaaaatggtgaaaggttccatagacttcgtggggataaaccaatacacaacttatttcatgtctgatcctaaaatatctaccacacctaaagatttgggttatcaacaagattggaacgtcacttttaactgtaagtttttgttcatatgtacatttatccgttatgacttatgaatgaacttgatcttgcttagattatagaacatataactagctaagttagggtctgaatgtttcaaaagcaaatatgtcagtatgagaaaaattactctagacttggaccaaaagtaaggctggttcgtccttatgggatcggactgtggcaatataaatgtgcatgatattaatactgagaaatcttaatatgtgcagttgcaaagaatgggacaccaattggtccaagggtgagataaatatatgttttcttctgagttttgttaactctctctgatgattgcttagttgtctgattatgaattaatctaattttattcaggcacattcagaatggttatacaatgtcccatggggaatgtacaaagctttaatgtacattgaggaacgttatggcaacccaactatgattctctccgaaaacggtattcaatataaatttttgttccacatccaagatctctagagatgttaagtgtataatctttataggtatggatgatccgggcaacataactctaactcaaggactaaatgatacaacaagagtcaagtattatagagactatttagtgcagcttaaaaaagcagtagacgatggagccaatctaactggatattttgcgtggtcgttgctagataatttcgaatggttatcaggatatacttcaaggtgcggaattaactaatgaatacctattgggtatatgattatttctgagaaaatgtatattatatggtactcttctaatgatttttttctgcctaggtttggaatagtgtacgttgattacaaggacttgaagagataccccaagatgtctgctttatggtttaaacaacttttgaaacgggaccagaaatgatgtggtcaatgtgtctatgatttgggttgttaacgagaggtgaatgaatatgtcatatgtgtataacttaagaacttgtcttcctttgacatttcaacgcttacataaaacagcagcaagaaatttggttcttctatcatagaacttctacattcaacaatgtatgctatcatcctcatcctcatttttttttaatttctattcactttaccgtggctcagtttctatttatcaagtcattcaaaattagaaaaatattggatttaaaatggatgtgtaagttcttccaaatcacttgtatcaaaaagatagatgttgatgttatgtgacagggcaactaattattgcaagtgattggcaaaaaaggaatcttgatcaatggatattttgagatgctaaaatgcttgttagactcgacgactcaataatggatgtaatcattcctcttccactgaaaaatctcataacacgattcacatcacatatctttttagacaaaaaatctttagtttccgtaccgtttatcacatcaatggatattttaagcctaatgcatgcacgttctttgaaatgtgtggacttaaattgatttctttagtttctcttttgttgtcattcactactcactactcactagccgtttgtgctttcaagagttgaatgaagaagaactaaggaaaaatacgttttcacgtgaagatttgggagacaagtctaaggaagtggggcattcatggtccacgaggactgaacttaatggatcatgatttgaccagtttgcccttgtcggcttctgtgtgttcacgttttttcctttggcgctttacgattcgcgtgatgactttttctcaaaatgtgggccggacacgataattctgttccggccattacacataaatatagttgtttttatcttatgagaaaagttataaaaaagaatcatattccgatttgggtaaatttttttaagcaacattgtgactgattttcagatataatttggactctggacacagctacgtaaaaacttactgtgtttagaagatatgttttatggaataaatccatgcaatatttggcagtcaatcccgatatcataagagtatggatcagcttctacagattctctgagaattttatcatttggtaacaaatcaaattgttgcaattcggatttttacctctatataagatgatgtccttttgtgtcatctccctatgcataagcatcaatatactttctacttacgaagtcgttacaaatgttaaatgttagtaaaaaatcaattaaataaactcattatattataataaaaaaacaaagacaattactttctcacattcttttcaccaaaattctttacatagtttagaaaattatatgatatatagttttaaaatccgaatttggtgaaatatatctagttttatttagtattcaattttaaattcataatgcttacagccttatcctatttattaaaaaaaaatccaacctttccactaatgcactcccataacaatttaacatcgttggttcatgtattatttgttttgaaaacaaaaggcttttaaaagcctataaatatccacccaattgttatcctccccaaaccaaacggtcaaacctcactcacc

SEQ ID NO: 2094 - DNA, 3000 bp, Unknown
  misc_feature (1)..( 3000): cDNA_ID_3065908_gDNA_ID_1620487_Annot_ID_158497 3000 nt of promoter + ATG
taaagtcaactggaaaggagttgcttattacaatagattgattgattacatggttcaaaaaggtatcaaaccataacgtttcttataaaacactgatttgattatagaatgaagtttaacaaatctaatttaatgcttagggattacaccttatgctaatctgtaccactacgatcttccattggctttggaaaacaagtataaaggcttgcttggtagacaagtagtgtaagcaccaatatgcaaagctcttttatgcattcctcaaaagttacaaactttgataatgcaaattttacaggaaagattttgcggattacgctgagttttgttacaagacatttggtgatagagtgaaaaattggatgacgttcaacgagccgcgtgtggtagctgctttaggttatgataatggtattttcgcaccgggtagatgctcaaaagcatttggaaattgcactgaaggaaactccgcgacagagccatacatagttactcatcaccttatcttggcccacgcagcagcagtccaaagataccgcaaatattaccaagtaaacaaataacttctaatacgttttcttgatcttcttgatgtgatatgatgaaataaacctatatatatggctcttttgccagtgtactactaatcttaatgaaaattttccaggcgaaacaaaagggaagggttgggatacttttagatttcgtttggtatgagccgcttactagaagtaaagcagataatcttgcagctcaaagagcaagagacttccatatcggatggtaaatgttaaaactttttaacaaataaaaactcatattttaccatcaagtcttggtgagcttatagaatatcttttgttttcgggtcatgcttgaaggtttattcacccattagtatatggagagtatccaaagacaatgcagaacattgtgaaagagaggcttccaaagttcacggagaaagaagtgaaaatggtgaaaggttccatagattttgtgggaataaaccaatacacgacttattacatgtccgaaccacatcccaccaccaaacctaaggatttgggttatcaacaagattggaatgtggaatttggctgtaagttattggaagattcataacgatatgtagattttggattttgtttacagtctttagattttgatcgtgacaattattaacttgcagttgctaagttggggaagccaataggtccaagggtgagatatacacttgattatatgtttttttttttccctaagcaatatatatacaagtgtctaagttattaaataaaccacttatcttataggcttactcgtcttggttatacaacgtaccatggggaatgtacaaggccttgatgtatatgaaggaacgttacggcaaccctactatgatcctctctgaaaacggtattaaagaaacaaattaaaatcttcaatcaagtttctttttgttttgttatatttctataagattattataaattttagagctttttataaatgtttgaacatattttataggtatggatgacccgggaaacgttactctagctcaaggactacatgacaccacgagaatcaagtattacaaagattacttaaccaaccttaagaaagctagggatgatggagccaatgtggttggatattttgcgtggtcattgctagataatttcgaatggttatcaggatatacttcaaggtacttaaaaatttataccaaatgtatgatatgtagaataaatcaaggttataattaatatctgtttttgtttattgtataggtttgggatcgtttatgttgattacaaaacattgaagaggtaccccaagatgtctgctcagtggtttaagcaacttctgaaacgaaacaacaaatgatctcaatgtatcaatgccgggtggatttagtttttaaaaaggttggaattgatgattgaagaaataatggggccggtttagtcactttgtttattataaggggggtgaattgtaacttgaactctctccttcttcagttctttgacttttcaacacaaataaaataaaagtttaagaataaatttgcactatgaaatatgaactcttgtccttttcaattttgtgagtttatatgcatttagaacataacggtctttgaacattatagatttataaagttgcaatttgcaagcataaagttggtaatcgaattgatgtaattacccttctttactttgtactaaacaaagcgcacttagccacttaacgctaaaacatcgtaaggacatacctgtcatttccacaagtgccactcgatttcgccactcctacagtcctactcgtcgactgctcgcttaaccattgaaaaagtgagccaagggttttgattattttcgacgtctacggcgaatctctccgcatcttcatcgatttcccggcgacgtttactaccgccgttttactcaatcgtgccagcttaagcaatcgaggtacccattttaggtgttacgctttgattctgcttttaagcattggacaattccggagaatatgctttagtttcctctcttttggagaatgattcggttctaggggaaagattgttgatttcgtgtttgtattcatcattgattgaaacatgcatgatgcattttcgtggttcatggtttttcacggcttcttatcattttctctgtcttttttttttttttttttttttttttttttgtttcagtgtgtattgaggtataccagagatagacataaatgagatggatgttgacgagatcgagtctgctgggcagatcaatatttctgagctaggagaaagttttctccagactttctgcaaaaaagctgcgacatctttctttgaagagtttggacttataagtcatcagcttaactcctacaacttcttcattgaacacgggcttcagaatgtgtttgagtcctttggtgacattcttgtggaaccgtcttttgatgtaataaagaagaagg

SEQ ID NO: 2095 - DNA, 3000 bp, Unknown
  misc_feature (1)..( 3000): cDNA_ID_2149557_gDNA_ID_1620487_Annot_ID_158499 3000 nt of promoter + ATG
atttctgaaaatccgtagataatcacttgaggttaactataggtaccagaagttgatacagctgtacggtctttaactgttatgtgggatgggacaatggtagtcgctgctaacaaccgtggaacatgttatgtatggcgcttgttgcgtggaaaacaggtagtgttcctgatatgcaaacctttcttttgtttaaccatgttgtagtcgcattactctaattgtccatgccatttaaaaattcaaaatcttttacagacaatgacagagtttgagccccttcataagctgcaagctcataatggccacatccttaaatgtctcctctctcctgcaaacaagtaacatgtttcttatactttctcttttaaccgttttcttcatcctctccttttcgaagctcttacatatttgttagcagatatctagcgactgcatcatctgataaaactgtcaaaatatggaacgtcgatggttttaaactagagaaagttttaacaggtatgttctccatgttactgtcaacagcattcattctccattatcgtctcttacactatcatcaaatcttatataacaggacatcaaagatgggtttgggactgcgtcttctcagtggatggagaatttcttgtaacaggtactaatctctgtcttaacttaaaccactgaaaaacatatcagaacaatctttaaacgggtttctatgatgttgtacagcatcatcggacatgacggctagattgtggtcgatgccagcaggcaaagaagtgaaagtgtaccaaggtcatcacaaagccactgtgtgctgtgcacttcacgattaaaaccttaataagaatcaaagctaaattatgaacaaactacgattgtgttatttgtgttttagtaaactcttgtacatttcaatcgaattcgttcaaattgctcttatgttccctctctgatcaaacatttctcaactatatcacaacaaaaatgctccaacaaaatttatttcagaagaggcccatttatacctgactcggaaactccggcccaaatgagccagtctcctcgcagaaaccacactaaaccctaatttgattcatttttagacctagagtataaataccaaacatttcaatcgacctcgtaatctctcgctctgttacgccattttcgtgagtaagaagaagaaacccgaaaacctcaaaccatggccgagggactcgtattgaagggcattatgcgcgcccacaccgacattgtcacggccatcgctacgccgatcgacaattccgacatcatcgtcacagcgtcgcgtgacaaatccatcatcctctggaaactcacaaaggacgataagtcttacggtgttgctcagcgtaggctcacaggtcactctcacttcgtggaagatgttgttctctcatcggacggtcagtttgcactctccggaagctgggacggtgagctccgtctctgggatcttgccacgggagaaacaactcgtcgattcgttggtcatacgaaagatgtgctctctgttgcattctctactgataaccggcagatcgtgtctgcttctcgtgatcgtacgattaagctttggaacacacttggtgagtgtaagtataccatctctgaaggtgatggtcacaaggaatgggttagttgtgttaggtttagtcctaatactcttgtaccaactattgtatctgcttcttgggataaaactgtgaaagtttggaatctccagaactgtaagctgaggaactctcttgttggtcactctggttacctcaacactgttgctgtctcgcctgatggttcgctatgcgccagtggtgggaaagatggtgttatcttgttgtgggatttggctgaaggaaagaagctttactcgcttgaggcgggttcgattattcactcgctttgcttcagtcctaacagatactggttgtgtgctgctactgagaatagcattaggatttgggatcttgagagcaagtctgttgttgaggacttgaaggttgatctcaagtctgaggcagagaagaatgaaggtggtgttggaactggtaaccagaagaaggtacgtcattatcttatgatttcactatagtaattggttctctattgataggttagtgaatgcaccaaaagtagtgatgaaattatctttggttatgacaaaaaaaaagtgaaattttggttagaaattgcatgtaggaaatcttttcccttacccattagctttgaaactaggaattttattctttaaatgttgctctgctccaaaggttttgactttgatgttaacatataggaagagattgataatggtatctaatgggaatgtgtaatgaaaatgcaggttatctactgcacaagcttgaactggagtgcagatggaagcacattgttcagtggttacactgatggagttgtcagggtctggggtattggtcgttactagagacacaacaagatgaagaagaagtcacgaaatctccggaaaaaagtttagctgcttttaatttttccagactgcgtcagtattgtattagtctctcgcaaacctctattttggcaatttttgtttaatttccagaagagaaaaaaacaatccattgattatcatatcactatatatcaaaaggtcacgattttgattacacttaccttcgtgatcttccgattggtcttattgaggttcaatcttcacaattcatccctataatatatcactcttatctctttcaccggccacattacaagcctattagatttctaaagcccatgattggcccaattcagttagggtgggtttctttgtcttcaaatttgtaaccaccggaagcagaggagagtatcttctgaagcattaacctaacttatttatgatccttgagatgatgatggccaatcttccaagggatttagtgaaccttgttacggatacgtacagtatgaactctactacctcaagtcctcaactcctctaaaccacggatg

SEQ ID NO: 2096 - DNA, 3000 bp, Unknown
  misc_feature (1)..( 3000): cDNA_ID_2149553_gDNA_ID_1620487_Annot_ID_158498 3000 nt of promoter + ATG
ggcgccaaagtgaattacctctcgaggtatcttctgtttcagcaaatgttttgctatattttgatattcttgtgctacttgattatttgctttggatttttctgcttcagaaagtatcctatgtcgaatattatttacatatatgtatcacaacgttatctgcagatggaaatcaagcgagataaagatgacaatgaggtgagaattttcactgacgctggtagactactccgacctctcttggttgtggaaaatctccacaagttgaagcaagacaaacctacacagtatccttttaagcatcttcttgaccaagggattctcgagctgatcgggattgaggaagaagaagactgtactacagcatggggaatcaaacagcttctgaaggaaccaaagaattacacgcattgcgaattggacctatcattcctgttgggtgtgagctgtgcaattgtcccatttgcaaatcacgatcatgggaaaagagttctttaccagtctcagaagcattgccaacaagccatcggattctcatcaacgaaccctaacatccgctgcgatacgctgtcccagcagctgttctatccccaaaagccacttttcaagacattggcgtcagagtgtcttgaaaaagaagttctatttaatggccagaacgcaattgttgctgtgaatgttcatctcgggtacaaccaagaggactccattgtgatgaacaaggcttcattggaacgtggtatgttccgttcagagcagattagaagctacaaagcagaggttgatactaaagactcggagaagaggaagaagatggatgagcttgttcagtttggaaagacatacagcaaaatcggcaaagtagacagccttgaagatgacgggtttcctttcattggtgctaacatgagtactggcgatattgtcattggcagatgcaccgagtctggggctgatcacagtataaagctcaagcacactgagagaggaattgtgcaaaaagtggtattatcttctaatgatgaagggaagaattttgcagcggtttctctgagacaggtaagttccagatcatactgaatcgagctgtttttcagagaatgcattcttatgatgaatcaaatgttccattgattggcttttacatcttgcaggttcgttctccatgccttggagataagttttccagtatgcatggccagaagggtgttttaggctatctagaggaacagcagaattttcctttcacgatccaaggcatagttcctgatattgtgataaacccgcacgctttcccttctaggcagacaccaggtcaactcttggaggctgctctctccaaaggaatcgcttgtcctatacaaaagaaggagggtagctctgctgcatacaccaaattgacacgtcatgccactcctttctccactccgggtgtcactgaaatcaccgagcagcttcacaggtacattcttcacattgtcacttggtttttagctcgtaaaacagaatattgaattatatgcaatacagattgacatttggttcctagggagtacagatggatgatatcattaagggtaggaactaattattaataatgttgcctggttggagatgtttgaactttgggactttggctcaaaagctgacatgatatgcataataccagcaaatcgagctaatatactgcacaaggcactaagctagatttgagcaccttacttgaaacatgtcatagtggatctttgttttgtttcctagtaccagaagtgagcatgatttatatgacgggcaaatatctctgtaagaccaaaaaaactaagaagttggatgttctctggttgattaaattgtgcctgcaaaacgtctagaggatacacagaatgggctcaaaagccatgtatcagtatataattagttagaggattgatgctgtgagccttgtgattatgtatgattcgttgaacctttcttagatcattgttgattgccaatggtaaatatttgtggttagggccggcttttcaagatggggaaacgaaagggtctacaatggtagatcgggtgagatgatgcgctctctgatattcatgggcccaactttctaccagcgacttgtccacatgtcagagaacaaagtcaagttcaggaacaccggaccagtccacccgctcacacgccagccagtcgcagaccggaagaggtttggcgggataagatttggagaaatggagcgagactgcctaatagctcacggtgcatccgctaatctgcacgagcggctcttcactctaagtgactcttctcagatgcacatctgcagaaaatgcaagacctatgcgaatgtgatcgagaggactccaagcagtggaagaaagatcagagggccatattgcagagtgtgcgcatcctccgaccatgtggttagggtctatgttccttatggagctaagcttctttgtcaggagctgttcagcatgggcattactctcaacttcgacaccaagctctgctgattccccgtcattattatgtaaatagcttaatgccttaagaccatgatgatatgtgtagtttgcttcaatccctgttctggttagtgttggttttggtttggttgattctgtaagggttatccgaaacgaagaaatcgttaaaccaagccactgaactaaatcttaagtgttgcttttgtaagagttgactctttaaccgtaaatgatgatcggattttgtaaaaatcagttcttttgtcaacgctaaccggtttatatctggttttctatgtgttttataatgatccgacccagacccggcccgtttgcactgatgccgccaatgttaaattggtcagacataaataaaaccttaagtattaggaaaacattcatcgtcttcttcttctagaggcataaacccttggcttggagccgtttctctcattcttcgatttgattcaatttcattttcataaagaaggatttctctttctgtatcgcg

SEQ ID NO: 2097 - DNA, 3000 bp, Unknown
  misc_feature (1)..( 3000): cDNA_ID_1398444_gDNA_ID_1620487_Annot_ID_158494 3000 nt of promoter + ATG
actctttgtccctctctctttctctattactctgtctcctctgttccggcgatgttccaacacgcgccttcttccatttccctcatcatcatcttcctcttcaccattctatcacccgtttcacctgaaccggtcacagtccagccattccgggtcaaatcatccccacccgcaaccatacccgctttcccggagcaatccgatttctccggctgcccactcgatttaccagaagacctcttccacggcatcaagtcagcttgcagcggcaaaaagctccacaaaggaaaatgttgccccgtactaggcgcgtggctctactctgcttactcaaccactgctctaagccgttcgatttccgccgccgcaagaaactcatcctcctcctccgccgcggtaacgactcctgaagaagatatgcctttgcttcccgatgactcggagacttgcgttgacggattagggaaatctctgaggcagagagggattgagctcactagaccgaacgagacttgcgacgtcgtttactgctactgtggaatcagattgcatccgttgagctgttccgaggcttttagagtgaatgatgaagggagactcgttggagacgagagagttgatagattagagactgattgtttgagtggaagccacaacaatgctgatggattctcacctcttcttggttgcaacaagtgcttgaacagtctctataaggtaaagtcactaactttgctgctatatttagaagctgccactgtgaagttcaaatggaattaggttggctaaattggtaaaatgtgtgtgcaaatctagtaacttttagataatctatagataccctgaagcgttgttggtgtttagcttctggattttgtttgattgactgattaagacaattttttggatgagtaatgaggaattgatggactagttatagtagttaactatgtaaggtttagtccaaagtttagaagcccttttttaatgatatttatttggtgtttaaggattagggttttactatatgagtgagtgaagatttggaattatgtagtttaggattctttctgatctatccatcatatggcgaatggtagtaatttgggaaaagttttgttctttagctttttgttctctttctatctgacagtctgacacacatatacgcgctaacagaatccgtgatctccacgcgacgttttgtcttccatcatatgatttcattcttctgcatcttaatcaccaacccaccatagccaaaagcttagcaactagttgccacctttctactttctacaatcctcaatcattactttagtcagcagcaacaaaccctaatcaaaacaaacacttctgcttcattttgcagctaaatccgaagaaaacttcagggacaagaaacccatcaaaggaagaccgaaacagaacagcaaagatgcacaacaaagactgtgtcctcatgggtctcacttggcttctcgctaagaaccgtactgcttatttccccactgtcacttctgtcctccgagccgtcatgctgaaccacgatggcgtgccacgttcatgtgctctcggcagcgacggcatgcctttagccgtcgattcttccgaattctccaacggctcgccaacttcacttcagtatccgcaccacttggtccacttcttactttacagcgttatcacattagtcctaataaggtcgtggtgacgtggcacaccatggttggatttgattgtgacgtggagcacgtggcattacgtggttggttgagagaagtgaaattcagatagagagaaagagagagggctttggttctgtctttgtaaattagttttttggtgtcgttgttgttttagtagccatgttctttaacattttattacatcaaaaaaatcttgttgtattttgtcaattaaatattgaaaaatcacaatttgaaaatatttcaacaatattttcggtcatatcaaattatatgagcgcaatcaatataaatatatcagtttttgggaggagaagaataatagtcagagaaaggcatgtgagtaatggggacgaggtggtgtggctggtttgagagagacagagagacttgtgacagctttgttcttatgtttccttatcttctctctaaccacggatgctcctataacaataatacattcatgattcatccctatcatattctatattttatatgaattatcaatgcgaccaagagatgtaaaaagccccacgactgacactttattttctcatatagttcaaataatatttcattcaataatcgaatgcttccattcgttagatttttcctttgagaaatattatgaaaaagatatttcataacattttttttgtggtagtgattagatagaggttcactaatgcgccaatcaactgctagcgattcattgactttggcattattgcgtatataactgggctgggctaaactaacttgcccatgggccgcacatttacctttttggccaaataacacacccattagtctaatctaaaattacaatggtaaaaacatgagagattgaggaattgattaaaatggaatgaagataatagagaaataatttggttccactcatttctaatttagtagaaaatatataatttttcaaaattgttcataattcaaggtatttccaacaaaaatcaatggaagtttattattcttaatgttatatactactctgcattatgatatgtaagtcttaagaaacaaagtgattagcacaaaactattatacaactacactttacattatttttgggttatctaatgagtttgtgccagagaagtgaatgttgcaacaatgattatcattacattatctttctaattacaacaactaaatattaacaaatgtaatgtcaaacaaaactcaaaaagactcaaatccgtccttccattttcctcgtctctcttcttccccgtaaacccaaaaacaatctctgcaaagtcctcggttctg

SEQ ID NO: 2098 - DNA, 3000 bp, Unknown
  misc_feature (1)..( 3000): cDNA_ID_2724435_gDNA_ID_1620487_Annot_ID_158493 3000 nt of promoter + ATG
cttgctgaaaagtgccagcatcagtgcatctaaatgcattggcatgaaaccaagaaacaagtccgaggtaaaatatcaagaagcattagatgagatgtattatatagtacaagtttgtctacacttgttcttcagattcttgagttttttgcagtacggggaatcaaacaatgatacggttgatgctctgtctcaaaaggtcgcggctctccacacttgacttgtttcagagattgaggattgaaacttgttgctaacagtagacggctgattctacaagtcttgtacacatctctcagagaagacgaagaagaagtctgatcttgatagagatattgagagacatgactcatgagctatgaacaaaacaacttaaccttcattggtcttcaatttgtccatcaagtcgagttgtattaaaaatggatggagaatataattaaagaagaattgtgttaacccctggatttatgcctgacaagtatttgactttatcaggcattataaattatagttaaagtgtgtgttttcttcatgacccatatgtgcctaacctaacttgatttactgctgaatttcttctttttagtcgtcccatttactttttctttgttctcttttggtttacttactaataatctctttagagctggtgaaaatgctgttacaagctctacatatcataaataacttgaaaagatcaactttaaagtagtctataatatacaataatgggatcaattacgaggaaaccatagtaaagtatggtctcttctgaattcaggcatattctcaagtgattataaggatgggtattttctttttctctaaaagactaatttatccttttattgtttcttcattctttcttccttcttcaagctcttgattcagatgcgagtttgatgaagatggcttagttgctcatgattcacaatcagattgttttacagttgagatggatcgatctgtgtctataattaaagcctttgggttccctaaacatcatcccttagggtttagttttcttgcaacaaaacttgtttaattagttccattggattcatcgaaaaaggttggtcatagaaatgttgtgtgaatcatcggaggagaaggaaacgagatttgattgttgattgattcaaaattaaatctgggtatttatcgtttgtggagttatgggtttagtaattataggaagttccgataatgagtttatttttaatttggattttcatatcatgggttatgggtagttatcgtcttctttgtacttctcaatttcaatttggagacagtgaggttgttgtctcacgacggagaagatgaagatcatcatcaacacattcgagggcaaaatggtcatttacagaccaaaaagtacccagacttataagcccaaataaaatatgtttctattctaatttttgggtcaaaatatgcccatatgtacaaaaacccctacaataatgttgtaaattttagtttcttcttttactctatagtctaagtctatatccaaattgactgactaagtttatttttgatatgatatttgaagtttgaacacggtaagtatattataaatttaccatttgtaactctatagtaaaatagtctcttgtccttgtgacgtaagtgaatccatcttgcattacgttatagatagatacttttgtaatggcattcccgaaaaagggttttgtagtgttatagtttaagcagctttcactacaacaaaccattcgcatgcctgacattacctttttaacatggagctccacataattctttctttttcctttttactatcaaccaatagtgttttgtgggtaaaatggatataaaagtaaaattccatgaacatacttgtactattaatctcgagataaatcctagactcctagtgtttatgttcttgtggtcgtcgtcgtccaactagttcttgcttcaacaaaataagaaacaaaacaaaaccaaattaatagagactcctagaaatcaaaggactaaaaaacacttggaacaaaaagacagaagttagacttctttttcttttgagatagaatattttttttatttcatggaaataagagtaaagttgttatacaactctttatttttctttatcaaaaaaatgttttattacaactcaaaagtttcatgaaaattgacaaaacagctaaagtataagtctataaccataataaaactaatctgacgacttttttcttatagctatattagtgattgaaaaaattgcatggtctcttgttttccatgacatttaagttgcgaaaaattaattgcattatattgtaaactaattaacggaaaagtttatctgcattacgagacaaacacatgctagtactataattttgtagtttatctgcattgttgaaatcggactctgctaattttattgattatacagattacatatcaaatctagtaaatatgtagcgtttaaaaataaaataaaaaagtactcaaatatgataagctaaacttaaacgaatccttccaaactcttatgtattgaaattattaacaaataacagtgaacctgtcgatcacttgcctctgtgatctttcaagtttcaatgcaaagaacaatcgtcccgtgattcacaaccctcaatattcaactaaggttaccctaataagtaataatccaatatgatttcattattcataaaatagtcgccagcatggattacgattaaaaagtttattttttctattattgtcctacacactgaaaaatggagtgttaacgaagcataagaaatgttttgtaattttaagaatgtttgatcacaaatttttttccactgatttttttacattattaaaactaataaaaaaactgacttagtagtattaaattggtatatatcgagatcccatttgtgatattttattacacatctcttccagtctctcactctttgtccctctctctttctctattactctgtctcctctgttccggcg

SEQ ID NO: 2099 - DNA, 3000 bp, Unknown
  misc_feature (1)..( 3000): cDNA_ID_2149497_gDNA_ID_1620488_Annot_ID_158525 3000 nt of promoter + ATG
agtcatctaatctataaactaatccttgatccctaaaccaaagacttaaactttgactcattgatttttagatcaccaccaagctaaaggatctagattcaaacattcaaaagacccaacaaataaaaatcaggacttttcaaaaattgaagtgcaaaatctcaccaattcattaccactgctgctggaagaaaccatctttgaagaatcatcctcagagttcaaatctctagtctttctacttccccagccagcagttagatcggtgactgtagattcctcagccgcggagacgtctttattgccggaatgttcagagcgagtaaagactcgaccggagttaacagctaaacggagaccagagcgaacggcgtcgtttacagggaaaggccaaatctcggagagagtgtaagaagaaggattagctgcagagaaggaggaatcgttcactagtggagggtccatttccgatgatcgtaaaaagggttgacccagatttaggacccggatccgagaagtgaggaacttgatagaaaaaaagaaggaaaaggtttgagctttgcgaggtcttgtcttgtttatagggttgtgtgtgaggtggacaaatagagagagagatcggagaaggtaagacagatgtgggtagtgataatgcgccactagtatgcaatggaagatgatttatcaccaatactttcagaaaatctcattaattacacagcttacatcaaatattttgccgtttctgttataaaaaaaatattacaatggtaaaattttcgtttcgtttagaaacaaaattgaatagaaaagatatattatggcgcaataacctaaataatttctatcaaaaataaaaaataaaaatctcacaattatgtcttttagttatcctttgattaaattattttttactgtgaacaactttggtaattttactgtgaacaacttaaatacaccaaaggacaatgcatctctcttagaaaaaaatacatactagcaaaaccaaatcatgttactttggtaatttcattctgacgtgtttaaggaaaaaacgtatatgtttggattaaaaatttgatcttcgtaccatatgtccatcctagtaagtactcgatcgcctatgtttacaataatattcaccaattagtgtttttttatttaacatagatctcccacttcatagtcatatgttttatgaaagttagttgtgtaaagtgaagggaaccacacaccggtacgtaggatacgatcgaggatgtgacaatgggccatatatttaaattttaaatgcttaatcacaaaagccaaaattctagctaaatatataaaacgctaatatgaaggatagatgacatgtgttttagtctttttgtttgcatgtcaacgttcttcacgttaaatttttaaaaattcagaagctatagttttattatgttcaatgtagttttagcctttttggtagatgacatgttcaaggtagttgcggaaaaatacaaggagccaagagtgtcatttttcgtttcgatgatttcaaccttcatttgttgtgtttattataaaagtttgtatttttgaatgatgaatacagagatatcaaacgtttttaagaatacagtatataacaaacaaaaaagctctaaaactattcactgagttaaaacttttaaaagtcaattctatagcattgaatgctctaaatgtgtagcaagaaaattgtttaaagaccaacaaattagaaattgatgtttttctgcaaaacttttttaattattaattttattatcgaattaagtggaatatgtttatattttgatgaaataatgaaaaggtggaaaagacaagtgtagaaagagaagacacctggatgcaaaggtgtcacacatgaagcccaattcctctctttccatttttcccataaagcttttttgctctactcatcaagatacctctaataaaaaaacaagaaacactatttttttgttatcaatttcttctgttcatttcagtttggtcatgaaattaagaaaattaatagagagaaaagtcaaaaataaaaacatgagcataggagtactatgtgacttcattggtgatggaatgacacagttggccgatttagcaccgactaagtagacattaatcaataatagtttaaatttcaaaataagaatcatatctactaaacaatcaaatacatatgattccatctactattattgtttttttttaatttataaatcatatagtactaattaactaataatttcacattctgtctcgtgtaatcaagacaaccttttcgatttgtttttttggtcgatttgcttaaccttaaaaatcttattacttcaattataagattaaaattcgacaaaaacataacgtttttcctttttattctactggtggtggaaataatcatctagaataataaaattactttaatttgaaaagataaatccaacgaatctataactttaatcgaaaactaaataaaataaggaaaaagagaagatttaaaagcgaagaaaagattcgaaaaagagagagagagagatggaccaaaacggcggtttattcagacgtcagcagcactaactaagaaagaggagagagctttaactcttccccttgctgcttccttctccaaattctcctgacgcgtttctgttcatcttacgattttacacgtctctctaaagatttaaattttcgactttacgtttctttcgggttttgaattttctcactaaagatttgtcttttccatagaaagttcttgaattttctctcttcgtgttcaaagggtttttcagaatttatagtaacccaccaatctactgattgtctccgttcatcgtaatctctcaagatttgatttttatttgttttttgaaattttgaattttgagattctgttcctctttgatcatcatcactagggttttctgtttccagttaaaaaaaagtttggatttttcttcgtataatttagga

SEQ ID NO: 2100 - DNA, 3000 bp, Unknown
  misc_feature (1)..( 3000): cDNA_ID_1388852_gDNA_ID_1620488_Annot_ID_158537 3000 nt of promoter + ATG
cgattcccgaggctcgaaaaaaccctaaatctcttctccgttcactcatccaaccgaagatgcgtgagattcttcacatccagggtggtcaatgcggtaaccagatcggcgccaagttctgggaagtggtttgcgccgagcacggcatcgatccaaccggaaggtacaccggagactcagatctgcaacttgagcgcatcaacgtttactacaatgaagcgagttgcggtagattcgttcctcgtgcagtgctcatggatttggagcctgggactatggatagtctcagatctggaccgtacggtcagacctttcgacctgataacttcgtctttggccaatccggtgctggtaacaactgggccaagggacactacacggaaggagctgaactaatcgattccgttctcgatgttgttcgtaaggaagctgagaactgtgactgtctccaaggttattcttcttcttcttatagatctgtttgattttagtgttgataatgctttactagtgttttgaactgtgagatttccttgtgtagggttccaggtttgtcactcgttgggaggaggaactggatctggtatgggaacattgttgatctctaagatccgtgaagagtacccagatcgcatgatgcttaccttctcggtgttcccttcaccaaaggtttctgatactgtggttgagccttacaacgctactctgtctgtccatcagcttgttgagaatgctgatgagtgcatggttcttgataatgaggccttgtacgatatttgcttcaggactctcaaactcactacccccagctgtaagatttcatttcccaattatgctctccaccaatgttaagatgagttaaactatgcttgaaatgcttggtctacatggtgtttatgttaataattggtatcaagttcagatctgcaagcatctatgtaaagcttatagtattgttactgtttccattggtttgctctttgactatgtcactgttttatatcagaattctgatttgcaagtctctgtgcagaacttatacttttgttactgtttccagtcgttttgtacatatctttagcctcttgttttgtgtgatattgcttctgtttacctattttgatctcatcaccgaagtaggtccttaaactactcttattggaacaatactttctggttaagttgcaagtagaaatctgatacttgatgatcatcagtttgttgagtttactgtctgctttgattcttttctcatcgtactgtttggatatgtctaaagcttacacatacttggattttcttctgtgtgcagttggtgatttgaaccacttgatttctgctactatgtctggtgtgacttgctgtctgaggttccctggtcaactcaactctgacctccgaaagcttgctgtgaatctcatcccattcccccgtcttcacttcttcatggtgggttttgctcctctcacctcaagaggttctcagcagtaccgttccctcacagtccctgagctcacccagcaaatgtgggactccaagaacatgatgtgtgctgcagacccaaggcacggacgctacctcacagcctctgccatgttccgtggcaagatgagcacaaaggaagttgacgagcagatgctgaatgtgcagaacaagaactcgtcctactttgtggagtggatccccaacaacgtgaaatcgacagtctgtgacatcccacctactggtctgaagatggcatcaactttcattggaaactcaacatcaatccaagagatgttcaggcgagtgagtgagcagttcacagctatgttcaggagaaaggctttcttgcattggtacacaggtgagggaatggacgagatggaattcacagaagcggagagcaacatgaacgatcttgtgtcagagtaccagcaataccaagatgcaactgcggatgaagaaggtgactacgaggatgaggaagaaggtgaatatcaacaggaggaagagtactgagaataatttagttataactgctttaaaaacaaaaacaatttagtcgtttgctacttttcttttttttaaaaggaacacctcaactaccagttgtagtttttttctctgcttgtatttgacatatctggttgatgtttctgtacttttgttcttaatcttgttattgcctgtgatgtttctattaatattttccagttgtactgtcttcaatctttggtcttctatcctcatctttctgctacctgactacctcagtacctacttaaggactttaggtttgatctgtttggaaaatagattaaggttcgggatttgtgacctcagggcaagtgcagctccatattagaccccaaaacaaatttatcactgttctgaaatacaaattccccaacatgcctagctttgaggattgattgtttctaagctatttattttctttaccaattcacataaatactttaggataaagtggaaattgtcaatattcaaacacgttctcttccctttgttaacaagcaaaatatgaaaataacatgtgctcttccattatttcattttttgcaacccttatgaatgggcccaaagcctgccacaaacatgtgcacaatattagaaaagaaactctaaaaacaaaaacaaaatgaacattcttttttttgcaatttgtattataatatcaaaataatattttaaaactcaatttaatattggaaaataaaataaaatttggaaactaaacagttaccatagagaaagaaacggaccatttttaaattttgaatttcgagaaaaacaaaatcggcgcctcttattagagataattgggggaaaaaaacaaaaaacaaacacagagagagcaataataaaaactcactcactctcacttttttcatttcttcaacaaaaaaaacctaaagctctcttttctctccagatttcgattcccgaggctcgagagaaaaccgtaaatctcttctccgttcactcaatcaaccaaag

SEQ ID NO: 2101 - DNA, 3000 bp, Unknown
  misc_feature (1)..( 3000): cDNA_ID_2149529_gDNA_ID_1620488_Annot_ID_158536 3000 nt of promoter + ATG
gcacagacatcaaggaaagcatataatatgttgattttgaactcgttttctaggattgtttctttattctgtagctttgaatttgttccaactgaaattgtggtcattgttttgtcaaaaaaaaatgtggtctttttacatatatcagaaaaatgatgtttttacaaatctcgtacttgtgtgacaaaaaaaggtatatatatatatatatatatatatctacatatatatttttgcagtcattttgtgaaataaatcttggagttgtatattatttacaatggctgacattggcttttaattattgattttcttttggcaataaattgattaataaacaaaaaatattccaaatatattccaatcccatatatcacgcagatttctccaaaatttgaactaaatttcggaaattatttaaaataaaaaatatttgacaaaccaaaatacaattgcaatcccttaaaatgagcaaaactcacctaaatacattccttatcagtttactaaatcttatttctccaacatttgaattagatttcgacaactatttaaaacaaaaatttgtttgacaaactaaaatataattgcaatcccgtaaaatatttttttaaattagcggtgtaccgcagatttttttaacgggacgggtttggtagaacgggtttggaaggatgttacttaataacaattgtaaactataaaatataaatattttataaataaatataatttagataaatataatttacagacttttatatatactaattaaaaaaaaaaaaattatctacgcggtgtaccgcgggttataatctagtatgtcttatgcttgttagaagaaagtcggatgttttgttcttaaattttgaatacatgccactaccatgtgtttctaaaacaaaaacgaaaccatctttaccatctctagttttattaaatcgggttagttggttaaaattcgttattaaattaatttataacttattaaatagagataaactgttatcataaagcaaggggaaaaaaaaactaaatcgagcaaatacttgaaaatatgtgacgcacaaaacatagtatatattataatgttaataggtttgctattctggcatcaattatggttttacgtaaagttcagacgttttatttttttatttaaggattcttacatatgtttatgtttgttttttttttttttttttttttttttgagcaactacttatatatgtttgctgtttttgtccgaaggccaattagttttcctttaacacttgaagaatatatatttttctctgacataaaaattctaaaatagttcaacttgtacaagtaacggaatactaaattgcatgtcgttgttgttatcaataactttagattaacgcaaagtgtaggaacaaagaaccaaaaatagtaaataagtgtacatgtttgaaaacggataacaacgaatactaaaagatcatataacaaacgacgacggaagtagtagtggtagtagcagcggcagcaaggtccagtcaaaatcacttggcatttggctaacaaagtcatcgtaacgtactataaacaataatatcaacttctcttatgcgtaatgcatttccatttatttagattcctatattatctgcagaataaaatataacagaaaagaaaagatgacaggactacgaataagcatggtaaattctgaacccattgtttctcagtggggaatttttgagtaataataattgatatcaaatctgaactatagtacaaattttgttttttccctaaaggatatggaaatatggatttcgaaaattttggtacgaataataaagccaatcatcggactggaaaccatttttgtcggaatttttcaaaattcattcggctgatttaatgtaacaaatactcatatataaagcaaactgaaactaagaaaacaaaaaacctcaaattgaagaagaatcttagtatataataaaatagggtttggttatggtcaatttgagtccaatattcttttcagaaaaaccaagtgagaatctaaccgaattatttcccgactttattcggtacctcgaactcgtaaaccgaataaaccgattcggctacaggctctgtttcgctttcttgttggtcaattataattgaactagagtcaatcaatatcaatgtttgtggtcaaataattgaaaatgggcttttgtatcaacaactgttggcccaatttaaaaatggaaacccaaacatctttaccaaaatatccaatccataaacttggatcgttaagtagattttacatactttattgttatgatttattcacatgttgtcacggcccagtgttccctatagtttgattggattgtgtctaagctattgatttcctttaccaatttcattagccggtccatctattggaggaaaccttaagctacaatttattttctttaccaattccacatatacagtttaggataaaagcgaaattgtcttttttcaaacacgttctcttccttttgttaacaagcaaaataacatgtgctcttccaattttcattttcagcaacccttcatgaatgggcccaaagcctgccacaaacatgtgcacaatattacaaactctaaaaacaaaaacaaaataaaacattcttttttcccaatttgtattttaatatcaatttgaatcaaactcatagttttaaaactcaattttgtaatcgaaaacaatttttttttttttttttaaggaaacttacacagtagagaaagaaacggaccattttaaaattttgaatttcgtaaacaaacaaaatagtagcccttattagataattgggaaaaaaaaacaagaaacaaacacagagaggagtgagcaataataaaagctcactcactcacacttttattcatttctctgaaaacccttaaatctccggatttcgattcccgaggctcgaaaaaaccctaaatctcttctccgttcactcatccaaccgaag

SEQ ID NO: 2102 - DNA, 3000 bp, Unknown
  misc_feature (1)..( 3000): cDNA_ID_2149513_gDNA_ID_1620488_Annot_ID_158530 3000 nt of promoter + ATG
ggaacaatatccccgagctttatgctgattatatcacccggaacaagaattgcagcatcctgctcaccccatcttccatctcgaagaacctttacaaacgttttgacaagggagatgcaaatatacattaagcaaatggtatccgtctctcagctaagaaccaaatcaactaactgatataccagaaaacaatctatgacattgttgaaaacaagtagcaataagcaggtatatcaaacctttgcttttggggcaagacgtgccatgagtgcagcagcagcattcccggcattgttctcctctatgaaactgatagtggagttaatcacaagcagagtaataataccaacaaagtcttgccaatcaggtggcttcccctggtaaacaaagcatcatcaagaacacagaccaaatgaagattattaataaaagaggtaactttaaaacaatgaaaatatgtaagagagtatgctcactcctccattagcaagagcaatagccatgatagcagcagcttccataacccaagaaagagggttccacatgaaaccaagaaatttcaggaatttgctttcctgcaacaaaaaaaaaaaaaggaactttgcttcaggacataaaaattataatcgtttggagctatagaccaaaacccaaaattccagaaaaacacatgaatacaacatagagaaaggaacaaaaccttcttctcttcgagcttgttatgcccaaaaagagccagcctttcatcagcagcttctgtagtgagaccttctctgctacatctcagactctcaaaaacttcttcaataggtacattctcctgaaaaaacccaagaaaacaaatttcttcagattctttctctccaacatcagagaaacaaataaaaattaaaactttagagtagatctgttaccagatccacagtttctttcaaaacagcctcaaggacttcttccttgtcccccatattctcctgctacctcctagtacaattaaaaaccatacaaattatcagaaaaaattctccattaaaacaccaccagaaagctcaacaacttaaaaaaaacagagaaaatgttgaaacacagagatgtagaaacctgtttctcaagatgatttcctaatcttcttcttcgtttttgtcttttgggtttctcagaaaagagaaagaagagtagagaagatgagaaaaccgctaaaggttagtggcagtatgggaagctaacacactccgacctctctctctcgcaccacaattatatccttcatttatttattaatttcctttatatatttaatctattaaattctcagtcttgtttaggcatctttttcttactgcctttttcaacattttttcttcatgcgtcaagcaagattcatgacacctcatcatctatatcttttactacaatagggaattaattatttaattaacttgacaaaaaatctaattgcagacaaactagagatgttaatgatcttttcctaactcaaaacacatgaaaatgtatccaagttaggaaagtgagtcgtcattagagagtataaacttatgtaagttaaagtaatagccttgtaggcgtgaatgaccgttggaattaaatacaatacatgggaaataaaagcgagtaggtcacagagacactctcaacataagaaagaaacagccatgtgcatcacaaagtggtggccatatgcttgaagagatgatgctcccttggaaacttgacacgtgtccatgaaaaccacataaacagttcacattttacaacacacgccaaaacacaacccacgtgacgcagaccttttgttcttatttgtactatttcttttttttctttttctatgcgtttttttttttaaatatgaataaaggtaccatgttccgtacggtacccgtccgtagtagaacgagtgtgcttccaccactctcatgaactttttctctcatttttcttctttcgactttataaactttttttcgtttcaactttgtgtattattagtttgattcagtctttttgaacttcttctttggataatggaaatttgactaggagatgatccatcttatatcaaagtgaagtctcctttttatttttcttttggctttttccctcggcaacgttaacgaatatttttcttttagcttttatcgtttatcattgtgatttttgaagtaattaaacattacatctatatatcgcttttagtgttctatcctttatagtcaaaatgtgtcccatcttgcctgttagggaatatggagtaatagatggtgagtggacttaatctttatcttacatatatatgatcaaaacccttcttatatctatagattctgaactgtcttccaaatggctatgatctttatgctttggaaagaatgtaacaacctcttgcacaacgtgacatcaaaaaccgctgctgaaattcgagaagtgtcggtaaatactctacttgctaggagaaagaggaaagcttttgcaacccttctatatccaatggttcacatttgactaaacttctagtgctcaattagtcaattagtttcgatttgggaaaattaattatagtcaatcaaaaaaactataaaaagacatcctttttttttcttcttctgaaaaacaaaataaaaagacattctaaggattaaaatttcatgatgagaaaagtgaccgacatattattgatttgttattcaactttgataaaatgcatcttgttattgaaaataaaagcccatgataaacttattggaaacagaaattcgtccatgtcccaatggaggctcaattatttttagcccaaaggtttagtaaagtagtaatcagcccatgggctacttagattggaaaggaagaaatacgccaattttcaaaccctatagtcgcgactcgtgagctaccttgatcgtcttcctctgttctcttactcagatcctttttagaaaacaaaatattttggtcgaattaagacataagtaagtagctatg

SEQ ID NO: 2103 - DNA, 3000 bp, Unknown
  misc_feature (1)..( 3000): cDNA_ID_2105676_gDNA_ID_1620488_Annot_ID_158532 3000 nt of promoter + ATG
tttccagcatcttccaagacccacaagtccaccaaacccgtttgtttcatcatggtataatcaaaaacagctggttttccaccatactctataaatcccacagactcagaaaatgcagacaccttaagaggtccttggatcatactgaactcttcagaccgaacgtcaaaactgacaacgatatcacgacgcttccaagtggaagccaaataatatataactccattgacgcacaatcctagtctcgtagggagatgaggttgatcgaattcaattcttttccacgaacctcctggttctagtacgaagacccaatgctctgaggttatcctcttaagcctttttgagaatagtgcaacagtgcaaactactttgtattgatcaagaacaggatcgtatccgaaaaagtagaggagactattccagtgggatttttgagcaaggatgttggatttgacagcaggtaaggttacactttgtctggtggtgggattatagatagacgccgttctgcaaacaacgtatagaatcaagccgcgaagaaccaccatgttgcgtcctcccatccctgcaattgtcaaattttgttccaaagactcagcactgctactagacgacagcagtacagactcacatgggtagtggcaaaccatcagtgaattacacaagaggtggtctaccaaactcatgtatagacgaggtggtcgccgtggagttttgaccgtaagataacagttgctaaaaaatcgggaacggataagagaagaccataactttgagacgcacttgaatctcataagagatttagcaggcaatttagtcagaatctcgatcagtagatcgagagggatctccggcgcgaccaaagcgtcttctattcttcttcttctttttcttcctcttctcaacatcacctttgaagacctcgtcttgcatcgaaaggatgaaaacatagctgcagacatacgcatagctacttacttatgtcttaattcgaccaaaatattttgttttctaaaaaggatctgagtaagagaacagaggaagacgatcaaggtagctcacgagtcgcgactatagggtttgaaaattggcgtatttcttcctttccaatctaagtagcccatgggctgattactactttactaaacctttgggctaaaaataattgagcctccattgggacatggacgaatttctgtttccaataagtttatcatgggcttttattttcaataacaagatgcattttatcaaagttgaataacaaatcaataatatgtcggtcacttttctcatcatgaaattttaatccttagaatgtctttttattttgtttttcagaagaagaaaaaaaaaggatgtctttttatagtttttttgattgactataattaattttcccaaatcgaaactaattgactaattgagcactagaagtttagtcaaatgtgaaccattggatatagaagggttgcaaaagctttcctctttctcctagcaagtagagtatttaccgacacttctcgaatttcagcagcggtttttgatgtcacgttgtgcaagaggttgttacattctttccaaagcataaagatcatagccatttggaagacagttcagaatctatagatataagaagggttttgatcatatatatgtaagataaagattaagtccactcaccatctattactccatattccctaacaggcaagatgggacacattttgactataaaggatagaacactaaaagcgatatatagatgtaatgtttaattacttcaaaaatcacaatgataaacgataaaagctaaaagaaaaatattcgttaacgttgccgagggaaaaagccaaaagaaaaataaaaaggagacttcactttgatataagatggatcatctcctagtcaaatttccattatccaaagaagaagttcaaaaagactgaatcaaactaataatacacaaagttgaaacgaaaaaaagtttataaagtcgaaagaagaaaaatgagagaaaaagttcatgagagtggtggaagcacactcgttctactacggacgggtaccgtacggaacatggtacctttattcatatttaaaaaaaaaaacgcatagaaaaagaaaaaaaagaaatagtacaaataagaacaaaaggtctgcgtcacgtgggttgtgttttggcgtgtgttgtaaaatgtgaactgtttatgtggttttcatggacacgtgtcaagtttccaagggagcatcatctcttcaagcatatggccaccactttgtgatgcacatggctgtttctttcttatgttgagagtgtctctgtgacctactcgcttttatttcccatgtattgtatttaattccaacggtcattcacgcctacaaggctattactttaacttacataagtttatactctctaatgacgactcactttcctaacttggatacattttcatgtgttttgagttaggaaaagatcattaacatctctagtttgtctgcaattagattttttgtcaagttaattaaataattaattccctattgtagtaaaagatatagatgatgaggtgtcatgaatcttgcttgacgcatgaagaaaaaatgttgaaaaaggcagtaagaaaaagatgcctaaacaagactgagaatttaatagattaaatatataaaggaaattaataaataaatgaaggatataattgtggtgcgagagagagaggtcggagtgtgttagcttcccatactgccactaacctttagcggttttctcatcttctctactcttctttctcttttctgagaaacccaaaagacaaaaacgaagaagaagattaggaaatcatcttgagaaacaggtttctacatctctgtgtttcaacattttctctgttttttttaagttgttgagctttctggtggtgttttaatggagaattttttctgataatttgtatggtttttaattgtactaggaggtagcaggagaat

SEQ ID NO: 2104 - DNA, 3000 bp, Unknown
  misc_feature (1)..( 3000): cDNA_ID_2149519_gDNA_ID_1620488_Annot_ID_158533 3000 nt of promoter + ATG
tcgagctgaaaacaattttatgttggcctcatctttttttttttcattcttgtaaagctcagtgagggatttataatattactttagaacataagtcttcatatataggctaaacttcatctcaatatttaacattttagtagttgtagctgaattcgtaataatatagtgaaaagttgcgaaagtgaaagaaagtattctcacttggttgggttagttaggttagaacttgaaaaaatgcattaccgtcaagccgtaaagtcgggcattttgtaaatcgtttctacatctagttggcattatgataaacagaacaaaaataaaatgtactgtaaatatgggccttgagagaaaatgtatttcgacctagaaacataattttataatagttttggttttcactttaataaaattcaaaaatttaatagaatgattaatactttccgcaagtacaatacatgtgccactagatttatttggataagagacctggtcgcttacagaatgatcacaaaagatatgcctaacttcactcaccatcacataaatagtttaaaacacaattaaatgttaagcgaaattattttttctctgcttataaaaggatttaaactttgagtatagttatatatattgacaatatgttgaaagttaccaagtatcctttttcaataattcagcacaaacaagtaaccaattaaaaaatcggatcattactattttaatatcattatttttattttgttttatcaacttggacctacgcccgtacttctctcgaactaccattatgtctagtaattttaaataaagctattgtgtattgattttgttctaagatggttttgaataggttttctacaccggtataccccatagctccgttaagctatacttgagatttctattataaaaatatctgaggcgaaatgctacactagtttcccaaacttacaatcaccatatgattactaagtttttttttttttttgtttgacctcatagattgtcagtactatgaatcttgaactagaggcaataatttctttcataaattgttgatcgcatatctttgacaactacaagcaaataagtacgacaacatatgcttgaggccgattttaattgtggacctaagtggtaaaatgaaagggattaaagttgaattgaaagctgaagacctcaagttgatgaatttgaaaataggtacacatccttattggtgtcatgtccaattatgttcactaaaacatctcataaattactaattgtctaggaaacaaatttataaatgaataaggacaaatttgaacaacatttatttttaaaagcttttatatcaacagagttgagcattgtctatttttccgtgataactaggttatttttggaaaaatattaaagtaatatctacgttaattaacttctttcagccaaaaatattactttgtattttgtcattagcaagaattgttttttgttttctttattatatattaataataatagttcacaaaatgcaaatgaagtccacaaaattctatccaccaactgacagcgaattgaaattcgtcaacttggtgaaaattgtagatgtggcgtttttatagtttgtacgtgtgttaaaaaacagaaaattaaaagttctttgaaacttcaacggaaatcaattggaaaaaaaaaatcaataacacaaaatctggccgttttcaatgaagaaaaccgacaattggcttttaacacacgaaaaatggtggattaataaaagaatgaatctaagtacatatgatagcaaaatggtagataagagggaaagttgtttgcaccttagttggtaattgaatttttaacataaacgattcaaatgaaactaacacgaaaacgttggttgacatatttcttaacacgaaattgcagccagcacactagatttggctgatttctaactaacttataacttattccgtcaaatcaatgtaattaattaatttactagttaacatctaagaggtctcacactagcttaaccaactatggtagactgatcgagtggttgcaaatttgcgaaattgatcgaaattaaaacttacatctcatattcttgtgggtatgtgtttttcactatatatatatatatatatatatatatatatatatatatatatatacgctttaaatgaaaagaatcgaatgttttcttatacagagtttgaagtaattaattatatggtggttggtggtctaggtacctttaccaggttaattaacctcctaaaaacgtacttaattttttagttcatatatattgagatttcgtataaattctgtatatatatgcgcatgtcgtaagatagatagtattttcaaatacattcatagtagtcagtgtaactttcgaaaatgataatgtattataaggatatttgaatatttaattaaaatgcttggaaaaaactttataaaatcgatctcgaaatcatacagcatttaagtcaacgtcagttttacactagttaattaaaatataagattatgagatcaaaaatagtggaaagaagaagaataagattagaaaataagaaaatggatggagagcgtaaaagaaagtgccgttattaagagggagtgttatgatggggccacaccacttattaatggaatctacatttttcactgattttgctaaatggattttataagtttaattttggaagaagaaaaaaagaagaaattaatgaatatttaaatcagtaacagagctctctttcacggccaaattcaccaattaccactttgtcaagattccgacatctccaccatcctcttgctttctttcttaccactataaatagagagagctctaagatgaagaaaatagtcatcatttgtctctgaaactaaacaaaacacacaagaaaataaagatactacaaagtatacgacaacttctttttttgtttgtagtaataattatagccaaaaatatagacaaacaaaatg

SEQ ID NO: 2105 - DNA, 3000 bp, Unknown
  misc_feature (1)..( 3000): cDNA_ID_2149509_gDNA_ID_1620488_Annot_ID_158529 3000 nt of promoter + ATG
ttccgttttttcatggatcttggtgatgcaggtgcattgacacttctctttgtaagctattttagcagtttccagtaacttagtctagatactacttgcttgtataagagccttctggttttgaataaggctgaaataatctaaaatgaattgcaatggagatcctgaaactgcaaaccagattgccaatttttgggtcctgacgtgttgtttgttttctcagtttcatatgttaaaaaactaaatattccaagtggagtggttggggcttgtcgacttgatttggcatatgagcatttcaaggtatgccttgattggaactagtatcttgttatatactacatttgaattgtacgagaggctgagttttaattgtttcattttcctcaggagaaacctcacttatttcagtttgttccaaatgagagacaggtcagtgtgacactgtgacttggatttgtttgctcctttgattaacttacttctaactgaaatgatttctgattcgcaggtgaaggctgccaacaaacttctcaagtcaatgccacagaatggtaaaacacaaaaggtggagggtgtccctgttttcggtgctcaaaacctggacattgctgttgcaactgcagatggaattaagtggtgagtttaactgatgtaaagcagtgtgaatttgttaggacatgaaaatattttagcttcgtgtaatcaactccctccaagttatactatcagaacacatggcttttcaattttcttgctgacttgcctgtattttaatttgatagttgtgcaaaaaaattcttcgagcatttaccatttgtatgaaaaatcctgggattgttataactttttagtacctaattttatttacctttaccaggtataccccatacttctttgataaagctgtacttgataacattctggaagagtctgtagatcaacatttccatactttaatccaaacccggcatgtgcaacgacgacgggatgttgttgacgatagtttagcttcagaggttatggaagagatgggagatagcatgctagagccgccagaggtacacatattgattcttgttatgacaaaacaaacatgagcatgtaattgttatagtcaacaacaagagctaccggggtagagtttgtcagttgctattcctatcatcttgctgggtgcctccacgtagagataataaattttaaccagggtagcagaaaaagatattgataatgtttttgctttgtttattggtggtggttatagagtttctaaaaactttacggtttttcttcttgtgttaatcaaactgcaggttcaagaagccatggaggagattggcacttccggaattcctttgagtgttgtggcaaaggctgcagagattcagctcctatatgccgttgacagagtacttttaggtagtagatggtttcgaaaagccacgggtatccagccaaagttaccttatttggtcgattcttttgaaagaaggtatgcattgctcgtgcatctatctttttgtttcttaactatttcttcaaagctaggttttccaactcgtttaatgaataagctagtaatttggtctccaacagagttttatttacatagtgaaacgttattatgtcactttgacacaaaaactgggaagtttgctgaagcagaatttgaagtttggacatttattcagttctgtatatattcaaactaaaaagggtttcaatttcttctagttgagttatataggaggatttagattttcgaattttgctacagatccgtgcaagcaaaatcatattgatgtgatgtacacagaccaacattaaagcacttattaaatgcctcattagatagctaatattttctctctcgcttctcttaggagtgcattttctatccaaagagcgtcagggtcagcaacaagatgtcttggtgattcagtagaagcagatacttccgcatcactacttagagtagaagatgatagtccaagtgaagctgaaaagagacagcaacatctctggtttccttttggagattggatcagtcactctgtatcaagaaaagaacacacacatcacaagggttcatcagatcaaaggtaccaattgaaaacaaaaggttgttgaaagagtgtaaaaatcttaaaatgcacaaattttcggtttcagggatatggaatctagagaaagagaaatgctgcgaagtccattcttaccaaagataacaatggtagggatttcaacaggagaagctgcacagatgagtaaggctaatctcaagaaaacaatggaagatttaacagaagacttggagcaatctgatgaagggaacgatcatggttcaaaacgttacgactctctaaagattgaagagagagatcctctatttgttgcaaacgtcggagactactattcgggtttggctaaagctggttctgctcggttgtcacgtagaggtgatgaccagtaacgaaacacatcctatgggtcataacctatcttgtgtgaattgctcaagcctagttacttattgtaatgcttttaggcatgtattaagtttgttgtcatgttgaaaaaatatttttacccgatgtcattttatttatcggcgtacttttgaacgtgaaaatgcaatttttcacccatgctctcaatagtaataattttgtttataacatttttatcattggttacgaaaataatatgtataaaattactaatgggctttttcagtatacataagaaaatccacgaacggcccaagattcaattgacaatgaaggacaaaaatttgcttcgtagatagacatagatcgagcgagagtcagggaggagagaaaatccaatcttgtattgaggaaacaaaattcaaattatattgtgcgagagaaaagataaatctccacaagatctttgtttattccttgtaaaatatctgtgagcaaatcctaaatcggtgggagggagattgaagaacggtaaacggaaaatatg

SEQ ID NO: 2106 - DNA, 85 bp, Unknown
  misc_feature (1)..( 85): cDNA_ID_3065991_gDNA_ID_1620489_Annot_ID_158541 3000 nt of promoter + ATG
gatcccatttcttttgttggcttacttctctcgaatttacgcaggaagatcattagcagagaattctcatctgattcagtccatg

SEQ ID NO: 2107 - DNA, 3000 bp, Unknown
  misc_feature (1)..( 3000): cDNA_ID_3065969_gDNA_ID_1620489_Annot_ID_158550 3000 nt of promoter + ATG
tttcgtagttttaagtagatgaccaatcgctatcagtattcaatatcttacataaacctagaacttaatgtaggtcttgtggttgctaaatagatttataagatttaatttttacgtaccaaaattaagtttttaccatcagaaatatgtgaaatattgtgtattgtggagtttctgtagactatagagaacaagttttcttaaagttaatatatatgtaagttataacttataagatgttctcatatgatacattagacgacgaaaaaaagttattctattgtaaaaatttccgagtttgttaatgtattgtatcgtgttcaaaaagggaagatatatatacctctgcgtggctgcatattttatggggtgcatgtgtctccactcattttttttttaataaagaatgttttacaaagaaaataagttttggaaagaaatgtgtgaaaattcttataaatatgcttataatacataaatcttaagctcttaatttttgtctgtttagaatagtatttttttttttgtactaggaaatagaatcttaatcttaccatgagatgtacaactatgtgatttactgtttcgtagaattgttttacagactatattataatttagtgtactctcctttttattgcatactgaataagacacgacaccttgtttcttattgcatactgtactactactctcatctttttgtttatgtcgaaattagatatgtcaacgaccaatcacgagacagcagtattctgcattcaatcgcaaagttgctcaaaatgtctgcgcatgactttgaaagccgcaacgctactaacgattcaataatacccaaaatagaaaacaccttacatcttgtttttattcaaaatcagatcgaattattatatgctcttgcagctttctctgttaccaaataccaatgcatttgtaaaccatttgtgttttcataactatgtctatgtaacctggatattttaaataaataaataaatatatatatatatatatgtccaaaatgaatatcctactatattatttgggaagtacattttaaatataaccttattttttgtaagtaattacataggtatgccattagaaataaaattttaaagagtaaattaattcatttctttaaaaattaaaaagtcaaatactaatttaattaattaaatttaactcaaaaacgaaatacattattaatttccaaaaaagtaaccaattaaaatcaacaaattagatttggtatctaaattatcatattaattttttattaattattatagttcacctctcatctttatatgattctatttttgcgaaaaaataatatcatcgttataaaaaaataattagagttttttcgcatatgccacaatttgaattatcatattagattttttaatgtgtatgatgtgattcaatttttaatacaaggtgaaaaatcctagaattgacgggtttaaatcaatattaatacaagatggtatactacaggtgaaactataaaattaacaatcaaaatacaagtatataattttaaacactaaacaatataaataatatcaacaaaacatatacaactcgcagtttactatacatttaaaatcaaataaaataatatcatatatttataatcaactttacaataaaagtttttagtttaactaaaatataagcctacctgctgtataagtaataaagtcatatctattttatagagttataattttttataattaaatttatctataattcgaaatttaaattttactataatatgaatatttatagacctattattcaaatatttcactatcataaacacatacaacaaaattatatgatatattaatatgtagttatattacttatgtattttgaaacttgcctaacttaattgtaacaaacaattctttattccatatattctctcgttatctagtacactaaccacatcatgatatgctagtaattcaagtcaacactttaattctcttcccttgcatatagccatatagagtctcgtgttttttgtgtgggtatgtctaatgtctcggatgaccattacgtgaaaaatgtatatcaatgttaccaagttatcagaacgcacaaaaataaacagaaataaggtcatatgataaatcatattcatataacgtaataataaaaaaatatccaactaaaattactaattaatatgaggttaggtagcaaacatttaaactacgacacaaagtaaattttagccattataaattgataactattgataaaaatattttaaaaaataagtagaataaaatgaaagtagtacttgatatattattataattttttatttattgaatgttttaagaatatttatttaaaagagagattatatagaatttaacacaacaaaagacttttgattcttccttaattaattgtattaattttttatttaattaatatagaatgacacatgtcattttcttgtatgatgatgtgtcacttatagagagttgaccaactttcatatatatgattttgtctttataactaagaaatattacctcacgaccatacatagtcatgcatttctatctgattttcagagaatcaaatttctttctcgagtcaacgaatttccctgatttcatttagataacctttcttaacaaagagcaggaaatgtcattattattcatagtgacattttatcctcaggatttgataattttactttgaccattttttaatttattacattaatattaaggtatctaataccaacttaccatcattttactttgactattttttaatttattggtattcaacttctatataaatacagtaatatatacatattcaacttttaaaaattatattccttagtttaacaattttccaaccagcgtacagcttatattagtatatatatacaacagtaatcaataaacatcaaacacaaaccacaacaaaaaatctcgagacaaagatacaatg

SEQ ID NO: 2108 - DNA, 3000 bp, Unknown
  misc_feature (1)..( 3000): cDNA_ID_2105496_gDNA_ID_1620489_Annot_ID_158556 3000 nt of promoter + ATG
tatataactatttttttcagcaattgtgcttcttcctcctttttattaatagcgatacaatcttccgtctttgtgcgttacgattcccaaagaaccacaccctcatttcctcagagtctggtctcttacagcgacttctctttttctttcttttttggatttcctctttctgcttccaccatggagaagaacaaacaaagaaaaactcagtgttgtttctttccaaatttgaacactttgtaatctagtgatatcactttatcttactccaatttcaccggttaggtttggtcattaaaaatgatcaaaccaaaaaagaaaatgtataagtaatcaccagttcaccacttggcttaattcatccaaaaataaaatttcaaattggctatatatcaagttaagaaaaataaagctagacgaaaaaggtaggatatatatgcgttattgtattgatttctataactacgagggtagattatgtgttataatattagtaatgatgctaagttttttaaaatggagtagcaaaaaaaaaaaacatgtttattttttctctttcgcgagaggatctaaaaagtctacaaaaaagtgattacaaggcatgggaagctgcagtgaagaaaagtgaagaagtctcttgtttggtccgaaagtgttagtgttatggaaaactctttaatgagtttttcactttatttttctttctcttttgtttttgaggggaagaatattacacatatgaaattgacttcgagggttttcattttcttggattattgcaggtacaaacgtatttccagtatccatgcatagacgcataatgccgtattgtagctacatacacgagaagtagacagtagactcatttaacaaaaaaccaaatagactcaatcaattatatgttttgatgaatattttaacattcaacgattaatatatccactaatgaacattcttttttttccaacatccactgatcaacattttgttcgacgataagcatttttctataaaaaggaattccttagctcaggtttatgagcatgcagggtaattgaatcatcgtgagtggggacagtgaaagaacagttttttttttttttcaagtaaagaacaatttagccaatttcagatgattttttttactagattaaattaatttaacacattttacttagaggcatgtgatcccactcgtcttaaattacagtacaagtcctagtaaaaccgaacatttttgaaatccaaagagtataagaattgggacagaataaaacatatatataaccaaaaacctgtaattagttggaacatcagtcatgttccctgctaggattgggtaaattttgtctgtaattagtaaaaataaatctccgttgccgggactcgaacccgggtctctcgggtgagagccgagtatcctgaccagctagactacaacggatttgtaataaataatattaattagtcaatatgttagtaacaccaaattttttgaaaaaaaaaagaaagaaaagaaaacattaaacaagagaagatataacatccaaatcgtaaaggaaaacaacattcttctcaaaatcggttgtctaaacttggggatttggactaattcatacctggccccgagcccccgacttacctgaggatggtaattgtgggtttggaaccttaaagccctaagttattttattgggtcattggcaaaggtgcagaatccatcttagtgggcttatacgagccaaaaatatgggccgctacaaacatctggttatgttattttagaccaaaaatatatacatataccaaacatgttggatataaaaacttatgagataaatgatttcagagattttagtatgtaattgcctatttggtattcattatgaaatcaaaaaaattaggttatttttgttgaaactagtttatttctaacatccttcagatttctttctagtttaacgtttgataatttacgttgagatttaaatgtaattatcaaattaactaaagatataacctccaatcaagttagattttaaaatttacaagtttagtatattataaacaaaaattcaaaattttaactacatttatatgtataaaatctgtaattgcagaatagacataagagtcttgaaactggtgatatagtgtttgctaataccaaacctaaccaaatcaacatatattctaatctccagattagtgtttggagccgattgcttactaaaattagactattaatcgtatactccctttgttccatgaaatttgatgttttagattttatttttgtttcataaagattgatgttgtaggttaataatattattatttttgttaataaccaatagagagaggagagaaataagacttatattattaaattaacagaaaataatataaataatataaaaattacttttctttgtgtgaaaaacccaaaacatcactcttttaggaacagagggagtataaaataagaatccaaaaacaaaataaacaataattcgatattaggaaaaatgaaaaaaaaagaaaaactaagaaaacaacaattaccaaccgcaagtcaagaatcaagatcaatagcgtgagacggacctaaacacattaaaccaatacataaccggggtcttaaccggacaatctattataatctccttatcttccctaatagaaccgtaattacgaaaaaggacagtcacaaaactccaatctctctctctcctctccgtctctgcgcgcatgatcccccccatagtgttccactacgcaccgcccgtgactctctaatggtctgtgacttgtaatccatctctccttatttttatttcaattttatttctttccaaaattttaattaatttccacacacacacacacctatacatatatatacacacacattcgtctctaatggcttcttcgaaactccatcatcatcctcaccgcagaaaatccccaatacgttgcttctgtctcttaatcataacc

SEQ ID NO: 2109 - DNA, 3000 bp, Unknown
  misc_feature (1)..( 3000): cDNA_ID_2149658_gDNA_ID_1620489_Annot_ID_158560 3000 nt of promoter + ATG
agtttctcgccgggaaagatgatttcgtagcgatgcttgtggatctcattagcgattccagaaacttctctgattctcaattgctactcgttggagaagcggtgaagattctgagcatgattcgtcggaaaatcttcgatcggagacggttatcgaatctgatcttaacgaacggtggtgattgcttgacttccttcttcctattgattaaacgcgggaatccaaaattgaagatcgattgctccgccgtgcttgagtttatcgccgtcgacgcagagtcaaagcttataatcgccaagggagaaggattggtcaccgagattattaaattgataagctcagattccgactcaagcttaatcgaagcgaatttatctttattaatcgcgattgcgtcttcaaaacgcgtgaaactcgcattaatcagagaaaagctagtcacgaaactcacgagtttgttaacagatccaactacgagcgtttcagtgacggaaaaatgcttaaagcttctcgaagctatttcgtcttgtaaagaaggtcgatcggagatttgtgatggtgtgtgcgtggagacggtggtgaataagctgatgaaagtgtcgacggcggcgactgaacacgccgttacggttttgtggagcgtctgttatcttttcaaggaaaagaaggcgcaagatgccgttattagaattaacggcgttacgaagatactgttacttttacagagtaattgctcgcttaccgttaggcatatgctaacggatcttcttaaggtgttcaaggtgaactcaagatcttgcctttcggtatacgaaaccaaaacgacacatattatgccgttttgattatcccccctccgtattaacttctttagggattattacttgttggtaaaaaaaattcaagttgtaaggaaagagattttttggaaggtgaatggaattgttatcacggccaatgccattagaactttgagaataaattgcaatgttctttagtactagtatcattgcaatgttgatactctaaaccagaattttatgtttggacttggcaaaatcgtattaaaagtaaagctatcaatatgctctatcaagggagatgttgtctttgtatctaaaacaaactgaatcttgattgattgagcagtcaaaaacaaaattggatttaaaagattacaagaagtggatttggcatttggaggaacgttaggataaggaaggaggtctttggtgagttgcaatttcttgtcaacatcaaccttagtaccaatttccactttcattacttgaagaaattcactttccgacagaacagcctcacttgttcgacttctctaagattccctctacacccgtataactccaacaccttcaacgtatttccatcaatgctatacccacaagtacttacacactgaaaaccctgaaacaacggatagaaaagaaaagaacacacagtaagtgaaactccgagattaaatttataattgagaaagagaaaaagagatcatattatacatacaaaccttgaggatcaaagtttctagattgggagagctttttatcagagtccaaagaactttccaaccttttttcgtcttagactcaaacgatagtttaacaaggtttttaaacaagggaaattcattactacgccaataatcgaagcaatgacgcatcatctacaacacacaagcaaactggtcatgaatgaaacacaaacaaattggtcaagcatgaatgtaacaagatacatggagaagagagagacatcatactttaacggtagtagaagcaaggtcaagaatgtttttcatattcctcatattcatagggacaaaactcataaggcatagaaagatcgatgcgggcttctcgaagggaatccattgtgatggaccagtaatagtcttatttctttgatttttttggaatactatgacttaaacagtattagtataagcaaaacttacatggcgagcatatatgaatatcttgaagcatccaccgatgcaagacttaagttttcatccttgtgaagaagtgcaacaaccttaataaaggacttagccacaaaattacctagcatacaccccggttcagaaaatatgataagaaagttttgctctcatcgtcaagaatatatcaaacaaccatttcacttgttccaattatgtatattattctttatagtctataccataactatttcattaacgctaacaccgcaatttcttattaattaaaaaccttgaaaaaaatagagaaaactattcatatataaaattataagataaaaatttacaattgaaagatattatatatgtatataaaattatgaaaatcaatatggcgaaaaattcttaaatcggaaacagaaaattatgttaaaccataagacataatttattaaattttgtattttatagattcagatttatgtaatattacattgttggtcaaaccagaacactttggtttagcttgtcaaataaagaacttgagcctccaatgaggcggaccgactgttgggcttggcgttggggtggctcagttgacgaaattgacgtttactgtgtttgtattgagcccaccaacatatattttttttcaattgaaagatatctatttttgtaattacgtttgtatagtatagttaatactgtattaatttttatatcaatccctagtaaattaaataagtaaaatttagttaagaaatttagtaacaattaaaaggctttaatggttgtaaatttattagtatcacttacaatgtttaaaccttttaagacataccagtaattttgaatttgtcaaaggtcaaaaaaacaaaagagccgataaagaagagtctcaaaggaagaatcccaaattacactccaggtgatgcgcacatcagttttcgtgcgcacacgcggcggtgcacattagccccaaccaatcaaaatcatatatcccgttctccggcgactcttcgtcgtgagcttccgtcatg

SEQ ID NO: 2110 - DNA, 3000 bp, Unknown
  misc_feature (1)..( 3000): cDNA_ID_3408986_gDNA_ID_1620489_Annot_ID_158558 3000 nt of promoter + ATG
ctcttgttatctgtccagacaagtttggaaacatatctcgcttcattaatggcattaacaatcacaatccgtaagcaacaaattcaaaattgttttccccccactaaactggtttataacattgaatcatcacatcacactgattgttgcagggttgctaagaagaagcagaactgcaaatgcgtgaggtatagcataaacggcgaatgtcgagttcttctagtggctacacgcgatatatcgaaaggggaaaggctctattatgactacaatggttatgaacatgagtatcctactcatcacttcctctgatctttcaattctaacagttctacagagtctctagatcagatgttctttttgttgccatattacaggtcaattataaatgtagggctgctgaatatatggcctttaattatgaagttagcggtagaataattggatttggaatgacattacagagattaagatgtggcaaatgtcaattgctgaacttttgtttgatatcaaatgaaatcctaacctttttcttatatgttcttggagacaacttcaccaccttaagtggttgccaaataagttataatttcttttatactcttcttcataaatttatcaaaatgaagaactaatccaatacagtcattacctaaacagaaaagtataattacagtacttgcctagtgtcgtacttcttatttccagtcaccgaaatgtattaacgccaaaagagattcatctgttatgcataataatcgcatgctatgaattaaatgaacacatccaaaaaggatgaagtcacaattgtactacagtttcagtattgagaggaaagcttttttcactttgaccactttgattgaatcatatctttgaaattttaagtggtgctttgctacatattcaacggctcaacaagacagagagaaaaatattacgagaggagatagagagtgagagagacgagcaagttgaaggagcaaaacttgtaggtgagagcttgaatcagaacatttcaaaggagagagatggcaagtaaccctgattttctttggtgcaaagaagagaggaagcaggaaagcttcttcaaagttcttaagcgttccgacatgtcttcagaggacacggtaaactatgttctaaactctttatgttgttgaattagcttagtctagaaaggttaaactttcggtttcttaaaggtttgaatcttgtcgttaactgtctttatgggtctagaaaaagcttttgtttttcttttctgaggaacttttttcatggttttgtgcttctcttagttctcagttctctgtctgaatgtgaagatgtgtactttatttcttgtggatgagatctgttctgttcattttcaccgtcttgttgtgtttgtcatttgtgtgttatagctcactgatttcatggttagatttgaaactttgtactcagattcttgatgggatgtgtaaaagctcactgatttttcactgttttatattaatatcagacatgtatcttacttatatcttttcatctttcttttatataaccacagcgagcgattccgtacgactttgtgataaacttctctgacaatgagctctccggagacatgaagttcagagtgcaatggggaaactcttggaaagtaaaaatctccaagaacccgagattctacttcatggagaagtctggatgggagaagttcgtgatagacaatgccttgggagaccacgagtttcttaccttcactcacaaaggacagatgagcttcactgtgaaaatcttcaacaaagatggcaaggagatgatgcaacctccgcaatccagagcctctttcgcttcttctagtaagattttgattctctgattatgaaacagtgaaccggattaaagacattgattcttcatacttttgatgatgaaacaggtcgtgtcaaaacagaacaagatgtcaagagggaggaagaggtgttggtgtcttctgactcgaggtctcgtggcccgacaacagcagctgaaactaatagaggaggcagctacaaaaggaagctcaactttgggaagaagaaagctgaggaaacccaaacttacaagaggactgagaggacccaaaattccaagaggacggagagagtggttagtaaggagagagtttatgcaggcgaaccttcctcttctgttgcaggattcaaaatctttatctcgaaatcatacatcaaatccctggtatgataagagcactaacacacagtttctgatattggcttttgtgtcaaacttgatatgttaatgattgacgaacaaaattggtttggtttttcaggcgatcccgaaaccttttggaaattatatgccgaaggagaaaacaagggtcaagatccatcatccagatggggagaagacatggaaggttgtttttgtggtaaaagagaggggtcaaattttctctggtggatggaaacgtttgtgcaaggagtatcctgttgtttttggggacacttgcaaattcaccctcatcacaccactcgagctgcttctagttgtctcaaagccataagagagaataactcactgatgaatgatgctgatggatgtgaaggtgccttggataacaagcaactgaagtaaactacttttatgtttaatggtgttagtttggttatgtgaactttcctactcgtctgtagctttcatatgtttgggaccaatttttatttgtttcgtgtttccgtgagacattaatttgctttctcttagttatattcagcaaccaaaatctgttggaactttttttgaggcagattccaaattttagtttagaacagaattagtcaaaaaccggtttgtaggatatatgggcccttttgtccaaaaaaaagagaggatatatatgggcccaaagcccaaacccagtaggcgcttcacagagttacagtctctcctcctcctttagggttcttctctctgttcagagatcacttctccgacgcagaaatg

SEQ ID NO: 2111 - DNA, 3000 bp, Unknown
  misc_feature (1)..( 3000): cDNA_ID_3065965_gDNA_ID_1620489_Annot_ID_158552 3000 nt of promoter + ATG
tttagtgaatgggttttgtgaagagagaaggagataattaaagggattgtaaattgagaagtcagaataagagcacacaagtggtgacatcttttgtgaatcaaagagaaactcatgttcatataaagtaattcacattcttatagctagtggttattagtttattactttggtgaaagccactttctcgatataccctaaattcaagtctcaatgtgggagagggaaaccctagccaactcaaaactatctcattagtcaactggagctgctcattaaaaaaaaaaaaaaaaaagcgattatgccaactatatgtatacaaaagtgctacaacgtttataaacattttcggagcataaaaaaacttcttattcaactatatacaatttaatctttttctttggtaacgactagtgacgtccacttattgaaaagatacatataaataaaattattctttattttttctccgaaccaaaatccttaattgcatcaccaacctaacccctcatcatatgatcacctttctttttttcctttaatatatatatatgctcacacacacacatatatatatacatataagcatcgcctcaagcattaaaatttttacgaaccaaacaaacaaaaattatgaataattataatatgaacccatctctcttccaaaattacacttggaacaacatcatcaacagcagcaacaacaacaacaagaatgatgatcatcatcatcaacataataatgatccaatcggtatggccatggaccagtacacacagctccatatcttcaatcctttctcttcttctcatttccctcctctctcttcttccctcacaaccaccactcttctctccggagatcaagaagacgacgaagacgaagaagaacctctagaggaactcggtgctatgaaggaaatgatgtacaagatcgcagccatgcaatcggttgacatcgacccagcaaccgtcaagaaacccaaacgccgtaacgtgaggatctccgacgaccctcagagtgtggcggctagacatcgccgtgagagaatcagtgagaggatcagaattcttcagagactcgtgccaggtggcactaaaatggatacggcttcaatgctcgatgaagctatacgctatgtcaagttcttgaaacggcagatccggctactcaataataataccggatatactcctccgccgccgcaagatcaagcttctcaggcggtgacgacgtcatgggtttcaccgccaccaccgccaagtttcggccgtgggggaagaggagtaggagaattaatctagacaagatgacatttccattagtagtaactaaattatgctataatgtgtgagtaatggtgcaattatggaaagtgtttatatataataaaaatggatacgaaataagggtttgttaggatatataatatattgttgttgaccgtgaaaaggttgtggaataatcataacggttagcttgagttgtgtaccaccatatatttaatattatgttatcatttcgtatataataataagttcttgatttggagtttggttgtatacaagttttggccgggcatttttcgggcataagaaccatgacgccatcaaagaaccctatttaaatagtgttatcattactgtggacttttgtctttgtatacacacaacgcatatatttgtgaagtactatattttagagcatataatatgaatgtactctattgcttcattttcatctttttacgtacatacctcactttgaacgttaatacctatacatattgaaaatcgttttgttatgattagaataagctttaagaattcctaaattacaataagctttagggctttttttttaatatatagcttcacaactagcaacgaaaaatccaaaaagaaaaaagttgttatgaaaataatatccgtacgtttagtctattagattatacttgttagtatccgattaaacatcacctgaaaactaaaaagtctaacagactaaacgtatccgattatacttgttgtaaaaatgttaacgaaaaatgtttagctatagtaacgtttagcataatgaaaattacgacaatcatcccataaaatgatgttttgtaatataaagtaatctcaaattacaacaaaccgataaggtatacagatactctactccagaaagagagtatatatcgagacatattataaagaggatggtgcagagaaaatgtacttgctcgttttgtcttcgaattaatgaatagaagttcaactaaaacagttgcaagatctctttttaccttcccaataataaaaagaaaacctttgactacaaacaagcattaaaccaccagagctttgctccacacttgttggtcagaaaatctcagaaaagtagcagagaggttaattcaaggaaacctatgctccttgttcacttcactcatggatacttccgctgacttttgtgtctcctcacattcataggttttaataaagacacaatgaaatgtcagtgagattcatggaaacctagctatatccattttgctaacgaaatcatttaatatattttctttctttttgccacatagttatacattcattcacatcctagagataattgcaagaacttaacgtctaaccaaattatttagctcaaacaatgcattaatagtcactaaatagccatgggtatgattcatatattttcaaatctaattcgttttactacagaaatatttcaatgtgattcgagataattcttacatgatcaaacaactttctaattttatgaataaactgtgatcccggtgaaaatgtatgtacttcacaccattaaatatcaatatttttaacggcccataaatataggcccaattatgtgaaaagttactaatgggcctgatttatttcaagtgtccgtttttctctctctagttctcttactcgtatgagaaagaaagcccacccgggaatctccgacccgaccgagaaatg

SEQ ID NO: 2112 - DNA, 3000 bp, Unknown
  misc_feature (1)..( 3000): cDNA_ID_3065977_gDNA_ID_1620489_Annot_ID_158548 3000 nt of promoter + ATG
atataatatttcaacgaatcgtactctcattcatgtaaaaccgatctcaagtgtcaaattcgccgaaaatccagaaaacatttaatgcatttctcgtcaatgaacagtgtacatacaaacccggttctcttggattccaacgatgtgatccgtacgtacaaaccgggttcagtttcgtcaagggcattttggtcagtttttggctgaatggctaagaaatgaaaggccagcccacaatgtcaaaatctgaaattaaaagtggatcaacggctactgtgctcaatttaccctaaaaagaaaggaatatattattttggtaccaaatcgcgtcctgggcgattggtttccacaaaccacgtccaaaatgcgattgactaacttacccttttaacagttttttaaaagtttcgtagttaagtcttctggttttcttcttcacggtcacgcctcacgagtcatgattgtcgccgtcgtctctttgataaaggcaaaaatcgaggaaccctaataaaaaaatggagcgcactacgagaacgtcgtcgagggagacagagaggggagaaataaaatgagttagcaatttaaaatgtaacgaaaaaaatggtggttcaagctgggtacgagccagcggatcatagtggatttgtgtgacgacgaaccgtggtccatccactgctgagagcgggaggtagtcgctgctctgtgaagccagcctaacgcaataccctcaacctttagcaaccgtacggaccaaaccttcgcttggttcatacggttcactcacagcttggattgggcagtccagacctacgggtttgttttaggtacattgtttcggattgcgattcattaggtattttgtatggttcacaacactataccaagactccagaggaagcggcagctaaatctatactggcaggtttggatctaaattgtggttctttcttgggtaaccacacagagaatgcggtcaagaaggggctgatcgacgaagcagctattaacaaagcaatttcaaacaattttgcgactctgatgcgcttaggattctttgacggtaacccgaagaatcagccatatggtggtttgggtcccaaggacgtgtgcacggttgaaaaccgagaactagccgtagaaaccgcaaggcaaggcattgtcttgctcaagaactcagctggttcgctaccgctctctccttccgccatcaagacgttggccgtaatcggaccaaatgctaatgtcacaaaaactatgataggaaattacgaaggtaaattcataacttatatcaaattaattttaaactcaaacctcgaacgtggatcaaatataattgttatgttttcaggcgtggcttgcaagtatacaacaccgcttcaaggacttgagaggacggtgttgaccacaaagtatcatcgtggctgtttcaacgtgacttgcaccgaggcggatttagactcagccaagactctagcggcatctgcagatgcgacggtgttagtaatgggagccgatcaaaccattgagaaggaaacattagatcgcatagacttgaatcttcccggaaaacaacaagagcttgtgactcaagtggctaaggccgcgagaggaccggtggtgctagtcataatgtccggtggaggatttgacattacattcgccaagaacgatgagaagattacaagcattatgtgggtcggatatcctggagaagccggcggtatcgccattgctgacgtcatcttcggtcgtcataatccgagtaagactctgttctccgatttgaaccagtgatttatcgaccggtttggttttaagattgtcattttcataaccggcgatttttttattggttaggcgggaaattaccgatgacgtggtatcctcagtcatacgtggagaaagttccgatgacgaatatgaacatgagacccgacaaatcaaacgggtatctgggtcggacttacagattttacatcggagaaaccgtttacgccttcggagatgggctcagttacactaatttcagtcaccagcttattaaagctccgaagttcgtctctctcaatcttgacgagagccaatcctgtcgatcgccggagtgtcaatctttggacgcgatcggaccacactgcgagaaagccgtcggtgaaagatcggattttgaggttcaattgaaggtaaggaatgtcggagacagagaggggactgagacagtgtttctgttcacgacgccgccggaggtacacggatcgccgaggaagcaacttctagggttcgagaagattcgtttaggaaagaaggaagagacggtggttaggtttaaggtcgatgtgtgtaaggatctgggtgtagttgatgagatcggaaagaggaaactcgctttgggtcatcatcttctccatgtgggtagcttgaaacattccttcaacattagcgtgtaatagggacttattcggtgaatttatttttaatggtcaaatttgaaaagactaaaagtttgagggcttaaaaacgaaaagaatatgttattttggtaccaaatcgcgtctgggcgattggtttccatttcaaaatgaaattgactacattacccttttgacaatttttttaaaactttcaaaaattagtcttttggttttcttcttctcagtcacgcctcacgagtcgtgattgtcgccgtcgacggtctctttgtcgccgtcgtctctttgataaaggcaaatatcaaggaaccctcataaaaaaatggtacttgtcttgtctctgtcgtcagattttaaattaataaacaaattttaaaaagagaacgacgaccttcgaggaatttaataatgaaaaaaaaggagcagatactacgaaaactcactttttctgattccaactgggttttaatttcttactttaggggaaaaagtttcgatctttcttctcttcaattgggtgctttttttttgttggtaggcattgggtttaagcagtgaagaatcggagatg

SEQ ID NO: 2113 - DNA, 3000 bp, Unknown
  misc_feature (1)..( 3000): cDNA_ID_2149611_gDNA_ID_1620489_Annot_ID_158545 3000 nt of promoter + ATG
attatcgtcctcttctttgctcaatccatgaaaaataatatcttcgagttggttcggatggatgttgagtagagaaatggagaggactgttttatcacggtggtggttttgggaagtgctaacgtgacacgatagtgtttgtggtttttggcgtgaactcattggttatattacacgtggaagtaaagtattggttggatgtgacagcattagggtgacgggggtgtgaggttagctgaaagtcatgaactagatggacttttgcggcagtttggtggggaccagttagtgttttaaaagcgtgtttaattaaacattattgatactatgtgagacaaggccatggttttgactaatgactattaattaatcaattaccactgcaatcatataatgtctgaagaatatatccattttttctgaaagataccaaatattggagaattcacgtgaatctttgcttcaactccaagagagagatactaagtgatagtataacaactaaatgcaacatattagagaacaagatcaaatcaagatctagtaaacaagagtttttaaatgatgaaagaacaaatgaaatgctttgttcacatcgatttattgaggtgaaacaatcaaattaactaaattaccaaatccttcaaaagtataattgcctgcatgctgaagctaaagtctctgcaggacaataagggcatttgaatgtgcggaaagcgcagttcttgctgagtctcatcattgactgcttgctaataacatgaccacaaggcaactgcatcggcgggttttcttcgctgctttgatctctactcacgggacaaacaaaagccgagtggaacttatactcattccctaactccagaggaaccggaagctgtttcattgcttgccattcttgtttcgtcaatgccattagatgaaccagctttaacagtgacggtaagctctcataacccgcggataaagcgactttcaacggggagttaattggctgatcgagaagatggtgatattccatgattagctctttggttaccttgtcccaacatgatggagaaactatctctgcataaggacttttctcaaagtttccaatccataataaacaagtgataagcttttgtatctccttaaaatggagtggatattgcgtaaaatgggttcttgcatactccaaagcatcatcactctttccttctcttaatatatcacagtacttcaaacttaagagcttaaactccagctttgaactcttttgcttcagctttccgcggttcgcaaagatccatctcattgcaggctcaatgtttctgagcttcaatgagtccactatctggtggaactctaagaactgagatctaacctcagtttcttcctctcttccagcctccttaaccagacaatcaccaacgtcgaacaacccttctcggtaacaatggtggataagtatcttattcactaagttgatatcgaaatcaacgctaaagcaggctagagatatatcaggatggtaagaaacctcaagcaatttcaccaacttactaagactccatttagtttccttatgtgatttctgaagctggataatcggtaaaagagcatcaagcttgcgtctcaactcggtaagaaccgattccggttctactccatcgtcgttacctaattggattcgagtcaatgtatcttggattccatcacaaactagatcaatgacatcttgagtaactgagtgatacagcttctgttttttagaaactcgatcaaatgcatctctcacagtcacagtgccagtcacatccatatttgttctgactaataagcttaaagtgtactaccaattagtccccaaaacgcatcaacaactgcaacaagatgatggaaaatagttgatcaaacatctaaattttgcattttttaagaaacaactttcctaggaatttgccctaatattaagtagatcacaaaatcccaaaattcacagaactaaacttaattttgcaccaaatcttaattttgcaccaaaattggaaaagtgagactctttaagcctaaagttttatcctttgatcaatagaaaccgaaatcaattgggattaagatagaagaaagggaaaggtgagcagtagtaccggaaacgcgactgagaatttctgattgtgccgtcagaatttttcacagagacgaaccaaaagccattaaatgatgatatatagagggagatgatgattggcaaagatgatccaagccgaatcactgagtatctaaatcgttaagattggtttctggaaacaaggaacaactattttattttcaacgcccagcaaaattatctagctaggaaaaaaaaaacagatatttttcccaaattctacgattaaaatctatctatttaacgaaaattaccaaaaaaaaacttataaattacagcatattcttcgcataacagttattttaatttttgtgagtaattatatttatctttattttcttttaaaaatatattaaaatgtttcatattaacttattgatttgataaccttaaattcccaattcgagagctgatagaatgaaaatcaaagctatttgtcgttttccggttgcaaaaagtcaaaaaggaacatgaagctaactaaaattagattagcaacagtatttaagtttaaggtacaaattgattaagctgacaaatcaactgagttacgttgactttcccactggtgcatctgatacttggtttggtagtggagtccttgacttcttctattgaaccggttggtctggtacggttaacaacacgatgtaaatgcctcaacacgcttataaggtagacgatagccacgttctgatcactgcgtagctaacgtgtctttacgtaatttgctttttttggttttattctcgtaattaattacttgctttcttctttcttattgagtttaaggttcttcgttgacatactattctctgttgtagcaacactaagaagaagcagagaaa

SEQ ID NO: 2114 - DNA, 3000 bp, Unknown
  misc_feature (1)..( 3000): cDNA_ID_3065981_gDNA_ID_1620489_Annot_ID_158547 3000 nt of promoter + ATG
cagatcttgttttttggggtctcttctcgccagcattttcgttactaagtgatgggattgcataatttgtactgtgtgactacatttttttttctggttaacagtaaattgtaacttcttgataccaacccaaattaaggagccgagatagataaccgaacaaaaccaaaaaatacgaagacctttacacaaaaccgggaccaaattacaagttcggattgaatatctctgacctgaaccgaaccaaaattgtatcggatatccaacaaccccaaaacaaaaccgaattagaccgattcgaatttggtattttgattgcagcctccagagaagaacatgattattctcataagaatccttgacggccaattagatctctccctctttcgtcgctctttgttttctccactggtctttgtttctcctttgattctctgtctggagcagtctcagatccaccaggtatctatccaattttcttctagtacatctgatttcccttgttattgtttgcttgatatggattcatgaatcagaattgcaaatctgtttttgttagattaaagtttccgaatttaagaaattcccacccaataatccctattatcgtcacctttagactttgcttttgcctccaactttcgtttgtttagatcttcgtcttcttcttcccgtgagtgctttacatagactttaggttttgtttctaactgatacgaattgttatgcaaactgcgtgcagattaagctcaagatggatactagtagagatgatgatttcacattctcaaaggttggttagtttccactcatttcttcatgatttcaatgtttatgaaacgtgaaagttctagacttttatgattgattcttggtttgttttcaattttgaaggtttcaccaccagatagtgaagttaaagatcttgcatcagatgtaggtagtattacccttaaagatgggttagatcaacaaaaaagcaatggtcttatttggaaagacaagtctcttcctccaaaggaagaaacaataggttctttgtctttcacggtgactgattcttcgtcttcgaaaaagcaatccaatgaatcctctgagactttcaaaactccagctagaaagcctatcactcgtaccaaggttccatttgaaaagggttatagccaaatggattggttgaaacttacacgaacacatcccgatcttgcaggtaagcaaagctttcttttcttagtcctctttttcctaaatacattttgatgtgttggttaatgaaagagacaatttgtttatgcaggcctgaagggagagtcaaacaagaggcttattccaatggatgaagtaaagaaacaccgaacaggagattcgatgtggactgttttgaaaggtcgtgtatacaacatatcgccttatatgaattttcatcctggaggtgtcgatatgctgatgaaagcggttggaagagacggtacgctcttattcaacaaataccatgcctgggtcaatgttgatatcttacttgagaaatgccttgttggagttttggatgataccaaagtgaagaagcaagaaccctaattgctattgctaaaagagttcactcttgtagagaattcatacataagtcaataagaattttttaatgtttacattctgattcttcaaatgtaaactctgattacaatatgtactgtattagaaatttataatttttggtgtcaatatattcaaagtttccatatcagtggcatcatgttctcttttcttttacaatatttcagaatggcaaattatagatgagtaaatagaatctacacaaatttcggaatggattatagggtaaaccagaacaaagttgatgtcttaaaaacaaattccattacaagttttgttttagcaaactatcaaatccccaatcagaagtgagggctaaaagaccgagggtagtttaggtatttcacattgtagacaaaacctgactcctcgacgcttataataattccactatcatatttgccaatttgccaataatctttttgtcttctatcttcgacacctgtttctgaaatcttcttcttgtcttctccttggaattctatctgtgagcccgagtttcagatccaccaggtatttgaattctcttcttcatccttcattctcttactcaccttatacatctaaattttcttctggatttttatcattaattttgcttaatctgagttcatgacttactaataataatgcatgactgtttctatctttagactttgtttggtctatgaaatcattgttatgtagattatgctgagagtattataattacatgataaatcttgttttttagatcttcttcttctccaaagtgctttaggttcttttttgtttattggtttgtccataagttttctgatactaggatgagataaccttttgtggtgttttctgaccctgctttcaatagtcaatcttccaagtcaaacttctgaaaacaaatattttctcagattttaggatcttgtgaacttgtgtttggatcttcaatcattctaatgacaactgtatcacagaggaaaaaatcttgactttggaccttgtaaattttgattatatcatttgattaccattccccaattctgttctatcatgaattatatttgagtaaagatgtctcaagcagagtacttagctacttagcttccaatcttgtgctactacttcaaatgcctttgattgttctttgcttcggtcagccttatgctcctttcagttttttttttttttgattgtacaatgttctttgctcttcatgcttcttgttaactctcaagttgcatcctttctggatttattttcaggtcatgtggacagttctcaacagtagcatacttcaacaaagatcattgcttttcagcggaacctgataatctccaacaaacattcttcggtttacagtattaacaccagcaggatagtgctgttttcccattcttgaagatg

SEQ ID NO: 2115 - DNA, 3000 bp, Unknown
  misc_feature (1)..( 3000): cDNA_ID_3065985_gDNA_ID_1620489_Annot_ID_158546 3000 nt of promoter + ATG
aactgaaagccatttatggtaaaagtgtcacattctcagcaaaaacctgtgtaaagctgtaaaatgtgtgggaatctccgaatctgtttgtagccggttacgttatgctggatcaaaaactcaagatttgttggatattgttatgctggatcggtggtgaaaccacttcccggttgctaaataaataaacgtttttgttttataatctttttcactaaacggcagtatgggcctttagtgggcttcctttaagcgaccaatacaatcgtcgcaccggaatctactaccatttataggtttattcatgtaaaacctcggaaaatttgagagccacaacggtcaagagacaaaaacaacttgaagataaagggataaggaaggcttcctacatgatggacaacatttctttccacacaaattctcataataaaaatcttataatacaaatacttacgtcataatcattcaatctagtccccatgttttaaggtcctgtttcttgtctgatacaaattaaaactcttaaacagcttcctaacgagaggaaactgaggaacacaacaatggagtttcgtggagatgccaaccagaggattgctaggatttcagctcatctcactcctcaggttttctttacctttgctgttaactcaagttatctttttttatattcttaaattcgatggttgttctactaaaaccagaatagtttgtattcactctcaaacaaaactgatttgtctagactcatcaacgttctgaatatttatagttcaaccatgaacttgacattcgcttctacaagtgtatatttccatttcttgaaattagtaactgaagatttctgatgccattagagagaccaatctgtttatgactccgttgaagtcatctaggactgatagtgaaatttcttcttcttattcatgattgatcaaccattagatggaggccaagaactctgtaatcggacgggaaaactgcagagctaaaggtggtaatccaggattcaaagtagcaattcttggagctgcaggtggaattggacaatctttatctttgctgatgaagatgaaccctcttgtctctttacttcatctctacgatgttgtcaatgctcctggcgtcactgctgacgtcagtcatatggacactggagctgttgtaagtatctctcttaaactttgaaaacttcacataagattacttcttcttgctaatgaatgagtaatgaccactcttgattgattaggtccgcgggttcttgggagcgaagcagcttgaggacgcgctaacgggtatggatcttgtgatcataccagccggtataccgaggaaaccagggatgacccgcgatgatctgtttaaaatcaatgctgggattgttaaaacactatgtgaaggtgtagcaaaatgttgtcctaatgctattgtcaacttgatcagcaaccctgtgaactctactgtccccattgccgctgaggttttcaagaaagctggaacttatgatcctaagaagctccttggagttactacactcgatgttgctcgtgccaacacatttgtggtaataatgcctaatgattcctcactccatttggttttgttgagttttaaacactaagaatttatctttttaaattcttgtgcaggcagaagttcttggccttgatccaagagaagtcgatgtgccagtagttgggggacacgccggagtcacaatcttgccactactgtcacaggtatcatatgaataggacgaaaggttcatttccattacattagcttctctgctaactgattgtttttgcataatcctttttcctcaggttaaacctcctagcagcttcacacctcaagaaattgagtacctgacaaaccggattcaaaatggtggaactgaagttgtggaggcaaaagctggagctggttctgcaacactttcaatggtaaaaccaaaccaaatcactttaatacatcatcattacacctgtttatttctctggaacagtgtactgaatccatgtgaaatgtactactactataggcatatgctgcagccaagtttgcagatgcttgccttcgcgggttaagaggagatgcgaatgtcgtagaatgctcttttgttgcttcacaggtgaatcttgaaaactctttcactctctttcattgtttcaacggttttaacttgaaatggcaattgaccacaggtgacagaattagctttctttgcaacaaaagtgcgccttggccgtacaggagcagaggaagtgtatcagcttggacccttaaacgaatacgaaaggtcagaaaaaacataactcatctctttcaaaatacttatctcagagagatagaaagagagttctcaagcttaatttccttattcttatgtaggattggtctggagaaagcaaaagatgaattagccggaagtattcagaaaggtgttgaattcatcagaaaatgaaactgagagataatcagagagatacaataagttatttcctcaactatatgatcatgtactcatcatcacatcatgcctatgtctcctctgcttctgatacaactttgtataaatccttatcagtttgtgtacgatatatgtgaccttttcaacgtacttctctattgttttcgattatccaaaaccaatctttaggacccaaaacagagttcatcttcacaaattaaaaaacgaaaaataaatttggcttcgcccgggttcgaaccggagaccttcagtgtgttagactgacgtgataaccaactacaccacgaaacctttgtgcactctagtccaaatttgaactatttatctattattactaaaggttggtaatacctactcaacagaaccccacgtgatctataacataaaataaatctttgtttttgtttttgtgttctgtctttcttggtggtgtgataaagaataaagagagccagtcgagggtaaaacgaaaggccaccattttcaatctttccacaataatg

SEQ ID NO: 2116 - DNA, 3000 bp, Unknown
  misc_feature (1)..( 3000): cDNA_ID_1378727_gDNA_ID_1620490_Annot_ID_158578 3000 nt of promoter + ATG
acccagaaccttgaacgtgtatgcgtgtggaaacctcaacacatgcacaaacatgcacacacctaaattgcgtttaacattacgatttaaatgtgattttctcaattcgaatccaatttatgtataccaccaaattattacgtaacaatccgaattctaattcttgaatgactaacacagatgaatgaaaaaaaaataaaaaaaatagatgaatgaaatccatattccgtagtggagcaataatgtttataaatatatcattttctaatctcttcagcttaattagcttagagctgtaatacccacctacaatcatatattcatataaatttatgttaaagttatatttattctttaaatttcacatataagtatattattaagtgatttgattgtgaattatcatcacatttggttgccatgaataagatcgtgacgaaagaacaacaaaagaaattgtgtcttcatctggaaataagtaaacaaagacaaaaatatctctgtcgtcttttatcatcagtgtgttattgtgctaaaaaaaagttatctttgattcgaatatgatagagacccaaaggagtatataattataaatcatttttattcctatatatagtccgaatctatcttatgttcactaatatttgattaatttaaaccacgaaatcaatgtatttctttcacaaattaatgaggtagaacggatgcatttgcatttatattcagtaggaaccttatttcgaaaagcgcaaagaatttaatataatgaattaactcactttcaattggttataaaataaaaatttagtacttttttcttttcttttttttgccaatttcttatctccatacgttcttaatcagaaataattaaatattattagtcagaacctacaacggatcacaaaattgttatacttatatcaaaaagatttgaatgatatatcacttctcacttctgaaacgcaattcgatgaagtgatactattcataaaatttcatgttaaatgataaaagttaaaacgatttttcaatttttcgcacattttaaaattacatctaaaattattaactttttcaataatattttattgtttatttgagagtggaaagtaaaatgaggaagtggcagaggaacagagccatgtaggagccacacgaacatgtgctttgtggtaacagtcagctactacatgttgcagccgtaccaccataatatattagttaatggattaactcttttaataatcctctcttattgcttagtaagttagtttacaaaagcaaacgatctttttaaagtctaataatcccaaaataaaagaaaaacaaatattgacaaaatcctaacctaatcaacatcagtctcttgttttaatgttaatttcaacttggcagttcttatctatcccaatctcatatggtttattatcattttttttttttgtctttttatcactatggtgtattgtatctagattgaattagattcttgaaatgatgtaattgtaagaatatctaacgtcaagaactttgggattaaatttaaatttataggaaagaatggacttaagtaaggagataatatttgcagctatatatttgacaatggatcatgtcatcatacatttttttgtcaactcttaaaatcttaattcaagaaatgtttttttttttcttttgttttaatctgtttttgtcaatattaaaaccctattttgtacaccagggtcattttcattgagtaaaattcttaaaaacttcaaaagtttatgttgttggcaaaggaaatacgtaagcgtgtaatatgtacagttggaatagtgtttttgctaaaaagaaaagaaccatatgattgaaacaatggaatatataaaaagacatgtgataaaataaaatacaaaaatagtcaagaacagtttaatggattttccttgcaagtcgtcatgctcatgaacctgttttaattgcatgcttacatataaaaataattaactcaaaactcaaataagatcaaacaaaatatcaaacttttgatacaaatttaactgtcttatatccttgacaaaaaaaaaaaaaaaaaaaaatttaactgtcttatatcttggttcttaatcccttgtgaataaccataattagttgctagaaacaccttgcaaatttcataatcaaagtgattcctaatttatgtgcgaacagaatattaatagttgtaagcaatgcaaaaacaataccaaaacgattattcttgatgaaaagatggaaaaaagctaagcacaactaatgttcaaatttctaaaattagttaggcagtaatctggcatttaaacatggtgtaatacctagtaagccaatcagagattaattggaattttgtttttcccgtattctcgtttttattgtaattttaccacttctagccatttataaatattcaaaattaaaaaaaaaaaatatcttgtaggactttattttttttggagttttaaagttcactgataatttaaccaatttagccaaaattaaaatatttgaatgttttgataaatttttaacatttcgttttccaaacatgtaaatttgaaatcgatacatttacaagattagcacaaaccattatgctaaagttttagtcggtgcaacatatataaatatgaaaaaataaactattgaatatatacacaacaaaagacaatttctctattattatgttgagaaaaaaatctttttagattaaataatagtaatggctttatgggctttttactctatcgtgtccacagtacccccaactaaacaaaaagaaattgttaaagagctctctctctctctctttcataaaaaggcaagaggagagccaagtaccaaactttttccttcagggttttcctctcaaaatcccaacttggcctctgtttttgctttcttttatgttctcttcttctctaaaaaccatctcatacttccaagaatttctctcacaaagaccaagaactcaaa

SEQ ID NO: 2117 - DNA, 3000 bp, Unknown
  misc_feature (1)..( 3000): cDNA_ID_3066015_gDNA_ID_1620490_Annot_ID_158580 3000 nt of promoter + ATG
agctgattacttacttgcactccggtatttccagattcagagtttgtattgagcgtcgtcacaaaaaactcccgcagcgaggaaggatcattcccctagatatatatttagaagaaaatttaacgaaaatcaacatacaattcataacatcaaactatgtagcctaagtaataatacctttgccaggaaagacttcaatttcgcaaagattaatggatccatcaattcttgaagtaccatttttgccatcatgaatccaacacatctttgatcatgaaaaagaaatttaaaattaagccgagtaatgtcaacaaacagatattataattacgatctcttctcaaaatacctcatgtcaaatgctatcatcatttgtcgtctgtccatggtactgtaagcgttgctagtacttggaacatccccgttaaagtcagcagcatttccgagaatccctacctatagtcggaaatgaactctgattttaattgacaaaactgaaacatgaataataaaacttcactactcaaagtctaaactaactttgatatgtctatccacagggctaatatgcacattttccaatctcagttctgtgtgagccagaccatggctgtgcaagtaattgaccttcaagtttgaacaaacaccaaaaaacatgttaagaagatcacaacgaaaagtaagaaatatgctgcttgttcgaaggaccaaattacatactccgatcaaaatatccctcattagtgtacggattagtcttaactgccttgaaactgcaggccctccagtagtatcatcacccacccttcgaaaggattcttcatctaatgcaagagtagcttctaatgttggaatccaatcagattgttgaagccagtgcctaatcgagaaacttccatggcactacaagaagagataaaaattaatgaatggtagaaaaatatgatgaaacagtctatatgcaccattttgaggcacttaccccatgtacaagggtaaatgagtactgatcatcgcttaagttattggtgatataaccgtgaacttgcattgagtaagaatggtagagaagtctccgacgaactagcttcttaaaaacctgcaagtagtaaaaaccccggtcaacattctgaagagattacaataagtaacataatagattaaaagggaggacgaacttctatagctcttcttcctcgtctttgagctcgagtggtattcaatttccgaagaacaactccttggttaaacaaagggctgtgaaattgaagcaccacagatgaagcctctgaaattcatcttgaaatcttgtaatacatatgaagtagaaactgacctatctggaacctgaactatagcttcaaacacaagctcatcagcctgtaagaaagtaaaagtcaatgagaagctaatccaaaaaaaagatagaaaacatttgacaatcatcaaatttggtaataccctgccgccatgaccaatgctaacacgatcaagaatcctaaaatcagaccacttgaactgcatcacatgtgctgattcatcctctaatgataccgaaggattatcatctatctcctccacattagatggtgactgtcttaaggacgatgaacaatgaaatatcacagatttagcacgaaatgatgaacttctgagctgccatagactatggtttcgtttataaccaatgctcgagttcctaacagaacgaaacacttgtaaattcggcagatttggagtcgaacaaacaccacaaagtgccatccaacaaaaaccctctacatacaaattcaaaagtaatcaacttttatatcaaatcactcacaaacaaagcaaacacagctacttcacattactattaaaggaaactcaattcaccaacactgatcttccaaataatccagaaagtcataatctttatctaattttaacacaagagaatcgaagagagactacgtgaacaacttaatgccgtaaatagacaatcatttcatcaatcattacaacactcgaatcaaaagcttaccaatcaaacagatagagagataaagagagatcttgagacgaaagaagcaacttcacattcaaaagtttgattctttcccaaatcagaagaaaaactgaaagtcgtatataacgacagagaggctcgtgatagttgcgtgatgaagtacgcctgaggcatcgcgcctcgaggtcgacccacgtcaacctctgcctctcaaatatctcatcccaactctcattgggccttattgggccactacctacgtaatggtccttttatgggcttcatctgtctccagttttgagttacgtgacgtaataaaccgaagcactgctttactaaaccggacgaaagcgataacgttaggggatcagggcataaaccgtaataatacccacgatcactggttaatatggtcattagctaataaaaactctcattgggcattactaggccaataacttcttaatgggcctttattgggctccagctgtttccagtttttgagtcgcggcgtgacgtggcacgacgctagcgagaaataaccgaaccactactttcccaaaaaccggacgaaagcaaaatccgatctgataacgtgcgtggcaaaaaactgtaataaaacccacgattaaaggataagatagtcattaaacaaataatcccttagtcttcctcttgtctgaaaaaaaacagtttctcgttttcttcaacattgaaagggcattaagcctcctctctctctctctctatcttctctatatctcccgctccgtggttcttttgtaattttctccaattaaatctcgccgccggctttcaaatcgccggcgatctagattcttccgccgccgtgagagtctttttttaatctttaagtccgctgtaagattcaatcaaaccaaagtccctaaaaacctcaatctcgatttagggtttgaaaattcgatatttttggggggttttgcgattgttagagattgtggaagatg

SEQ ID NO: 2118 - DNA, 3000 bp, Unknown
  misc_feature (1)..( 3000): cDNA_ID_4359917_gDNA_ID_1620490_Annot_ID_158584 3000 nt of promoter + ATG
atttatgttattttccgttaatgttgtccatgttaaacataacacctttaattttattttgtccttaaacgtgacatttatattgatggaatctctatacttttaagaggaaaaaaataaaaaaaattggaaaagagaatggggatgagtaaattgaaaatgatgtcataaataaagtttgtcgtgtcgatagatgaggtggacagattcataggaatggtcacatttatgatgaagtcgacatattggtttcgtagttaggccacctgctcttctcttcataactcttaagttgcttaaacctatttggtctttatcgtcaaccgcttgtcggagaatgtgttaatttttattagctccgaccgcatcaagttagttaaccatgttagttatgtttgtatgatcgacaatgtgtattttgtttttttaatagtgtgggaagcatctttatatatgtcttgcatatctcttttcgaactaatccctttaacaattttataacttttgatacaaatgacataaaaaaaacattcatcaactacttatggatattaactagtcactttatacatagtgttagcttcaccatttgttctacctacctaacatttaaattacatgtggttggtggcagaattgatatattgcttcattttttttttgtaaaaaatatatttcataattcctttactataaactatacactgttgcatgtaacaaaatatttatacattattcaattgtatgcgtatatttttgaaagaggtataatttaatagagaaacactaaacatatatagtcgtcaactttttggatgcatagttcgattcgtttatcagtgttgtgtgttgttacatatttattcgtttttggtcctcctagacatagaatgacactgataagaagtcattaaaattatataatattaataactattcaaaggtattttgttgttgtcaaaaacaaaaacatttgaaagatttcttaccaaaaaatatgttaattcttgaaagggtcaacattttgttttcctcactcctattaaatccaagttcaaaccaaattatatttaagtatttaactaatgtcgtaagattactatttgtttttttttaatgagtaattacggttggccgccgcatatggaaattagaaaacaaacttggtgcagttcaattcaacaaatgattcatcatcaatggcgtcacgttacgtgtccactgtccaatgattcaatttccattactaatttttaacacatataaccaaagcttgactatgaaacgtatcaaattagtaaaccaatctccgactaattaactactttatataattatagtttaacccccaaaactaatcagatattaagactaaccccatctattaattttgacagctgtcttaacagcggatttgtggaggctcgtagaggttttttttttttttttgtattaaatttaaagtagccatcaaagattgttttcatctatggtggtacacactttaagtagttttcttgtgtcacatattacacgtaacaatcaactaccaaaccccacatatataaaaatctaaaatttatccacttataatttttatttatttttaattattattttagttgaatgcatttaaaaattttctttttatgaaaccgttggttttttaatattaattttttttacagatattcgagatggacgaagattatctgactaaaatattaaggctttgagattattgggtaaactaaatttattgcttataaccaataagatgaattagttacacgttattaacttgaatttttctaatcacaaattggaagtttgctacttacttagcttagtagtttaatcaattcaaaggtaataatagagtctaatggtaacaatagattttatatttgaacatgaagattctaaaaactgacaaaatattttcattttcttaaatttcttaaattatacatatatatatatataaattttttatataatgtgagaagatatgataaccaataaaattttgctttcatatttttattgacaaaaactccaaatatgacgaaaccgcacggtacaattttaatagaaacaaatatatctatataataatatccgcagttgaatcgcatgtctccattgggagcctaataacaacccaactaataacataattattttaatacttagtttacatattaacatttttaaaaattgttggcttaaaataaaataaaagataaaataatgaaaatgaaagattctttttaaaaaaatgaaaaatctctcttatctaaaaagcaaaacaaattttttctttctaaatctggacccaaaccccatatctctcctctataaatataaacgtctcgtctcttaaaaaaatcgtataaactcttatatactttctctagccgccacattttaatagaaataaaaatatttctataataatatttgtagttgaatcgcacgtctccattcgaaacttaataacaacccaattaataacagaattattttaatacttagtttacatattatttcttttttaaaattactgattcaaaataaaaaaaataaaaaaaaaaatttaaaagaaggaaaaatctctcttatctaaaaaagcgaaacaaaattttctctctcttataaagctggaccaaactccatctctctcctctataaatataaacgtctcgcctcctgagaaaaacgtataaactctcacactctccctagccgccacctaccctccgccgcctccttttcgccgcctgcttcgctccgccgcgcgcagcgcttttagtctttttctgagactgtttccgaagaatctctctgttaggattttgtttgattctggtcgttatccagatcagagaaatccgtgatccttttttctctctcactttcttctctgaaataggaaaaacaaaaaacaaatctgataatcgaaactgatcactcactgctgattccgtaacctaaaaa

SEQ ID NO: 2119 - DNA, 3000 bp, Unknown
  misc_feature (1)..( 3000): cDNA_ID_3066019_gDNA_ID_1620490_Annot_ID_158579 3000 nt of promoter + ATG
tttgtccactagtgaagtggtttttgtggtgtttaagtgttaagtagctaacttttttttttctggtgaaatttttgtagccacttgatgagatattttggttccgctgacatgagcaaaatgtgtttttggctgctgagaaagttgagtaagaaaaaattaggttttttcaaaggaataaaaacggaatcttttttctgctgcaaaaagccaaaattttcttttccattgaaaaaaggagttttcttgggacaccaaagaaagtctctcttttttgtttgtgggttttgattttgataatgggaatttgctcctttttcacatgagattccgtgttcttcaagacttgttctgttctgatttataaaactatagaattggttttgtgttatttaattggctctttcttctcaaaaatcaatactccactaaagaaagaagaagattcttttttctcttaccctttttgaacgaatccactcaacaaaaagatctatgtttcactgtctgaatgtctctaactatgttctgtcttgtgtggtcactgattcgatgttacttatgattgtccttttttttgcagaacaacacttttgttgagtcatcaaacatatctgagtatgatattggagaagaaagtgatctttttagagctcctgatccaattcttgaagaaccaatcttaaccgttgatccactctctgctgctttgactatgatctcttgtggtgaagacacttcacaaggtctttgtgagcttcctgatcttggttcattgcagagtggtcaacagcttcttgacaaagctttttatgaatgtgagcaagatcttatgatgaaatcagctatggagtctccattctctgatgttttagacatcaagaacatctctgttgtgacgacaatcaatgagaaccaggatatgcaaaagagtgttagctcggggaatttgagctctatggattggtcacatgcacaacaagagactgtaatgattcagaattttcctgatttcgattttggttatggaatgcgaagagcctttagtgaaggcgacatacaggtttggcaaaacattgatgtgaaactttgttagctaaatcatcaagaatttgaataagttgtatcctttctagactcttgatatgaatatgattgttgatttgagtctcttttgtttttgataagcagaaacttggggcaggtcttgttcaatctccactagataggattattgtgagctgcacttcagaagatcgccgtgagaagctttctcgatacaagaacaagaagagcaggcgaaatttcgggcgtaagattaaggtatacaagcaaaacacttgaagtcattttagctcaaaaacaagcacttgaagatcctctaaatgttgtttggtttggtttcagtatgcttgcaggaaagctcttgcagatagccaaccgagagtccgaggaaggtttgcgaaaacagaggagaggaaatagaatggttcaagaaaagggctcaaaggaaggagactaagcaaaaggaagaaacatgaagaataaggagataaagcccatctcattagaaactagttttgttttatatatctatgtataaactttaaaatcttataagcatccaattagttttttgtatataaagggtttctctaaataagctttaagtaaagaaattgtagctaaagaaagtttgtattattgtagtttaaagaagtaatgtatcagtgggtgagagatgtatatacataatctataattctacatatttttataaatcatgtgatgtttctttgcttgtaagcattgcaacaagttagatttcaatcttctttgacaggtttcacatattgtattttcattttacatttttcatctttttgacgctatactaatagttctcaatgttaacgctagcaatcaataaaagtatttggatgctgaaatatcatgtcatgtcatatcattgctggtttgtccctaatgattttgtttctatgattggctatgtagccaaccataggacgtcatgtagaacgaaggcaatacattcaccaagtaaagaattgtgctatcctagcttctgatcaaacccgtttctcgacattcatccttagagtaaccagttcggtcctatacagatgaatttaccaaaaaatgctgccttacggtaacaatacgcgtctctcgaacttcgatcttcttatgatcccctcagctcgaaggtatggacaaatgatagcacccgaccccgggtcgaaagatcactaaatgatactaacacccggtttgaagttccgtaaacctcgataattactgagattatgaaatttctattagtaaaacaccattgatgtcaaattctacaaaagagagtttcatctttcatgtatgtgtgtggaagatgaatggaaaatgtttgtctttgctcaaatttcttctctactcatagttcatcttcttcttgttttattaacaagttgcacatgtttcttgttcgataaccacttttagcaatatttttcgtgtaactgtttttgagtacttttacttgatttattagataacaattgcagtgaacacattgacacatcaatttcacctttcaaaaaaggcattcttttggtgctttcaaaccactcttacgttttctttgtacggaattgattcgattgtattacattttatttctctctcagattcaaatcccagaagttcttttaatcaagtcaaggacttccaacgaaaaacaaaaaatgaatctgtgcctaccaaaaaaaagttgacttcttttcacaattatattaagaaaacgagaattaactttaaaatcaagtgaatgaaataaataagaaacacaaaacagctcgcgtgtacagtgtcgtaatcgtaccatgtaactaactttccagttccatggttcttggagctttattattaccttcaaaataacagaaacacagtttgattttgaacttgaacgaaacaaaaaaaaac

SEQ ID NO: 2120 - DNA, 3000 bp, Unknown
  misc_feature (1)..( 3000): cDNA_ID_2047453_gDNA_ID_1620491_Annot_ID_158592 3000 nt of promoter + ATG
gacttgcggattttggtggccggaaacctagagctcgatctaaagctagtcgcgattcggacagtgaggaatcgtggaatcggagagaagaaggcgagagaaggaggagagtcaacgagaggagatgaaatgaaagagcagcagagaacggagagctttgtagtagtactagtagttgccattttctgcaacactagaaaacacgaccttttcttcgattacgttttcatttattttttttgacagtaactggttggtagttgttgttgctcaagcacacaaaatttggtttgttttattgtttaccaaaaagatggtgaaaagtggatatttatttccccaaaaggagtgttttactttatctggtcacatatggattaaagcaattttagtttcgttctatttggattcggctagaatggttcatgacatggtggtgttcgtttgaggaaacgcataatttgttattgtgggcctagtttgggctttatattcgctaaataatttgggctggtataagtcaactagacggaccacaatttgatttcatcaaataatttttcatgattaataaatccctaatttagttacgaaacacaattcaattattgtgctactcagattcgagaaacataaaaaaaaaaaaaaaaaaagtgattcagattccctcacatgggttgccgagacacatgaccacacgtctcttgccttgtttaatcttttatcaattttgcatcaacttgtatataccataagaaaattattttaattgatttcaatgtgagattttctttagtattttttgcatcaaataatgccaacctaatcctcaattatccatctttattttttttctgaaacaatcttatattatttatctgttggcaaaagaaaaaaaatcctcaattatttcgcaaatggtatatatgtttatctttaaagagtacacttgcatgtgttttccaggtgtgcgggcaaaagaacatcagaattggttctggatatagttctctccactttttatttgttattgttttaatacagtacgttttatgagagttttttatatatataataaattatgcgtttcctgatagttgttggtccaatatcgagaacaaaaaaaactaactacaagctaaaaacctaaaactatgaagatctcagaaaatataaatatacacgctcacgttagcgagtaaaaaagtagacaccagattaacaaatgattagtgtgatcacagtaaagaaatgttttgcaaaattttaagcaattttttgaaatcatgttgtatgtaataaattgagtaaattcatgctgtacataaattaaagaccatttctttgttagtcattgaaatcataaccaatcaaccaataaaactgaatttttttcgttcattagagagataagttaatatcttcaaagtttaatgttaagctcaattgtttagataggagataaccgataagaaaccacataactagttaacctacctatcttggcatcacatgaatcaatgacgttggatagtcagagaggcttattttaattatacccgaaacgaaccaaccatctataattctctaaactatatttaatcatcatataactctgtaataaacccaaattttcacaaattaaaagccataccaatatcttcaaatatggaaaaaaataacaatttaacaaagaaacaaaatatttcctcaccaaaaaaacagaaacaaaatattgttttaaaaaaggaaagtggtctttacacaaaaaggaaagagaaaggaaagtggtctggttcgtatcgcacccaataagaaccaccaactgttgaagttcgtaaactgttccacaaaaaaatgcataaaagaaagaaaaacagatatgagattcgaccattttttttccatataaatgttttttgggtttgcaaaaatcgacgccattactcttttttctccccaaattattgacctttttataaaaataatttatattctcaatcacacttcatcgtcttcttcttcctctctctctctctctcctttttgtctctgcactgtgtgttgtcaccggagacagagcttgtgttttcaactctctctctctctctctctctctctctctctctctctctctctctctcttgctctctccgtctccctcactctctctttacttcaaaatcaaacccttttctcagatttctgtgatatagcaaaatgcgcaatctcaaactctttgagagatttaaaagcactcaagtccacgcctttactacacaagactctccctctacaagcagcaatggtagccctcgaatgatgaagttccttgggcatcccaaatccaaatctcgttcacttctccctcatggctttcccaccacagacctcctcgagcctcccttggactcttacctcaaacctatcgatttggtggagtcattatcaaatctatatcggagaatcgagtccagttcggaatccgaggcatcgatgctctaccttgagcagtacgctgttctccgcagtctcggtgatgccaagctcttgcgtaggtgccttctcaacgctaggaggcacgccattgatgtcccttgtaaggttgttttctctgcttggttgagattttttaggagagaacatgaacttgtgggagttgaatctatggattgtaatgggcttgcttctgaatgtccgaagactagtttgactcatggttgtgatttgaatgtagacgacgagggttgtgaatgttctacggtatgtgaggatgaatttggtagtgatgacgttaaaatctctaaggctgatgagttttcgggtctagatgaggttagcgatatttccttctgcgtaggttcagagaaggctaagtgtgttaggtcgagaatcgcagcgctttcgcgtccttttgaggccatgttgtatggttctttcgtggaatcaacaacttctgagattgatttctcggaaaatggcatctctattgaggcaatg

SEQ ID NO: 2121 - DNA, 3000 bp, Unknown
  misc_feature (1)..( 3000): cDNA_ID_2047410_gDNA_ID_1620491_Annot_ID_158605 3000 nt of promoter + ATG
cgtatatatatttgattgagatttgagacaagtaaaatcagtttggataaacacacacttgttgtcgtttctttataaataagacggacacgaatctgtaaccgatgcatttttaagattcttttaattatatcagacagagagatatgacttttgtagttcgtcttcttgtgtgtctcttattgacgcttacaattacatcttctctagcccgcaaccctgtttccgtttcaggttcgaatctcatcttcttgtttccttccttcgattcgttcatgtttttctctatgtctgaatgatttcgtttggattaggtgggtttgagaattctggattccaaaggagtttgttgatggtgaacgttgaggactacggtgacccatctgcaaatcctaagcacgaccccggcgttcctccgtcagcaaccggccaacgtgtcgtcggcagaggctgacgtaatgttttagttaacgcagaaggaaagaactcttcttgtttacattttcagtttgtctgagattaaatctcagttcatatagctttctctaatctgtctatatagatattttctcgtaatctccatacaacttcatttatttttttcttatggcaatgactttgtaccttattttccaatttgtgtctatgcaaaatgattgaatcaaaagagttcactctaggtaaaccaaggtatgctacatcaacagattaactgaaacatagaagacacttttggcacatgagattgtaccaccatctcgtattaaaaatacttgtgagaacttcacggaaaggttccagcgtttctatcttctgatactactacttcagtagctgctgcctgtgagtatgctcggtcgtgttagagttttactgatgagatctctcagctcgatctctcctgggaatctaccttctttcaatttagagaacacctgaaatagaaacacaggatttagtacaaactgatcttacatatctggaaataatcttaaaccattaattactaaccggttcgccgttgcagtgaacttcaaaggcgcctgagctttgaaggtaagactgcagaaagtttccgataagccaagtggaagccatggatccaaatctgttggccctcaaggagtggaaccaagcaggtgggttcgtaattccaatcatgggaaggatacgatcacctgcaactatcataccaataactcccatctgaacaaccggcacaaccttagctagaaggcgttttggtgctggtggtgggtaatttgcgagaatcacatctaaaccgggaaaagccgtctctaacatcttcttcatggtgactgcagttcccctacaaattaaaaaaattgggatgaacaccagtcacactgataaagaaagctagagttacttatgccttttgcggagaagttcaaaacagtatccaaagaagtcatgtcatttagcattcataatcatatataagaaccaaagtcaggcctttcaggttttctagcatctaagaatcatccccaatcaacaaagttgatcgaccacacatctctaaaatcctattcaccttgcagctataatgaatcctataaaaatcaatagtcaatgggaactgaaaatcatatacatgtatagacattgcagcaggaataagccttgagatataatcagtgcaaacaacagtcacagagatgatgtttttatgaaataaaatctcaaactgtctaattgcagtgatttgcttattgaagacactgaaacttatgacaatgttaattaggatgttcatgtatctgactacaaggaagcaatgacctcaagcatgaatcagatagttcttatgtagtttccacattatctaagttttctttctcaccacgaaaacctcacttacaagctgcttaagattctctgactacactagaataactataaatccgattctaagtaaaaacattaaaatcaaaatcgaatttcttaaaatctaagtaagaaaaattgaattacttgtaagaacaggagacgcagaagttgatctctactgtatttccatatccaattgctcctcctaagccacttgtcttctgcaaaataatgggagcttagagatcaaaaccgtaaccaatagaagtgaaatacacgaaagtataaaagaaatttaacctgtgaaggaaagtctagggtttcggggatgatcgcattaggacgatgctggtgaggaatatgcggtggctgatgaggacggtgaggctgaggtttaggaggcggaggagtgaagaggttgaagagatccgaacaaaacaagaatataggtagacctaacaagatcaattgtgctctgtccatggcggatatttagatctctcgattaattcacagtgaagcgcgagagagagagacgagggaagaagtagtgtaaagcgaatcggagaagacggaacgagagagttcaataagacttgtttggatgctggaatattattatcctgctcattgttgttgacgtcttatattttgaaatatttgcttaaatacccctgtatttatattttattgcacttacacccccgcttgaatgaatagaagtaacataaagcccactgaaaagtatcaaaacggcccaaatatttgatccgcaactattttttcttgttgactcggttcaagaactaaaaagaacaaaagtgacagaggtttgttataaaaaagcggcaccggacgacatgaatttctccgggaattgacttgtcaaaacgcgtgcagtgcacagcgtctcaactgttgtctattgctttctcaatcacaaaaagtacaacaaaaaaagctgatttacattttgtttttgactgagaatgttagttcaaattctagatcccgctctgagtttgttcacactttttgttttgctctccatcatcactcaaccgaaaaaaaaaagtaaagacaaaagttattttccttatgcgttacttctccgttagtttcgaaacactgacactatagaccatg

SEQ ID NO: 2122 - DNA, 3000 bp, Unknown
  misc_feature (1)..( 3000): cDNA_ID_2047397_gDNA_ID_1620491_Annot_ID_158609 3000 nt of promoter + ATG
atctgattcatgcttgaggtcattgcttccttgtagtcagatacatgaacatcctaattaacattgtcataagtttcagtgtcttcaataagcaaatcactgcaattagacagtttgagattttatttcataaaaacatcatctctgtgactgttgtttgcactgattatatctcaaggcttattcctgctgcaatgtctatacatgtatatgattttcagttcccattgactattgatttttataggattcattatagctgcaaggtgaataggattttagagatgtgtggtcgatcaactttgttgattggggatgattcttagatgctagaaaacctgaaaggcctgactttggttcttatatatgattatgaatgctaaatgacatgacttctttggatactgttttgaacttctccgcaaaaggcataagtaactctagctttctttatcagtgtgactggtgttcatcccaatttttttaatttgtaggggaactgcagtcaccatgaagaagatgttagagacggcttttcccggtttagatgtgattctcgcaaattacccaccaccagcaccaaaacgccttctagctaaggttgtgccggttgttcagatgggagttattggtatgatagttgcaggtgatcgtatccttcccatgattggaattacgaacccacctgcttggttccactccttgagggccaacagatttggatccatggcttccacttggcttatcggaaactttctgcagtcttaccttcaaagctcaggcgcctttgaagttcactgcaacggcgaaccggttagtaattaatggtttaagattatttccagatatgtaagatcagtttgtactaaatcctgtgtttctatttcaggtgttctctaaattgaaagaaggtagattcccaggagagatcgagctgagagatctcatcagtaaaactctaacacgaccgagcatactcacaggcagcagctactgaagtagtagtatcagaagatagaaacgctggaacctttccgtgaagttctcacaagtatttttaatacgagatggtggtacaatctcatgtgccaaaagtgtcttctatgtttcagttaatctgttgatgtagcataccttggtttacctagagtgaactcttttgattcaatcattttgcatagacacaaattggaaaataaggtacaaagtcattgccataagaaaaaaataaatgaagttgtatggagattacgagaaaatatctatatagacagattagagaaagctatatgaactgagatttaatctcagacaaactgaaaatgtaaacaagaagagttctttccttctgcgttaactaaaacattacgtcagcctctgccgacgacacgttggccggttgctgacggaggaacgccggggtcgtgcttaggatttgcagatgggtcaccgtagtcctcaacgttcaccatcaacaaactcctttggaatccagaattctcaaacccacctaatccaaacgaaatcattcagacatagagaaaaacatgaacgaatcgaaggaaggaaacaagaagatgagattcgaacctgaaacggaaacagggttgcgggctagagaagatgtaattgtaagcgtcaataagagacacacaagaagacgaactacaaaagtcatatctctctgtctgatataattaaaagaatcttaaaaatgcatcggttacagattcgtgtccgtcttatttataaagaaacgacaacaagtgtgtgtttatccaaactgattttacttgtctcaaatctcaatcaaatatatatacgtttcttataatgcggagatgatgaaaacaggtcagaagagtaagaccatgtagatgacgacacgtgtcagctaagaaggcgggagtgggaggtgacgtgtgcaacgcgtggtgccacgtatgtcacatcaaggccaagcaagtggaagtgtggaggcacacaagacagtgattgtcattttgtgcaaatcgtcaacgcttattaccaaattttaagatcattttaccaatttctcccactcccaaacttttttgttgacttttttctttctctttatggggtttcctcgaacttctcgccagaaaataataatttatagctcactctcctcactgttctttctaaacgaggacaaaacatgtttactacatttccaaaagtcaaaatatgttcatgagacagttttaaccaaagtaagtgaaattcgtaatgagattggtacttcaccgattatgccttaccatgcattgtactgccctccagtaattgtatttagaaaaatcttttatttttaatgtagttgtataatttgctacaaagattttccgtgggttctattgggctccttaaaacctcatattggatccgactaatggtgattggtgatacgcatcaaacatgctctcgtcaaattgatagatttttggtttctgttggatgaattcaaaatatataagaagaagtagacaagattatttacaatataatacagtacatatttactctacatctgcttatataatttcgttgtatagcagtatcggtataattacgaataagttcttttaattttcatttaaaaaccaaaaaatgttttgattaatttagaaaaatattgaaactttacgagagatgggccgacaagtaagattaaatggtacacgtacccacatcgcatgcaacttggtctcttcgtttatacagaatctatgccttatttgtgttacagacataaatccgtgacaagtgacatcaattcattagggaatattatattataaggaggtgttgatctatagatatatatattatggaaaatttatcattttttggaacgtaatcctttgtaactaaatgcacctatagatacacatcaaacacttcatttgttttaagtaatttaatagactttttaaaggataaaatcgaaagagatctcaagagaaatagggagag

SEQ ID NO: 2123 - DNA, 3000 bp, Unknown
  misc_feature (1)..( 3000): cDNA_ID_2047385_gDNA_ID_1620491_Annot_ID_158612 3000 nt of promoter + ATG
ggtcttgcttttgtatgtattggctccatggaactgttattattatgtttctcactttgatgaaactacaggacattgacaaaggaagtgaagttgggaaaatgtttggaatctattaaagctaatgcctttgctatttcaaagtatcctgttattattactcttgaagaccatctcacgccaaaacttcagtttaaagttgctaaggttttctttcttttcacctctatagtcttgagaccttaaagtagttcatggttccgtctatgtatatatgaataccgtaaagtgtttgctctgcagatgataactcagacatttggagatatgttgtattaccatgattctcaaggttgtcaagaatttccttcaccggaagagttgaaggaaaagattctaatttcaacaaaacctccaaaagagtacttagaagctaacgatactaaggagaaagataatggagaaaaaggtaaggattcggatgaggatgtatggggcaaagagccagaagaccttatttctacgcaatctgatcttgacaaggtttgttctagctttgcaactgtatatcaaaataacaattgaagcaaaaacttgtagcatcataccacttttgattgctttcaggtgacaagcagtgtaaatgatctcaatcaagatgatgaagaaagggggtcttgtgagtctgatacgtcatgccaattacaagcaccagaatacaagcgtcttatcgctatccatgccgggaagccaaaaggcggtttacggatggctttaaaggttgatccaaataaaatcaggcgacttagtctgagtgagcaattacttgagaaagctgtagcatcatatggtgcagatgttatcaggtatataaatatcacatgctaaataggcactgtatagctagtgtttgcttcttgtatttcaagttaatttattaaaacccttatacgtgagcagattcactcagaagaattttctgaggatatatcccaaaggcacaaggtttaactcttcaaactataaacctcagatcggttggatgagcggagctcaaatgattgcattcaacatgcaggtttgtctcaaatcctcatttcgtgtatcgtcatccaggttttactatgatcatgaaactaaataatgattgaaaacgtaaatgtaggggtatggcagagcattgtggctgatggaaggaatgtttcgagcaaatggagggtgcggttatgtcaagaagccagattttcttatggatgcaagtcctaatggacaagatttttaccccaaagataattcgtctccaaagaaaactttaaaggttaggctttagatttaaacacccgttggttccttcatctatgcctcccacgcttctcggttcttaacatctaacaatggcaggtgaaagtctgtatgggagatggatggctcctagacttcaaaaaaactcactttgattcttattctcctccagatttcttcgttagagtatgtgaacgacaatcttgatttttcctttatcccttatcttgattgaaatggaattataactggtcaatacaggtgggtattgctggagcacctgttgatgaggtgatggagaaaacaaaaatagagtatgatacatggacacctatttggaataaggagttcacattccctttagcagttcctgaacttgctctgctccgtgttgaagttcatgagcacgacgtgaatgaaaaagatgattttggaggtcaaacttgtttaccagtttcagagataagacaaggcatacgcgctgttccactctttaatcgcaagggagtgaaatacagctccacacggcttcttatgcgcttcgagtttgtctgagacgccatttttggtgcgtgtatccatctagatttatatcttcttactttattcgatatgctgtgttttatgtgtcttatgcttcttcattgatgaataaaatttgatctttacatgagaaatatatagatcttctgaaatttcctttatggtttcatttatatatgttaccagtttcttggtcttgggatgaagttttgttaaataagaaccaaaaccaaagaacttatgataacattaataagcatctctcatcttatcataaaaacataacctctttattctttttctggatgatttggtattggatagcttaaagtagttatttatacgcatgaggacttataatagattaagaagcttcatatcttcagctacattgttagttatttaagcctttgtctctctgtttgctgcactaaacacgtgaaattctgaagtagagtatagtattctggaatcttttgttgttatatgaatctctttatgcttattaatcaattttcttagcatttctttacattaaacaacttaaaggaatttattcttaatccatagacaaagaccacaccacccatatatgcttattagtgaagaaaaacagattcttgattctgtagattggtaacttacagatgtattgagattcttcaatgactttaggagaatttcaacagtgacttgaaagaggttgcataccgtgaaatgttgaaggaaagaaagaaaatgaaaagtgttgagaaacccaatcgttgaatccgtgaagcttccttgagctacatgcctacatcatatgcttctggaattagataccataataattgtttaagcttgtttttggaaagtgaggctttccaacatgagtctcttggctgggaatatatggaaaaagaagaggaaagctaagagcactgagcaaaaagagtaataccactataattataataaagtatggaagaaaagagaacgacttatagttgatttatgagtatgaagttcatgccaaatatgcaggagttgttatttaactaaattgcaggaactttttgaagagaatccagcggttgaaaaatataaatagaggttggctggtgtgattgtgaagtatctgggatgaagagagatatggggagttacaaaatg

SEQ ID NO: 2124 - DNA, 3000 bp, Unknown
  misc_feature (1)..( 3000): cDNA_ID_1023494_gDNA_ID_1620491_Annot_ID_158615 3000 nt of promoter + ATG
gtaataataacaggatactttgaaatagcaaaggcattagctttaatagattccaaacattttcccaacttcacttcctttgtcaatgtcctgtagtttcatcaaagtgagaaacataataataacagttccatggagccaatacatacaaaagcaagaccataccttccatgtttaacgcagacatcatcggtaccacgtggccaaagatccaactcaacaactctcacgcctcgtctcaatgcatctgcaataggaagttcactgcagttgctacttagctgatttccagttaaataggaattgtggcctgtgaatataaagtaatgtgacaatggagcatccatgttttgatggacctgaaataaacaaccaacaatgttttagttatatcactgaagaattgagaatcttctctctgcagaagtaagcaactactagaatagaaagtatccaaaatagaaacttctaaatttagacaggttaatcaaacagtcagattccagaatttcagcagcagctgcagagtacacaccaagaacatatcatcgagaaaagtttcacccttttattgggatttgatgaattattcataagcattaagaagaagctaccaaaagtgatgatttttattttctctttgatcaaactaaatttaggccagaaaatagcaaaaagagaaaagagtcaaatagcgatgagagagaaaacattctgagattttccggtaaaaccaacagagagaagaatctaaagtcgtaatctttcaatctcaatctttatcaagaaacaaacaccatcaaatcccagattccaaaaagtctcagacttttcttcccaggaacaaaaaaaaaaaaaagagtttgacttgaaaaatttataaacctgatcggcgataggaggattaagatcagtagaaaagaggtaataattgaaatcatcaagagtaaggtttcgtctggtgaactttgcaatgtgatgtttccggcgaagaacctcgtcaacgattctctctgcttcctctagacttgtttctccttctcctccttcctccgtcatgagcttctgtagctgctccggcgacatatgagcatcgccttcggtgtatttctcgaaaagatctctgacgtcttcgacaggaccagactccgtcatcctgaacttccttgtgaagatcagacagaatttgtaactacccatctctttttttccttccatgtttgtgtatgtatcgtcgtcttgttcagatccaagaatgtgattctgattctacataaatactcggattgttcctgagttttaatattattttaaaacttcgaaaccatttcagagaaaacctcgtcaaacctcctctcttacacgctcacacctgaacacacaaaaatacaaaaacaaaaacttttttttactgaatctcgttttttgtaataatttacaaattagtctcctcgttaattttaaaaccagggaaaaaattgactaatttaaaagggatgagtaaaaatagtagttactgagattatatcgccaggtgttcattgtttttgtccctccccataaataacatactacaaaagatattttcattttcatttttgtgtgaagtgtgaacacaaaatcgagactattgagaaaaaaaaattagatatgttgaaatggcaaagcaacaaaataaagaactggtctggctacattggtggggcagatgcagatctaaatcttttgcaatttgttgtgttttgtattgtctttgtttttcttctctcaacagaatacattcttccattgaaataactccaagattaatatcgtctattgttgtaagttttgttactatactgatagacaattatctaccgcaagattacactctcgaaagctaaaggtcataatttcttgttggtgtttgaatatcttgttgataggattgagtggcgggccaaactgtagagttttgaaagctttggatctgttttgaacataacatcatggttattcatgatgtctcttttagaccaaaagtgtaaaaatatattgttttgttattcatagtaaaattaattcatatatttccattttattttatagcatgcttgggaattatttttcccccaaattatttgatgtttgtaacaatttgtatttttgcactatttatcagtggttgaatttctttaattatctattaaatgatgttttatgtaggaaaaaacaagaaatgcgaaattcaatttaatttttgaaatacttcagatgtcggccaaaagaaaaaaaaaaacagataacattagatatgttgcaatagcaaagcgacaacaaataaagtgttcggctatattggtggtgcagctgcaggtctgttgtctttccaaatccatcttttaggccaaaagttaagtactaatctcgccctttttaccctttctttttactaatagtaaaatattatcaatgatgtagcaaaataaaatgtactggaagactggcccaggaaagttgacagtatttaaatgtcatcgaattcttaatatggatggaaacgtgcttaattaaaatgatactgacaattaatatttaactaaccacttataaagttaagtaaccatattaatattagctggaacaagagtaatgtgacatgcttatggtattgatgttgagtctttttgactaagaattaaaaatgacttttgggtatccgatccagccatgagccatttcttccattagggttaccaactctgaattactattattatcatttcttaattaacaacaataaagaatcatagaattcacaaagattaatgggctgtaaccaaaccactcattagcccattacggttctacaacgatccgggcccaattacaattgtacacgctacaagccaggtggcggaatttaattggatattgacgtggctttggtgagaaatagcggtggacaagggaaaaaaaaagggactgtggagaaacactttagcacggtgcgacaag

SEQ ID NO: 2125 - DNA, 3000 bp, Unknown
  misc_feature (1)..( 3000): cDNA_ID_3433962_gDNA_ID_1620491_Annot_ID_158618 3000 nt of promoter + ATG
atcttgttgttgtctcaagtatggtctgccactacttcatcttattatatgtcacaatacattcacatttgttcggacgcgtttacgaaacctgactggaattttggttatccactgcttggaatctaacttagctattgcatttcactgcaaaggatttatgtttaatgatttagcttaaaaggatttgtggaaagctcattattcaaacaaacaaaacttacatgaggattattgatcaagtacatatataccgtgatctacattgctaatgtacaacatgtgttacaaaggaatgagtttttcatctctcatcacatcaatccaatacaaaaccgaatctagggttctatatttcctcttaaacccaaacctatctactttttctcttttcccaagaagcttaaacggacatctaaacagagcatccaagaaataccaattcgccaaatcctcaatctctgtcctaacaagcttctccttcacaacaatctcatcccacacatgttttctctcaaccatctctctcccaaaccagaaaccttcatcaaacatggttgtttcgttaacttgtacaccaagtttcttccctatttccggccaaatctccttccaagtaaaccctactccattaatggcgttaaaagcttcccctttctcgcgtactttcccacttgttgcagcgaatatatgctgctccgcgactaaattcgaatcagagccatctatgtaactctcttcccaacattctcttgttcctccaaacacaaaaggaagattcaaatacttacacatcgctccataaacacaaagacttcccatgaagttgtacagagttcttgaagagcttcccattagcaaaccaggtctttgaaccgaccaaacaacggaactacgagtgatcttctccttcagcaagtcctccaaaacatagtagaaattcttcccagagctctttcttggacactcctcgctgtaataatacaaactcgaaccttctccacgagccattgtctcttccaccaaagacacataatgcttcatccccgtttgaagcgagaaatgctttaacctcttagcgtttgggagaatcgcgtccaaagcgttcatcagcatcgtcttgttctgtacgcaacattcgtcggtatccaatggaaactcaccagaccacgtgacccaaaacacgtgactcacgatgtcttgtaatggagacaacctctgtttagtctcagatgcgttaagcagatcgcaggagatgaagttgtacatcttcgtcatggaattgatctccgggttacgcgctacgccgtagattctccatcctggtttagacattaatagcgtcttaacaatctctcgacccacaagcccggtgacgccaaagattaacgctacattctcgtctacttcgtttcttctcatcaagctgccattttcagaccccattgtgattattagtgagttatggactttgatcaaagcttcatataaacgcttagagtaaagacaaaaaaagtttgtgggactgattcaacgtgttttaggatagtttcaagactcgatgcttacctgttttaaaggctatgataaattatccaaagcaagttgctttgaacacagctacgatgtagcataacgaagcaacatttgtttaagataaaatagactaaagtcaaacagtgttttgggtttcatgttaacgtgtttatcaatttaatttgtggttctggaatgtgttacgaaagcaacagttgttacaatagttttttaaggaaccgtcgtgtacagcattttgtccggttctcaatcggacggtcaagattttgcgagaggcagagtctggcccgtggttgctggccggcttttaaaattatagtacacttcaagtgggtctctactctaatagtattcattttagttaacagtctcaccggtcaaaaccgaatattagccgacaacttattcaatgaactagttatatatacactcgtgagtcgtgatgattgttttttcataactagaactcatgtacccgaaaccaaaccgatttgagatctaactgtcgttcgattcatgcagtggccaaacatgtatcatatcgaatttcatcaaatgaaacaagttgaccaatggaattgagaaagtaagtttttggattagcgaaatggaagaccataatttacattatcaaacaactttttgattgatcaaaattattcttctgttataagtcaaagtctttgatcacgtataacgttttaatatgagaaaattgaataactaccctgtctacgttgaagaaactgaaagggggaaatgggtacagtgtatctcttgtcccaaaggacattgaaaagctaaaaaactaacacacttggctacgtttaaggctttaaaatggaccatgttttgtggtagacctacacattactcttctttcaattttgttttcctccgtattctatgcattgaatagacccacttctcatctttaaattttctgtggaattgtgaaagagtgttctactttggcgacaacaaaaaaatgtttcttggaacttggaagaacttcaataaaacggcatggagttttgacttccaagttagaaacggagtgtacctcaagaaaagggatctaagcgtaaataactaaaactaagaaccctaaaagaaaatacatgattatgaaaggactgaatcataaatgcctgtcctccaatgttgagacgaattgaaaaggaaccagaacaactactatcaacggtgatcgatttcgccgggaacggagaagaaaaccctagatatggcggagaagcttgcgccagagaagagacacgatttcattcacaatggtttctcgctttctctatcccctcgctctatttctctaatttcagctgattccatttcacgagatttggtttgaatgttcttcgatttccgatggttataggtcaaaaggtatttgagtgggatcaaaccctggaagaagtgaacatg

SEQ ID NO: 2126 - DNA, 3000 bp, Unknown
  misc_feature (1)..( 3000): cDNA_ID_2047358_gDNA_ID_1620491_Annot_ID_158622 3000 nt of promoter + ATG
cattactatgaacaatctctcggcttggcaaatctaagttcccgaagatagagtcccatattcgaatacggttgtcctgacacgtcgtgaggattttcgtgcctgatgatggagagaagtaagcagagttgactactcgtttgtgtgcaagatcatgaagagaagctttaggttgtagtttacgcatatcccagattcgcgcctgaaaccataaccaggaaaatctattaaacaagttctgaaagaattcagataaacatctaaacgaatccaaagtgacagcatgatcttggttttgtttgatagacttacaaaatgatcgttcccacaactgagaagaagctcaggctggacagggttgcagtcgaggccacaaactttgcttccttgcttgtgtatcagaataggctcacccgtactgttattggtacgatgatcgatccttttacaaaagcaatcacgagaaaatcagtttggcactcatttaaaacagtaacaaagaggctagtctataaacagttcaaggggatgaaatcacttacatgtgaagaaacccaaaattatcagcagcaagcactacacctttctccgagtttatatccataccgtacagcattttccaactgtttgcgccctataaaccgatgatatgtcgtaataagttaaatgaatcagagaagacaaattagagaaacgagacgatggtgtgacctgccatccatcagggttgagattcagcaaagttgatgaagttccagtttccaggtcagtataaccaattgttccatcagaggatgcagaataaaccatgtcatcatttgtgggactaaacctgcaataccaacaaaagaagataaatttgataaaacaaaagacatgagcttttgtttccagatactataatgcagaaagtaaaaccacaacatatactgtaagattgaaagccagatttaaaaacttaccgcatattattaacttgaacagaatgtatgtttccatacacattcttctcatacacttttccaaaatcccagactccaatttgccctttcttcagagcattaaccataagaccaacaacagaatcgaataaaaacaatgagaaaataaacgcagaaaattagttacgtatgacttttgtttcattgtaaaaccttatctccagagagaagaatgttgttctttgttggatggaactccaaacatgtaacacgtctgctgtggtatctaataactgcacaatgaacttgatccgggatcacatattttggtttaatctgtccagcaaaggaaaaagagaaaagatccagtcaaaaaatctcatcaggtatcaaaaaatgtttggcgcttgaacacgtaaggacttacaggaggaattctcggttggagttggcgcttgaacacaaagtcaatagggttctttgtattcctatgagaagttgggagtattccgtggtcagtaaccactctatgaggacaggacattgtggtgtggccttcaagtgatgcagtagaaagcgaaaacattgagtaaattaacattttctccactcaccatcatcaaaaagctcacatgtaagcaagaatcgataagaaatagcaggagctttaccaggcattttacacaagaagcaaggcttcataggacaatcgatatacgttgctcctttaaatccagcttcatggccaggctgtttacaaacctataaaaccaccatgaaacaacaacagatacgaaacaatcaaagccaaacaccaaaatcctctgtctctgcatccaagtgaagaatactaataaacaataaagtgaatttcaggcaccattataatgggaaccaatacagtgaatacttctaatatgttcgaaatcaaaatcaaaagtcattacttattccacataagcctactcagaacttgaaatcataagccaagtaagaaaactcattagaaaagttagggtttttagaatagcgttactttgcaaactttcttaataagcttaacggtaatgggtgctttccctttggctttattcttctccaattcaattttccctccatttttaaccgcttcatcttcctcctccgactccgagaaagggtaattatcttcctcttcttcttcttcttctgacgaacttaactcggaatctgtatctctagcgatgacgatttctgggtccctttttcttctgctcctcgttgaactcattttcggtaaaaatctcacgacccgacaaaaggaagagagtacgaatcaaacagttttgtttctttttgggtttgatacgacgcagcggacacaaactaaagccggttaggtcgatgaccggtttaattatttacgcggataaaaacacttttactcccatttagatttaccattataccccctccagatcttgtaatatgttcctgtaataatgtgagggtatattggtatataactaactatctcgtggcgggagaggttaagacgtggcgaattaccggccggaagcaccattcacgtggctctcacgagcaatactagtattgggcctttttattcagataagtaatgggctatggcccaattttcatttatcccatatttaaatttgacttacaaacaacattaattgaggttctttgctggtatgttgacaaacaacattagttgaagttctaggaggaggttttaatgcatttattttctttaagaaaaggaaaattaggagacgtggacgaataggaactcgtataaaccacacaaaaaagaaataaaaagacaggagcttggaatttcttaacgataaagtttgtttgtggcgctcaatttcgaaaaaaacatgtcaacatcatcttcttccacaccgacaaaacacgtcgtcgttttcaaacacttaccagaaccatctgtggaggaaagaaagttccaaccttctctgcttataatacaatacttcccctatgctatcaaacctatcacaaagcctagagtaaaatcgattctcttaag

SEQ ID NO: 2127 - DNA, 3000 bp, Unknown
  misc_feature (1)..( 3000): cDNA_ID_3066055_gDNA_ID_1620491_Annot_ID_158621 3000 nt of promoter + ATG
caagacatgtggcagtgataatggacggaaaccggagatgggccaaacgggccggattgctgacgtcacaaggccacgaggccggagctaaacggcttatagagttctccgagctttgctttaaattggggattcatacagtttcagcttttgccttctccacagagaattggggaagacacaaggtgtgatatttcagactatgtagcttacattctcactcaactcttgactctaacgatttgttggtattaataagattgaggttaagtgcttgatgtctttgatccaacattacctcaagtccaagatccaatatttccaaaggtataaagtacaactcaattgagcttttttgttgacaaatgatctgctcatggattaccaaaatcttgttgtttcagagaggaaactcgagtttctgttatcgggaacctaacgaagatccctgagtctctcctccgaacagtccaagagatagaggaagctacgagaagctataagaagaagcatctcatattggcaatagattacagcgggagattagacatcttgcgagcttgcaagagtattgtgaagaaatcagaaaaagggttgatccgagaggaagatgtagacgaggcattgatcgaaagagagcttctgacaaattgtactgagttcccaagtcctgatctattgattaggacaagtggagaacagaggattagtaacttcttcttgtggcaacttgcttatacagagctcttcttctcgccggtcctttggcctgatttcgataaggataagcttctagaggccctggtttcgtatcagcgccgggaaagacgatttggctgtcgggtttgatcctctgctccgctctgttctgttatgttcatctgagatttctatcaaactacttgttccacagtcagagatcattatgctgttgtaactttatgtcggtaaattgaaaatttgctaataaaaatcagcggttactttgtcgttacttatcactaaaacaaatatcttgcaacacaaggaactgtactatctcaaaagcatagttcttgaggtatattacacatcatattcagttttcattacaccatttgcaagaaaatcaagatttacgaccaccaaagcgtcgttgtctctgctgaaacgacatcaaagcttcgataaaaccgcttctcccaaaatcaggccaaagttcttgagcaaagaaaagctctgtataagccaattgccacaacaagaagttactcactctaagctcaccactcgttcttataagtaaatccgggtaaggaaactcagtacaattcgtctccaattcttcctcaatcagtctctcgtctatctcctcaacttcgatttcgccatctttcactctcctcgcgatacctctacacgcttgtaaaacatcgtatttcccactgtaaccaaccgctacgattagctgaagcctcgtgttgttctttgtaacttcctcaacttcgttaatcactcttaaaagagatttcggaagtttcgaggaatctccaatgatcgatatccgaacattgttcctacatataaaagattagcttttgagacataattaatcaatcacaaacacttcttgattacaaattatacgcaatacttacttggctaagttctgaaattctgttttgagtgatctctcaaataaactaaacaagaaatcaatctcaatctgcagaggaataaactcataatcgcatcaaaatctgagatttcgaaaagaaaccctaaaatttaaaaattaggtttgtcactcactcttggtctaatccaattatcagtagagaaagcgaaaactgtaaggacttgaattccccatttaccacaaagctcaacgatctctttcaaagcttcaacgccagctctgtgaccatcccaaggttgaagaccacgattcttcgcccatcttccgtttccgtccattataatcgccacatgtttcggcatcagctctgcatgtagctcttccggcagagtttcttcttcctccgccgccgtaaacgaaacatccgatttggaagatttgactccgaatcggaatcctctgttttcctcgaattttggcgagaaagagagaaagctatctctacttaaccgccatcgccgctctaaatctccggcttgatatcgccggaaatcgaaggaagtgggagtaggaactcgtagagataacatcttaagagaatcgattttactctaggctttgtgataggtttgatagcataggggaagtattgtattataagcagagaaggttggaactttctttcctccacagatggttctggtaagtgtttgaaaacgacgacgtgttttgtcggtgtggaagaagatgatgttgacatgtttttttcgaaattgagcgccacaaacaaactttatcgttaagaaattccaagctcctgtctttttatttcttttttgtgtggtttatacgagttcctattcgtccacgtctcctaattttccttttcttaaagaaaataaatgcattaaaacctcctcctagaacttcaactaatgttgtttgtcaacataccagcaaagaacctcaattaatgttgtttgtaagtcaaatttaaatatgggataaatgaaaattgggccatagcccattacttatctgaataaaaaggcccaatactagtattgctcgtgagagccacgtgaatggtgcttccggccggtaattcgccacgtcttaacctctcccgccacgagatagttagttatataccaatataccctcacattattacaggaacatattacaagatctggagggggtataatggtaaatctaaatgggagtaaaagtgtttttatccgcgtaaataattaaaccggtcatcgacctaaccggctttagtttgtgtccgctgcgtcgtatcaaacccaaaaagaaacaaaactgtttgattcgtactctcttccttttgtcgggtcgtgagatttttaccgaaaatg

SEQ ID NO: 2128 - DNA, 3000 bp, Unknown
  misc_feature (1)..( 3000): cDNA_ID_3066047_gDNA_ID_1620491_Annot_ID_158626 3000 nt of promoter + ATG
gattgagccagccgctaaaatctttaaatgcataaattttgttgtattatataaattggtaagagacgatctaattatgatagtttctatagtgaatttattgaaagtaaataaatagcatttttaaaacaaagacaacaatttaggtctcatgaaattaaacaaccgtatcactacgtactattgcatcaactatgagacatgcaaattctaagttttaaactcgtcgaccgaatcgcctctgcctttgctgataccaagtcaaggcctcaagatactcagcttcgccaaaatcaggccacaaaacagttggaaagtaaagctcagtgtaagcagattgccataaaaagaagttactgatcctttgctctccgcttgttctgatcaacaggtcagggtttgggaattcgctacactttgtcaacaactctttctccatcgccttctcgttaatgtcctccacttgaatcagcccgtctttcactttatttgcaagacttttgcatgcttgtaagatatcatatcttccactatagtctattgctataatgagattcttcccttcgtaactctttgtagcttcctctacctcttctatcaaacctagaagcgactcggggagttttgtacggttcccgataaccgagatcttgatcttatcactaaaaaataaaggggaaattagcatcaagacatataaggctttaaaagaggataaagaaaaaaacatcttggagtagataccttcggaggtaaggcatatcagacgctaagtatttctcaaacaaggccatcaagcacttaacttcatcctgatcaaagaaaaagaaaaaactgaatcaaaatgaattatataaaacacaaaagttttcaaggtcacaaattttaacctgcggtgagaagaaaatactaattagtaattaacatgcatgcaagttatattcgtaaggtccacaatttttattttttttggttttagtccataacttcttggttactcaaaagcagattaaaactcttggaacgttttgtgtaatcacctctggtctttcccaattttcggtggagaaagcaaagagtgagatagtgtttgtccccatagcgaaacaatccttagcattctccatgagccttctcgctccggcctcgtggccttccgatgtcccgagtcctcgtttttcagcccaacgtctgtttccgtccaatataaccgccacatgctttggcattatatttctccctcgtttctgtttctctcccattgtaccactacaaataagtaataagaacaaacaaagttagtatactttcataatagcaaaagatgcataaatacgtagaaactatgattagtaaaaaccaaactaccgtttctcgttcctttcttcctcatcatcgtatttagaagctatgattttgatgaatctgaggatatttgtcaacgacaaaggaacatttagtcgccgagagatgaagagaccagggatgagaaaaagagctagaaaagtaaaaacaacagagaataaagacaacatattttttctgtttttgtcttttgtttttcagtgtttgttcgaattggagcgctagctcgtcatgtacttaaagagcttcgggttcaaagacgcacatgatgatcaatggaacctactttctttctctcacttgctctctgtctactccttgatgctacgcaaagacagatcatacgtattaagttttaataagatcttacgacacttgaaaatcactaaatggtttggtcacgtgattttctcattaaacaaagacatttttgtaagttcagattttgactttttcgatcagtataacttgcttgattttaacattaatgtccaagccaatcgcatagacatagtcatgcactcatgctctcacggtttgtctacacgttactaaaaaaactgaacatagaaatatacggggctttggctgtaattaaggcccatgactacacttcagaaggagggtcattagctatgatcatattcatcctagtttttatccaactcaacacaattatcagtgtgtatagtctatttattttatcgcactacccactttaattattgctatgtacagtgggatcactaaattgtttgttggggacattgaccttatccacatattttttaattgatccatacctctatcttttattttactcacccactttttatctattgtttattgatcaatgttgaaaatctcttgacatgtggaaactcttgaggtgttgtggttttccaagatctttttaacgctcaattcagtaaataaaatcatatacgatctagcaaaagcaaaagaggaatgaacttaaacccgcaaaactcctttaaacattaaattgtttcaaacggttttgtaacacatttctccattaccttttcttgttgtgttttgttaatatcttttcaaattgtgtagtagtcttttgtaaaaaatagatacaaaatcacacaatacaagtcaaagtgagacggcgtgaaatactacagtactattttacaataacgtggtcgccaaattattatttccaagtggaaaaatcctttaatagaaactgccgaaaagccctggttaggccaaaaaccccagtattggaacaagggtatatccgtcattgcacgcataaatttcgggacttttcttgaaaaagcagcttcgagaatcgtaactgatgaatcgctaaagagaggtttatcgagaaaaatccaagatttactaaaaaaccactatctctctgctcttcctctgtctacattaatgtaattttgatcatcggattgggtgaaagaaacatcaaactcctaaaagagaagcctttaaagtttttttttaatcaaaaacaaaaggaagaaaattttcctttttgttttagatggcatgaatcatcatcatcgctttgctttcttgattctctatttcgtttgatgggatttgtttttctgggaatttattcattcacctgctgcc

SEQ ID NO: 2129 - DNA, 3000 bp, Unknown
  misc_feature (1)..( 3000): cDNA_ID_1441072_gDNA_ID_1620491_Annot_ID_158617 3000 nt of promoter + ATG
ttcataactagaactcatgtacccgaaaccaaaccgatttgagatctaactgtcgttcgattcatgcagtggccaaacatgtatcatatcgaatttcatcaaatgaaacaagttgaccaatggaattgagaaagtaagtttttggattagcgaaatggaagaccataatttacattatcaaacaactttttgattgatcaaaattattcttctgttataagtcaaagtctttgatcacgtataacgttttaatatgagaaaattgaataactaccctgtctacgttgaagaaactgaaagggggaaatgggtacagtgtatctcttgtcccaaaggacattgaaaagctaaaaaactaacacacttggctacgtttaaggctttaaaatggaccatgttttgtggtagacctacacattactcttctttcaattttgttttcctccgtattctatgcattgaatagacccacttctcatctttaaattttctgtggaattgtgaaagagtgttctactttggcgacaacaaaaaaatgtttcttggaacttggaagaacttcaataaaacggcatggagttttgacttccaagttagaaacggagtgtacctcaagaaaagggatctaagcgtaaataactaaaactaagaaccctaaaagaaaatacatgattatgaaaggactgaatcataaatgcctgtcctccaatgttgagacgaattgaaaaggaaccagaacaactactatcaacggtgatcgatttcgccgggaacggagaagaaaaccctagatatggcggagaagcttgcgccagagaagagacacgatttcattcacaatggtttctcgctttctctatcccctcgctctatttctctaatttcagctgattccatttcacgagatttggtttgaatgttcttcgatttccgatggttataggtcaaaaggtatttgagtgggatcaaaccctggaagaagtgaacatgtacataactttgccgccaaatgttcatccaaagtcattccactgcaaaatccagtcgaaacatatcgaagttggcatcaaaggcaaccctccctatctcaatgtcagtttctttcgctatctttcaatgtttttgatccgtttgtctcataaatctgagttattcgatgtggtatatataactcgattcaattgtctaaattttgtcaattttcagcacgatcttagtgctcctgtgaagactgattgctcgttctggactctaggtactccattttttgtttttgtgtctgtattgggtgcttgtttttgatggttaggtttctgtttttagacccgttcactattgctagagaggataaactgaacctggaaatgtgatctgagtttggtataaatagtgggacatatagtttggaatgtggaaaatttgagactaatggagggatgatggaatgtacagtatattttgggttatattatcagcgtatgtaagttactggcatagtttttttaggttcatagtctggcactgattgctaatctggattgttatgtttgatttggcagaggatgatataatgcacattaccctgcagaagagggagaaagggcaaacatgggcatcaccgattctgggacagggtcagttagatccttacgccactgatcttgagcagaagcggctcatgctccagaggtttcaagaagaggttagctacctgtaaaagtcctcttggtttcatatggtttctgcttttgaaaaaataaatgttgttttctaggtcttctaattgatctccaaagcaaatcttaggcaccactactgagtagaatgaatctatgtcaaagtatgattactttgccataaatgatcgttttggatgagtcatgtcccatgattgttttctttgttcaagctctcttattttgtttcttatgtctctctcaagtagtgaatcttttgtgttcatggataaacagtctgcatagagctggtgatagtaaacctatagtgtagccggatttttatcagtttcatgaataaacagtctgcatagagctggtgatagtaaagctatggtggatgaaattgctcagccttagtctaaccggattgagcaaattaacatggcaagactgcacacatgggtgtgattcatgtatgccttaatggctttgtcttattggttttgtttctgcttgtatgcatgagtttctatttactttgtattgagctcaagtatgcttttctttactctttcgaccaactttccttttacatgttctttctctgttggtttttgcagaacccgggattcgacttctcgcaagctcagttctcgggtaattgtccagatccaaggagcttcatgggcggtattcgttctgactaaataaataatagtcccactcttgttgctataatagtatgtccattataacaaactcaaaagtcaccatgacttaaacaaaatgtctcatgtctcataaataaaccccctgactctctgtttctataactcgtaatggcaatcatataaatcgtctttcgtctctgtttagttgtccttttcttcccgacaacagaatcggagcatctactaaaagtccactgagccgccgtgcgcttcgaatcttgttttggtatgtgacagctttttcaaaaagaaattgtcttggataagtggaggagaataaggaattcgaacaaaataaaattggagaaaaatgatcatattctctattttattatttaacatcattttatttcggttacaaaaaaaaaaaggaggaaaattaggcgcgcgtcatctccctcgcgacacatatatcataagacagagagcagggaacgaatctcaagacgttacgtattagcttatagccattagttttgtctcttcttcttcttctcgttggtcggcttcttcgtcttactaattccatgattcttcttcttccttctgcttcactttctcgatgatcctctgcaccagccgcgatcatg

SEQ ID NO: 2130 - DNA, 3000 bp, Unknown
  misc_feature (1)..( 3000): cDNA_ID_3066063_gDNA_ID_1620491_Annot_ID_158613 3000 nt of promoter + ATG
gaaatgaactccccttgtaatggagcgccttcccattcttacctattcctttctcccctgtgagtataaagtttaagtaagcttttcatatcaaggtagataaactgctgtgctggcagagaaaagttaacagataatcgattggcataggatgagaatgagcaatatattgttttcttaccagtgcataaagctcggaaattctctacagttttggggactgtcttgccaaatagacccatgacaatacgacctggacaaaaatcatcaatcgatatgagatgttttcaggggacaagacaagaagaaaccacaaagcatttcatgcagtctaacatatatcatcataagataaaactcaggaacaaggtcataccagctgctttcccatcaatttcaacatcaaaataaaccttgtgtgtgatctcctttaagttttccttagactttttggcctggaacatgaaaccaaacatccagaaatcaatataaacactagatcacaaccgtttcataatatatacatcatcccaacacatttagacacaaattaggcgcacttcatgcagtaactagctctctagtgttgaatctaatcatatgttaaggatcaaattcagattttccaaacaaccatatattattaactccagtttctttaatcaaataagtccataattcaacagaactctttcggcttcaaatctcaaacactatatgactcatgatgaacgtataaaggtttgttccctgatcctaggagaaattacccgaatcgtccgcgattaagatgattgaaactaatatcagaaacatgtcacatcaaacaccgaatcaaataataatcaacatgaagacctaagacaattatataccgttaaccaatcgcaaccaaattggtattatctagatcgtgcaacaatctaagaactcaatcataaagctttgcagaaatcgatcgactagtgagaaggaaacacacgaatatacctgaatagcgcttagtgtaccgagaagaagaagactccatagaagcagcgtcactgagctcgccatcttgtcgcaccgtgctaaagtgtttctccacagtccctttttttttcccttgtccaccgctatttctcaccaaagccacgtcaatatccaattaaattccgccacctggcttgtagcgtgtacaattgtaattgggcccggatcgttgtagaaccgtaatgggctaatgagtggtttggttacagcccattaatctttgtgaattctatgattctttattgttgttaattaagaaatgataataatagtaattcagagttggtaaccctaatggaagaaatggctcatggctggatcggatacccaaaagtcatttttaattcttagtcaaaaagactcaacatcaataccataagcatgtcacattactcttgttccagctaatattaatatggttacttaactttataagtggttagttaaatattaattgtcagtatcattttaattaagcacgtttccatccatattaagaattcgatgacatttaaatactgtcaactttcctgggccagtcttccagtacattttattttgctacatcattgataatattttactattagtaaaaagaaagggtaaaaagggcgagattagtacttaacttttggcctaaaagatggatttggaaagacaacagacctgcagctgcaccaccaatatagccgaacactttatttgttgtcgctttgctattgcaacatatctaatgttatctgtttttttttttcttttggccgacatctgaagtatttcaaaaattaaattgaatttcgcatttcttgttttttcctacataaaacatcatttaatagataattaaagaaattcaaccactgataaatagtgcaaaaatacaaattgttacaaacatcaaataatttgggggaaaaataattcccaagcatgctataaaataaaatggaaatatatgaattaattttactatgaataacaaaacaatatatttttacacttttggtctaaaagagacatcatgaataaccatgatgttatgttcaaaacagatccaaagctttcaaaactctacagtttggcccgccactcaatcctatcaacaagatattcaaacaccaacaagaaattatgacctttagctttcgagagtgtaatcttgcggtagataattgtctatcagtatagtaacaaaacttacaacaatagacgatattaatcttggagttatttcaatggaagaatgtattctgttgagagaagaaaaacaaagacaatacaaaacacaacaaattgcaaaagatttagatctgcatctgccccaccaatgtagccagaccagttctttattttgttgctttgccatttcaacatatctaatttttttttctcaatagtctcgattttgtgttcacacttcacacaaaaatgaaaatgaaaatatcttttgtagtatgttatttatggggagggacaaaaacaatgaacacctggcgatataatctcagtaactactatttttactcatcccttttaaattagtcaattttttccctggttttaaaattaacgaggagactaatttgtaaattattacaaaaaacgagattcagtaaaaaaaagtttttgtttttgtatttttgtgtgttcaggtgtgagcgtgtaagagaggaggtttgacgaggttttctctgaaatggtttcgaagttttaaaataatattaaaactcaggaacaatccgagtatttatgtagaatcagaatcacattcttggatctgaacaagacgacgatacatacacaaacatggaaggaaaaaaagagatgggtagttacaaattctgtctgatcttcacaaggaagttcaggatgacggagtctggtcctgtcgaagacgtcagagatcttttcgagaaatacaccgaaggcgatgctcatatgtcgccggagcagctacagaagctcatg

SEQ ID NO: 2131 - DNA, 3000 bp, Unknown
  misc_feature (1)..( 3000): cDNA_ID_2047393_gDNA_ID_1620491_Annot_ID_158610 3000 nt of promoter + ATG
tgttcctttgtatgatcgcaaaggcgagagactagtttcagttacacttctcatgcggtttcactttctttaaacacagagtttccttaaaacagagtttctttcttctttataataataataatacttcaaagagagtggaactttttggcatatgaaaaacggactaaatcaaaatttgtcactcgttaataaaaaattaaagacttggtcttttttgacaacagattctttatttgacttctagaataacactgaaactggatcatcgtattaatctaatttaattaaaatcaattaaaagaaaaccatcaaggttctctctttctctgcagttgcgtcccaaacacctatcttcacactcttaaaaccaaacctctaaaagaagttttgatgcagtgagtattcaatctcatagactcatagcaatggcgaatcacaacagtttcacttacatggaccatagcttcagcgatataagtctcaactttgattcctctgctttcagcgattgtaacagtgacatatcctgcgagtttccaacaactacctccgagagccgtcaacgaaaactcttcctctcttgcgccgttgataattccgatgacgtgatcagaaatctcataacgcatcttgagtcatcttcttcgatcgaggaacagaagcaagctgctatggagattagactcttatcaaagaacaaaccagagaatcgtatcaaactcgctaaagccggtgctattaaaccgttggtttctttaatctcgtcttcggatcttcagcttcaagagtatggagtcactgcggtgttgaatctatctctctgcgatgagaacaaagagatgattgtttcttccggtgcggttaaaccgctcgttaatgcgttgagattaggaacaccgacgacgaaagagaacgctgcttgtgctctgctccggttatctcaagtggaggaaaacaaaatcacgattgggagatcaggagcgattcctttactagtgaaccttctagaaaatggcggattcagagcgaagaaagacgcgtcgacggctttatactcgttgtgttcgacgaacgagaacaaaaccagagctgttgaatctgggattatgaagccgttagtggagttaatgattgattttgaatcggatatggttgataaatcagcgtttgttatgaatctgttaatgtcggcgccggaatcgaagccggcggttgtggaagaaggaggagttccggtgttggttgagattgttgaagcgggaacacagagacagaaggagataagtgtgtcgatattgttgcagctttgtgaggagagtgttgtgtatcgaaccatggtggctcgtgaaggagcggttcctccgctcgtggctttatcgcagggtagtgcgagtcgtggtgctaaggtaaaggctgaggcgttgatagagcttcttaggcaacccagacaacaacaacaacaacaacaacactttgaatctaacgacaacgagagataacactttagtttgggctttttattaatgggcctttgtagaatacatatcttgttaattatttggacggcccaagctgaacacatatcttgttaattattggtcgatgtgttttgcatcaaagttgcattacttgcgtagaatgatctatacaagagtagcatcgaaacaaaacaaatacacgtactgtctatttaggagataatgttgtgaacgatttagagaacaaaatccctatagaactaacaagacaaaaaataaaaaagagcaatagattctttcacaaacaataatggagtactacactgtcaacacagaaacaaatgcaagactaaaacaaaaagctaatgtccccacaaataggaagatgggttaaggatatggttcaactcaagattttcttacttttttcaaaacaacattcaatttaaggatgcatttattgtataaaggttttggttggataaatttaacattcattcaaaaagactaaaacaaaaagaaaattaaaaaccatgcgatatgctttttttatcactatggaacaaaaaaacaatgaaaagttgaaaaccgtaaactacatgtagaattaggcatgggcatttggggtaaccggtccggtttcggttcggaaacttaagtatttcagttagcaacaaaatcactgaagtaggccaaaattaaagttgggtttgtaatgacaaaatttcggttcagttcaaacaaaaaacaaatatttttggtttggtggtcctcaatcaaaccggccatccaatgatggactttcaggccaaaagttaaaaccgaaatctaagccggcgaattgccaaatttgagctcagttgggttcaaccaaactttcagttcaggttggttcgaccaaacctcagtggccaattcgattcggtccgagtgccatgcttatgtagattgtagaaagcaccactttgaaaagttttcctatagcaatgaactacaatcacatcatccttaatagtattgaccaaaaaaatcaataatattgacaataaataatctgtattgacaattacatcatgagcgaaaaaaacaaaaaggttaattaacacatgagctgtttcacatgatgatttgctcatcaatgacaaattaaaatttgttgattttttcttacggcgacacgcctaccaccattttctcagccattggctacacacacttcgccacgttttttttttactttgggtcaacggttctgttttcagtcagcggctctgtttcggtttataatactaactttatttcggacagccgacagatcattctcatttttctttctttatctatttttgtactaagaataattcatagattttttcctagaaaaattcatagatttaattggttcattgagatagagatagagatataaatgtgtttcacgaacaagaacaaacacatcaagtctctctgtttcttgtttttctctctcgcttaactttcacaagaaaaaaaaaagatg

SEQ ID NO: 2132 - DNA, 3000 bp, Unknown
  misc_feature (1)..( 3000): cDNA_ID_2047406_gDNA_ID_1620491_Annot_ID_158606 3000 nt of promoter + ATG
tatcggagcaacaaccacacctcctttgagtcctaacggtgtatcctctccaataggtggaggaaaaacgtggatgaactggcctaacataacccctcctgcattgcagcttccagggagcagattgaaatctgcattgaatgcaagagaaatcgatttctctgaagagatgcaaagtcttacttctccaactacatggaacaacacgccaatgtcatctccattctccggaaagggcatgaacaggcttgcaggaggagcaatgagcccggtgaatagtctcagtgatatgtttgggacagaggataatacatcgggtttgcagatccgacgcagcgtcattaacccgcagctgcattccaacagtctttcttcatcacctgtgggagccaattctctgttttcgatggattcctccgcagtcttggcttcaagagcggctgaatttgctaaacagcgaagccaaagcttcatagaacgcaacaacggactgaatcaccatcccgcaatctcttccatgactacaacttgtttaaacgattggggctcattggatgggaagcttgactggagcgtccaaggagacgagctacagaagctcagaaaatccacttctttccgtctcagagccggtggcatggaatcaagactgcctaacgaagggactgggctcgaagagccagatgtctcatgggtggagccgctggtgaaagagccacaggagacaagactagctccggtttggatggagcaatcatacatggagacagaacagaccgtggcttgaatcaaaagttttgaactttcattaaccgttccacaagaagcaaagtcagaaagattccgagaggtcgatgctaatctatttcattttatttgtttaatgctttgttatttttctttagaataaaaagaaaaaattcttaggggacaaaagagagttcgtttgtctctctctctgtctccaaagaaaaacagaggtgaaaaaaggtttcaaaacctaagaaaccttgaattacctcacctcacttccttgattctttactattcacaatgagtaatcgatttttttttttcttggtaacactctcacgctgaatatatatgttttttagtaataatataattggaatacagaaatgtatttacacttgtgaagttagggaaagtgttgtaattgtttcttctaagagttgatctaagatgtttgagactatatcttcgcttatgattccttctatatcttcgagctttaaagcttttccgttaaaccaatctgaaccttcaaggtcagatacagtgagtttgcagatcatgagccacatctcttggtagccatgaagtcggatttcttggtcttttgatctacttgtcaatgtgatgtgatcttgttcaatcgtttcattgagcttactagattcaagttctgaagacaaccgtcttcttgaaatgtttcctgttacaaggaaacaagtatgctttaataacacaagaaaggacatttcaattttcaatactgaagaattaccaacctggtgatggagttactcgaacaccagcataccggtcataatcaagaaccgagacagggctcgaatcatcgcagcttccacactcttcttcttcttttgttgatctcacttcacaatttactaaatcttcttctttggaccaacaaccattactttggacccaattctccttctcgatgttctgtctcaacttagtttcttttcgttttcttctgctcttacgtttctcctttctacgctgcatcagttctccaatctcaagcctctcacgtcctggtgaaacgttcatggcattgatgttgttctctttaccctctaggtgtgtttgatcctctgttttgctctggttctctctagtatctctcctcttcttacaatttctagttcccagctccttatcatttttatccttctcgaaactgagaatgaagaaatcatcatcttcaagctcaacatactcaagagtggacttaactcttctatgctttccctgaatctcatcgtcgtccctcttcaaatgattcactgaatggctccttgagagaaatctggttttgtcgatcacgggaattgagtccaaacccatgagcctcgccacagctcctggcccatctcctctgcctctgagtggctcggggatgaaatcacgagacttgaaactgggttcagtaattagatcagatgggtaggtagaagaggtgccggaacagagaaatctttgaagaatgatagagatacagccgaatgaccgagtcttcgagccgagtgagagagaactagccggagaaggcgatgacttcatcttcatggtctatagtgtcagtgtttcgaaactaacggagaagtaacgcataaggaaaataacttttgtctttacttttttttttcggttgagtgatgatggagagcaaaacaaaaagtgtgaacaaactcagagcgggatctagaatttgaactaacattctcagtcaaaaacaaaatgtaaatcagctttttttgttgtactttttgtgattgagaaagcaatagacaacagttgagacgctgtgcactgcacgcgttttgacaagtcaattcccggagaaattcatgtcgtccggtgccgcttttttataacaaacctctgtcacttttgttctttttagttcttgaaccgagtcaacaagaaaaaatagttgcggatcaaatatttgggccgttttgatacttttcagtgggctttatgttacttctattcattcaagcgggggtgtaagtgcaataaaatataaatacaggggtatttaagcaaatatttcaaaatataagacgtcaacaacaatgagcaggataataatattccagcatccaaacaagtcttattgaactctctcgttccgtcttctccgattcgctttacactacttcttccctcgtctctctctctcgcgcttcactgtgaattaatcgagagatctaaatatccgcc

SEQ ID NO: 2133 - DNA, 3000 bp, Unknown
  misc_feature (1)..( 3000): cDNA_ID_2025059_gDNA_ID_1620491_Annot_ID_158599 3000 nt of promoter + ATG
ttgaagctggatgagatctctggtaatgccaatgcttggcatgacgctgatctcctcatcttcaacactggtcactggtggagccacaccggatctatgcaagggtaagttaccacacttccaatgacttgattttctagtgtgaaagtttctttatatatcttcttgtgaacacagatgggacttgattcaatcaggcaattcttattaccaagacatggaccgttttgtggcaatggagaaagcacttcgtacttgggcgtattgggtcgaaactcacgttgatagatcccgaacacaagtcttgttcctctccatttctccaacacacgacaagtaactcagcctctcttgttatattggatcatattttctgatgtttttgaaatgaatgtcctgacaccatttgtatacattttgggattgatcagcccgagtgactgggcggcatcatcgtcttcaggatccaagaactgctacggagaaacagaaccgatcacaggaacagcttatccagtgagctcctacacagatcagctaagatcagtgattgttgaagtgcttcacgggatgcacaatccggcgtttcttctcgacataacactcctctcttccctaagaaaagacggtcatccgtcagtatacagcggcctcattagcggttcacaaaggtctagaccagaccagtctgcagattgtagccattggtgtttgcctggtttacctgatacatggaaccagttgttgtatacgcttctcatctattagcttctttttaaatctctttccatcaaattattcggttagtaatattttaacacattcgaagagagaatcttaagattaatcacggaatcagtcaattgtataaactttttgaggaaattttctttcaaatgaattataatttttattccatgcaaacaaagcatagtaacaagaaatttaacaatggcaagcccaaaacaaacagtattgggcttttaaaaaaatacattcgatgggcttattggaaaaaagccttttagggttttctcaaaacctctctactataaatagaggaaatccaactttagagtttaagaagaagcaatccaaaatcaattcactgaaaagcttcgtttttaatcctgtagttttcatagggtttggtgttctctctattgttgttattgggcttgccttttgtctaggattatcatgatttatgtttattgaaagattggcttcatcagatagtctatgtggatttgttcgttcccatatgattcgttcccttgaagcaaaatcaatcgtgttgctttcgttatttatataattctccctatgaatcttcggtgatttcgtatttatacgatttttgctgatgttgatttgggagaatcacaactgagcagctatatattattcgtattgaaatctagatttgggtttttgtataagtttttggaagaacagtgatgagtcagtttacagacctgtaatgattgcggtaatgatcgcattattatgaacatctaagggactgagttcttctttctaatatgatttaacaacttcaatttgtttttgttggttaatgtttttttgtttaatctgataaagaggctgatgaagattagatattaatggttactgaaatttcaataagtgtgttgatatactatcttcttgactaggactgctgaggctaatctttgaattctaaggaattatgttttctctttttgatttaatgaaattagattgtggatgatgagaacaaatatgaaaaaacagttatccctgtctgaggattttaatccctttgatgattcatttgtaatctgacacaaccttccagttcatatcgttttgggttttgcttgttgactatttatttcagaccctaaattatacaaacacgaagatttgtcattgaaacaacgcagcttcattcaaaaacggattttaaaattggaaatcagacaaatgactaagcgggtcccttttgactttagcatcaatattcaatattaccgtgccagtaataagagttctcgagtccatgaaatgatgttgtatcagttttcgttcagcatttcaataaattcacgatgttttggtcaaaatatcttactacctatcgactgttatcggacttcaggttctactctttgagtcgtcgacaatgaaaacgtttctttttcctactgtaacgagaaggcaaacaagtggtattttgttacgataaaaaacaggtcaaaaaaaaaatttgttaattgaatgtttaacacgtttccaaaatttataaatgttcatattcagcttacattgtactagcatcggcagtagttgattgaatactagtgtcgagtgacatcagcttgatatcaaagcatgattgattacattatataatatccatttgtaaataatccacctctcaaaaaaaaaaaaattaataaataaataatccacctccgttcatatataaagattgtcacggtggtctaccttaacactacaaaggcagtccacgactgagaaaaaaaaagcagttcaaatttttttcgtatgtgttaaggatggagtacattcatagagcatcatctacattctactccaagataaatgtggagtatctgtattacttttagttttgtaaagagattatacataatttaaatatggtacattactcattacaggtctttgagctgtggcgttccttagccatgatgtttcatcctctatattgtcgatacgagttcacactttctagcttcatctacataccaaaatcatgaattgtcgtatagggccttaatgggcttaaatgaccgagataatgacctgttagcccactagagataattcagaagcctaactttggatataaagtttaaaaaccctggttccagttttttcttctggttctcgaaacttcttctcccaaattgaacaaccaaagaagttgcagagcacacacacacactttcaagtttcaatacagagatg

SEQ ID NO: 2134 - DNA, 3000 bp, Unknown
  misc_feature (1)..( 3000): cDNA_ID_2047420_gDNA_ID_1620491_Annot_ID_158602 3000 nt of promoter + ATG
gatgtaatcaacaacctctttgcttccaaacaaggcagcaatcataagaggcgtcctctcctcaaaacccatcttctttgatcctaatctcctcccataccacaaaccagagccatcaatgctctcaagaccttcttcttcaactagagacttaaaaccggacaaatcattgcaggctgatgattctagcagaagagagaatttgaggtgagacagctcatcaactcccatggcaaaaaaaagcaacaatcttttcccgctctattgatttcactgcaaaaaaaattgcagaacaaattgaaaaggatgaatcttttttcttctgattaaaatggtaatatacatagaacaaaatcatacaaaacagaaataaaaactgcagaaacgattaagctaaggagagaaggaagagtttgttagtttgggatacaaagtttccaactttaaaacaaaccaaaccaaaaataaacaccaacagatccataattaaccacttttgcaacatcgaaaactaatcatattgttaactcattttccaatcagcaaaacaattaaaaacaaactgcaaactctaaaacaaatcgacatatatggattcaactgaaactaaattagtgactaatcaaatcaaagaaacaaagagtaaagattttctacctctgagtcacagagacaaactctctcttttctcgaccaccactaccaaaaaaccgctcttcacttcctttaaacgagtactcaattagtcaatttattgaaaaaacaaatccgaattttttttcttcttcctcaaattatgttttttttcttcttcttcctctccttgtcactttcttcttaaggtcaaaataatagaagtttttaaaaaaatgaagaagcttactctaaataataaaacaaaaccaccatctccatcattcttcttctacttctctctcgtcttttttatttctatttatttattttactttcaattttaatttgtaaagtctgaaggaaatgaaggtgtacgttagacttcacacagaggatcttcgctcatcggttttgtcacgcttcacgcgtttttccggtttttggtgggatgacgtggaaaccatgcatcgtcagcatgtttttaaaatgagctacttacttttcttctccattcacgagctaaagataaaaccactgcctgttacctagagttatataaccaattaaccatagctttttaattggtttgtcaccgccccagaataatctcaacatgcaccaaaacacagaatcggaaccgtctcgagtgggtttcgcttgatagcaactctcttttgtcatagctttgatttgagttatattcatcaaaattaattatcataaagtttaaagataattgagataattattataaagtcgagaaattgacgtttatgttcagtttttttcggtcgacaattccaacaaaaagacgattaggtaatacaaatatcctaagagactaaaataatgtgtatttaaattcggtaatggaaagaattcgaacaaaccttaccaaactttgtattttctgtcgctatgcttgtattattatattaaaagatagtgattcgtgatccatgacaatgttgtactactatataaaagtagtcataaattgcaaatgtataataatatttttttgaaaacgactactgttttgtattgcaaccagaccaaatccaaatgcatgcaaccgaacccatcaatgctttttgcagcggcattaacgaagctgctccactggctctctctcacatcataacacaaagccatttattttctcttcttctaatttacagttctaataaataagtaaagtcataatattaatatgatagtgcaaatactgtatatatacacgacaaattattaatttttagataattatatcctgtttcttaacataaacactgttgattcccaatgtcaaatcaatatttaaaaatttgttataagtcagtcactcaaaagacaatggtatgaaaaatgctgaaaacagacggtcaagatcttgtattcacgatgagatatattgttaggttaattttgatataaagcgaaataaaaagggaaaaaaggtagaaaagtctaagtgtacaattaggaaaaggacccacaagaatccataatctgactagaatgaatggaataagaagcatgtgggaccaactgaaagcgactaagcattgctatttgctattttatcagccgacgtcgctgcgacaaaaccccaaatggcagagccttattggacagaccatattgacttttatggtcctaaatgcagtgaattatctctcttcgacttggcgccaagcacttctgggccagaaataccgatgcggggctatacgaggataatgatctgtttcaaagcccataattaaagacctaggtttggcccattagtctatcttcttgatttaaaagaaggaagccaatttcttcttcatggacgtaaataaaaagaactggtaactaatgagatagtatcttactatcttcacaagtaaaagtcatatggtgaatccgaagaaagaatgtcgtattcatgagctatatctgagaagagtgaaaaacagagtcaaagtcaaagagtgatgagcaagctttaatagtacgaaagtagaagaaataaagaaataagagggtgaaatgggtaaattttggatttttaattaggaaatagtgcaaattgaccaaaattaaaaatctccactcttttcgcgtgtatcaaccaaaaaacaacatcaatgtcctttagttttaattaatctcgctgtttaattgggattagactaaaaaagttgcagagactagtacagcgttacttggggagaaagctgctactcacacaagtacctcccaaatctcttctcttacccacaaaaatcttctcttcaatattctccaagctctatcggaacactgcgttttttgtttttgttttccctccaaatttctcactcgaagcttttaatg

SEQ ID NO: 2135 - DNA, 506 bp, Unknown
  misc_feature (1)..( 506): cDNA_ID_3066102_gDNA_ID_1620492_Annot_ID_158641 3000 nt of promoter + ATG
actatccatccactagaccagtaaatgaaagagaaaaaaaaacatgaattttcaaatttgaaacattttaatccccaactttaaaaatatatggattaaatcattaagttttttttttttaacttagccatttaacatatgaccaccatccatttattttaacaaattaacataattatatagggtaaagaaatgcttttcttatttttgacattctaattctagggtaaacaaatacatttatatctaatttcaatatttaagatttttttttttaaataaaaaaaatgattgaatctggtttaaccaatttgaaccacaacccaacaatttatccggttcgatttggaaatagcaagtgtgggactgttatgaggtcatcacaatcaaagtaaattaattcctccgtgtgacctaaagagtgaccgttcccgttcactaccgccgcaaagtcttgtggctacagagcttagggtttaaactttcttcacgataattttccgatg

SEQ ID NO: 2136 - DNA, 3000 bp, Unknown
  misc_feature (1)..( 3000): cDNA_ID_2151342_gDNA_ID_1620492_Annot_ID_158646 3000 nt of promoter + ATG
tacaagctctactaacacatataaaggaagaaaacaacttaaaaattttggtttttttggaagaagacttaccaacaatcggttgccttatcctcgtttactactttatacactcaggtggtggtagaattcccaagttatgatctccttactttcacatgttttttggaggtggtgcactgccgtacgaagtggccccgctgcccacactctctataattatgattacccttaggataattgtccattacatggccaactttacgcactagccacgattgcttgaatccatcaaacaaaccctccatgattcctattattttggtacactttgggcaatggttatgacaatgtcattcatcagtgcatcacggttatcccatgcacgccgtaagttgtcagagtgttggtctcgtattactcaggtccgtttaagtcaatgtgaaaatcggttaacggtttatataattcaaattgataattttaaaaaaaatattttttaaagttcataaatgcaaaatgctagagtttgggttggaaaaaacatttgtttaggtttattttgaccttttttcctcgaccatagaggttttgaagaagcgttaataagttaattacgtgaccttataataatttatgacaattatggcctttttatgacaatatttgtttctaacgtattcacatgtagttcaaatatacaatacttattataaagacaaaagttgtcatttttaaatcacataatatcaagtcgtatcaacatcgtttagccaaactgtcttagtttttttaatcttctatttaataaatttgtatcgtacacaatcataatagcaaatttatatttaaattattatgtgacagccatagaataacaacttgatgataaataaattataatgcataattacatatgacaaagtttacattatcacaatagataaaaagatcatagagtttgcaaaatattttaagaatatttaaacaaaattttataaagaaaaacaatcttagatacttgaaaatcgcagtaaaagacgtatctctgcggctagaataaaatgattcggagctttaaaacatagaaactttacaaaagccaaaccgatcaggacaaaatccaaactgatcggtcttatacgtttttggtaccaacaggtacttgtccatgagaagctccaaaactctttactctaaatccaacaatccataggagttttcagtatctccattgtcttctctttacataggtttagtgaaagagtatgatctcgctgagggtgtatagatcacaattacactgtcgtctaccatgtagggtacaatgctctgtacatgcatggtggagtgcattgtagtgtaccatgttgcgtacagaccctgtagagcacactattatgtatcatgtagagtagattgttgtgtactatgtggagtacatcgtcatgtactctgtggagtagactatcatgtattatgtggagtagatcgtcgactaatctacgaaatacaccgtcatgtactctgcagcgtatgtacctggaacacactcttttgtaccatgcggtgtaaaccaacgaaaccaaggtcgaaagataaaattgtcgtgtgacatgagaagtagacagtcatgttccatgcatcgtataccatcatcatataccttgcatagtacaccctcatgtaccatgcttactacaatgtcatgtatcatgcgataatcctaccatgcgaaatacaccattttgtaccatgtggagtagaccgtcgtgtactatgcgatatacaccgccgtgtaacccgctaacataggtctgtactccaaagtgtacaagatcggtgtgaaatataagttgtacgatctttgtagcatattatatactaatatacagtgtacacataaaagaatacaccgcttcgtgtataagattagtgtggagtatatggtgtatgcatttttcttaatatacatcgttttctaagttttttcgtctttttaacttctcttaagttcttctaaccccatcacacccttcgtctaacccttttttttatcactgggaccaatcataaagaaagaaaacaaccaaaaaagttgattcctctagttcaattagattattcgaaatttagaaactaaagaaaacaattttctactcttagaactaaaatgtaaccgggactaaaatttactctaagagcctgtccaacgcgggactttaaacaagggctctaggttttataggattaaaattaaatcaaaatacctaatattggagagggacgccccttgtttaagaggtttaagcacttggaaggggccctgacgtgtcaacatctcagtggctgagctactttaacaaaataaaaaaatgtgtctctctctcttcctctgaaactattcggtttttctcgactggattatgagaaggaatgcagctgaatacatgatgacataaggagaggaactagttctagcttggcttggttttaagtttgtctgaaacaaacatacaatgtctctttggtctttaccattgttaatgatttattgttaaggccccaaaataggggtttaccattggaggaataaaaaaatagagtcttctcataaggctctgaactttgaattgtgcaaaatttataactaaaatattgtaaagagcccccatgttcttcctcttccatgtgaaagaacgattctattaatataaataacattaaaggcccgtgcgtagcgtgggtcaactactagttcattgtaaatagtagttatttgaacaagttcattaataatagcaaaattattataagcacgccacatcatatatacttttattttcagattattagaatgatgattgaccatcttccctttaaaattcacagccaagagacacatgacgatacacccaaaatcaaatcactaatattcacaaaacacttcaacacagtgagagagattgagctcaaaatttatccaaaaatcctaaaatg

SEQ ID NO: 2137 - DNA, 3000 bp, Unknown
  misc_feature (1)..( 3000): cDNA_ID_3066096_gDNA_ID_1620492_Annot_ID_158643 3000 nt of promoter + ATG
acttccaagactatgactatatgtgagtcttcaagcatctctcagtcacttggatgatgctcaaagcacctataaggttgtctatcagttttcaagcatctctgagtcaatcaaatgttacttaaagcacatttaatgttgtatgttggtccttattcctaagtcagccatgtattgctcaaaagtacctcacacatcttccatacaattgaatatacctcaagcatttctggagctatttgtcagatgctccagcaccttcttctatacgagcagtttttgcacacggcctttgcaagaccgttagtcggtcttcaaccaccctagtcaggtcattgcctaaagtacctcccatctttattgtcatttccgaaaacactttctagtcaatttgttaccactcaaggcacttctcatctcgtctttcactagttaaagcatttccaatgtaagtcgatgctcaaggcgtctctctatcagcccgacaacatccaagccgcctcctactaggaatcatggcaagctatctccatcatatgttgccaacaaaagtacactccacactccacactccaaaagtgttggtcttctactcttctttgctccttcgagaaatcaaataagttaatttcttcattatttcatggttgccgacatgactttccaaatacgtgtattaaccgcaataaataaatagttcttataaaaagtaagatgacgtgtcatgtattgctcatcaataaagtaacgctttttcattttatttccattgaccgacacaacaaacaacacgttctctctcatttttcttcttctccgatcaatctagggtttactctcaccggcgacgaacaatgatccacctcctttacacagtgatcttcgccgaaatggcactgatccttctcctcctcttcaaaactcctctccgaaagctaatcatcctcaccttcgatcgaatcaaacgtggccgtggtcccgtcgtcgtcaaaaccataggaaccaccgtattcgtcgttctcttgtcgagtatctacagtttggttaatatccaacgccgatctgaagatggtgctgttcttaatcccactgatcaagtccttgcgtctaagcatcttctcgaagcttctcttatgggtataaatcacaaaatcctcgatctcttaaatccttgatcataagatctgatatgaatttgatttgctttttgaagaattgtgatgtttctcttaaatcagtaattaaggatgtaattagatcaaattttgatccttagtgttgttcccttattcgatttccaaggaagtagatttattgggattaaggagtgtaatttaggtcaaattgggattagaagacgaattagatattgattgagattatatatttgaggaattgtgttgttcatctcttaaaatcagtaattaaggaggtatttagagcaaattgtgatccttattagttatgtagatctgattatatgaatctgatattggttattgaattttgtatattacagggtttgtgttgtttctctcgcttatgattgatagactacaccattacattagagagcttcgtttgttgaggaagacaatggagactgcaaagaagcagaacagaggttttgaggatgggaaaaccacaagtggggaggaagtgaaagcgctcggggaagagatcgcggcgttaaaagcgaagataaagacgttagaatcggagagtgaaagtaaaggcaaagaattgaaaggtgcacaaggtgaaacagaggctttgagaaagcaagctgatgggtttcttatggagtatgataggttgcttgaggataatcagaatttgaggaaccagttggagtctattgggcatagtcctgagggaaagaagggtatgtaagagtaaaaactaaggattctgttttgtagagaacaaagtaactataggaaatgtggttttactgatttttgcttcatgtaatatgcaatatcgtctcctcttttgaatgtattttactattatattgcaatctagtaagtttggaacaacatgattcacctaagttttccattagagaaaatgagtgcgaacaaagaggaaggaggtatggtaatgttttacaatcaagaacacaagaacaaaccctagatattcttgaggaattctcttattctcccactaatctgttttctctctttcatattaatactgttcaagtgccagtcacattatctctgatgatttaacctctcaaactaagcaacacagtccacaatgactcaaaaggattgaaacatgttttagtaagaaagcatgaagttttaataccttgcagaagttaaacaccaaatcaatctcacaaacattgctgaagaaatgatccaaaatctcaacgaacaaatggatgcatttaaggtaagccaactcattattcaacgggcatagcgtctatatatcaccttaatgtcttctaaactgcaaaacagttcaaaacaaaaagtcactaatacaagaaaatgattcaaatcccgaatcggctttgatttcttggatctcaaggcctacactagttgattttgttcaacaactattcctccaaaatctcagcctaagtatagaatgagaccaatatgatacatagagtacatagtgtaacgaccagacttttgaatcgaaccgtgaagcccaaaccgagctcattggtttcttatattgaattgtatattgttacttgtatttagtttttttttgtttaatattaaaacgtttaatagaaaccattaaatttaagttttgtaaaatatttatttgtgaaaaatttaattaccattaaatataacgttaattttatttgtatttttttttaaagttactttgtgattttgatatcctatataaaggttagataacttcatttttcaaataataaatacaaatcattttttcttccaatttgtttcgtaaaataaaaatatttcttgtatatttcaatcataagtagatatg

SEQ ID NO: 2138 - DNA, 3000 bp, Unknown
  misc_feature (1)..( 3000): cDNA_ID_2151571_gDNA_ID_1620493_Annot_ID_158660 3000 nt of promoter + ATG
gtgtaagttttttgagcttttggtttgcaagtgtggtgccaaaggaatgttttctttttggaaaaaaaagaaaaaaaatcaagtatagatgttctactttcttttgctcttatggtttagtgaattgaaactgaaaattacaagtgttcattggtctgaaatcttggtttgcatcactatgatgtctttaggtgtagcaattaaagggaaatgaattttaatatgttgcatcatgtctttaggaagatatagaaaacaagatagaagtcgcagatgctttggcgactaaacttttacagaggtttaaccactctgtttctgcaatgaggacaactgcccagcatttatctcaaggtaattattgtagcgtagattaagatagagatggatttgccactggactgcattatccactgatcttatatatgtggaacatatttctagttcatggtttgcaggtggagctcggggagcttaaaggaagattgacagaggtgatcagcaactgcgatacattatgtaagagaattaattctgagggacctgaatctctgaggtccacagtggcgcctttttctcttgcatctcccgattcggtcagtataaatactactacaactctgtcttctaaacccgaggcataagagtaaatactcttaatggtagttagattggtgaatcgaatacgtgtagttctacagcatactttctgatctcctctgattttgcatagatgcatgatgatgctattgattgatctttttgttacaaatcattgttttcttttgtcatttcatctttaggcttttcgatttgtacaatcgcttgtgaccagtaagaaaccattgttctgataaggggaaaattcatatgtaataaatatgctttgtttgccttttgatacaaaatccacaatggacgattggcagtgtatggagttgaacaacttgaaacaacgaaagagaacaacaacaaatgaaacaaaattacatttcaatgaaaaagcagataatgattactcttctttgccacctccccatatcaaggttgctgctgagcgtccatgtaaccagcgtcggcgagcactttctccctcttggccagctcaaggtcttcgtccaccatcatcttcaccagcttctcgaaccctacttttggcttccaccccaacatttcctttgccttgcttgcgtctcctttcagattgtcgacctccgtgggccggaagtaccttttgtcgatctcgacatggtctttccagttgagccccacgtacccgaaagacacgtccagaaactccttgacggtgtgtgattcctcagttgcaaccacatagtcatctggtttctcctgctgcagcatcagccacattgcttccacgtagtctcctgcgaaaccccagtctcttgaagcctgtatatttcccaggaagagcttggtctgcaatccgaccttgatccttcccaaggcccgagtgattttccgagtcacgaagttctcgcctctgcgaggtgactcgtggttgaagaggattccgttgcaggcgtacagaccgtaggcctctcggtaattgactgtgtaccaatgagcagcgcatttggacgcagcgtagggagatctcggatggaagggcgtggtctctgactgcggaggaggagttgacccgaacatctccgaagagccagcctggtagtacttgatggcgcggccattgtcaatgttgtgagatctgacagcctccaggagacgaagagctccagtagcgacaacgtcagcagtgtaatcagggatctcgaaggagacggcaacgtgggactgagcagcaaggttgtagacctcgtcaggcttgatgacgtcgagccaacggcggagggaggaggcatcagagagatcaccgtagtggagcttcatgagagctttgttgacgttgtggggatcaacgtagatatggttgagtcgctgagtgttaaaattggaggatcgtcggatgaggccgtgaacttcgtagcctttctcgagcaggaactcggtcaggtaagatccatcttggccagtgattccggtgaccagtgcaatcttcctcggcttcacaatgtcggaatcgccattgagagatctggaggccattgatgggtgggtgcagagtcagatcggatcagaagaaatgattgggcacgtcgcgctttctgtttttgattttagcgtcaactgattcgatgacttatatataataaagcccaaggacgaagaagacagagagagagggttacttctgtaaactttaaaggtgaatctgtatggctacgtaaagttgtacttgtatggcaaatcgccggcaagcgttgaccgattacgaatattttactatctattgggccaagatgggctttaaattactgctaattttattgggcttatatatatatatagctctacgggttgcgttcagactaaacatcattgtggactttagtaatttgccttaagttaacccatttagttatattatactcggccttataataaccattgatttttttttttccccacacgatctcaacttgcatgtcctatttattagattcaaaattcaaaaatgaaagcgtaaaaataaaaaacacgtaacgttaaaaggagtaattgtgaatattaaaagaatatgagtggtggaaattaaatcggtgaaagtaataaaaaaaacgattaggaatgggagccaatcagcgcctctctatttgatagtatttatttttctccactgggaaagtcaaaaagtcataaaaagtgtggttagggttttctctctctctgttctatctctcccacagaacacaaaacgtatcgccgacgcctctcttcttattcatatctgtctttctcattgtcgagtttggtctaacatctgatttctcgtttcgtatagaatctgagaaagtggttagtgaatagactttagaaagagtttgcgattgaatttttgtaagagaaatagtaatgatg

SEQ ID NO: 2139 - DNA, 3000 bp, Unknown
  misc_feature (1)..( 3000): cDNA_ID_2151611_gDNA_ID_1620493_Annot_ID_158672 3000 nt of promoter + ATG
atttcagttgtttcagaatatcaaactacagacaaagtaaaaaactgaagatagttcatggatttttccaaaaggatatggagagttgactaataagaagaggggcactatagtcatttcctagtggaaatacccactgttgtgtaaaagagagaatacatttaatgaaagtgaggttgtaaaaaatacatgtatttatgaaatggatgaaagttattgttgacataaacaatcagcaaaatcatctatccaacctcttcaccgtattgtaaacaatgttaatgtgtatctatgaaatagagtataaaagacaactttaaatttgatctagaagctgtaaatttcagaaatcaatttggatgttttaatggttttcttgttatgacaatcttaatgtatgtgagggtttgtactttgttgaatgcaaaaattatgagtgactgaaatagaggagaagaaaattggggatagagttcgatgaatatatgcaatcatttaggaccgagaaattaagagagggagtgggcaaaagggacagtgacattctctcggattttattcttgtatataactaaattacaaatccataaattccaaatgtattggtaacatcgattatctttgcaaatagcaacaaactcgcataatgaaagactcaccatgagccaaaactattaaatttcttttattttggagtttgaatcttgaaattagtacaaatagaatagtcttttttttccaaaagaaaaggtttaaagtatcttctcgagcactgtgttcttcttttctttaagttttcagtgtcataatttatacaaatttaggtaaagttactaacattttcttaactatttaaccttccatttcatgtcctagcaatttttctaaaaacgttgaaattgtttccactaccttttctgccaaatatctgcacttcaaacgcatctagtcatctaccattctacttgaccccggtaccatcttttggagatttagaatgtatgttatgcccattatcaataagaaaacatggaaatgtggaaagaactttataaactagagaataaagaaaagtaagtttggagcatagtgtttgttggcttctaaatatcacttgtacacaattacacattattaccaataaagagaaaatcacttcttaatatatatttttcttacataggcagaaagagaagagtgtttactacaaaagaagcacgcactgatttgtttttttcactttcacccattcattgctcttctacactcttttaaatctctccttttctcttcaactttgaaactgaaaaaggacataaaagatttggtgggttatgtttcttttctttggagccaataacggagcttagagattcttgcaacttttttcccccttgcatcctcctttactcaatagtaatttatgtgtattctgtatctcttcacaaaataataaacaaagactgtctttcaccacaaaatctcttgagaagctgcaaagttgggtaaaacttaaatgaaatgtacacttttttatatactacatatccgttttcagaaatagatttcataaactatgtgttccatatggatcccatttcaccttcaaaggccccctttacatttatgtatattaatgattatatgtttctcattgctcaagagaagattgcatcattgaataaaggaagaaagaaaaaacatagagagtgatttggttcatgtgggtcccaaggaagtggagtcatggttcctccaaatgccatgctcatgctcatgctcatgcacatgcagagacgcgtatagtctttctaagctgatatatcaactgagttattagatgcgacaaaatctacttatataatccactcgacttactttaacccaaaatttcactaaaacaaacgtgaatcacataacaaactcgcaaaactcaaccaaaacagttttgctgttgtatgttgaaaaatggcaagatataactaagttgatagatcgggtgctcatgggttattgaaaatcccccacactagaaacgaagggtggtatcaaagttatagtatagaggctgctgtaaaaaaagtggaccactatttttcacgcctaattttcttaattactctattattgttaattccgaagttacaaaccctaaattataaggctagcctttatatttatagcatgttcttctgaagctgatacagttttcaacacatgtatccatcataggagaaataaaaacaccaaaagaaactgaatcgaattgtgacgctttttcatgtgataatacacattattttgttttttgtgtgtgtttattttgcttaattttaacattttcatatgagtaccatagggaattaatcaagaaaagagtggtgtgtgactgaggtgatataatgtaaagtagagagtgttgacagatgtcatgataatgaaaaaatcaactgaaagatatatatgtttacacaataaatcaaaatttggatggaagggacaaaaggaagcatatataccgtccgatcatgtagaaaagagatagcaattacaccgacgagaatagtaacttggcaacgtcatgctttcttttcaagattatatgaattttcaaactttatgttcttccaaataattagacgacttcatggctctcacgttaccatttgagtacgtagtccactagcgtggtccaaaattctatatccatcattttttgttctttttcttttattttacaatcaatcaatctatggatgtacatataagtaaaagtctacgccaattggatgattaagaattaagataagcgtcgtgaagaaataaaaaataattgggccttgggctaaaggaatatttgagaagcatataaacaattggcccacaaggccacaaggatctccttcaaacgctcggaagtttccgctttggattcctgtcaccggcgatttcgtgggatgataacgacgccgagctatatttcgtgactgaagcaaagtg

SEQ ID NO: 2140 - DNA, 3000 bp, Unknown
  misc_feature (1)..( 3000): cDNA_ID_3066136_gDNA_ID_1620493_Annot_ID_158664 3000 nt of promoter + ATG
tatttattacagatgtaaactggaataataagaaaagtcatcgatattgaaacagtatctgtcaaattcaaatgaacagtaatagtctaatagataatggtatcaactttcaaaatggaatcatgtagtcatattaagtacttaactatgatatttagaaatcagttcactgtttaaatgaacattagcacattattttctaaaagttttttttttttttttaaggtggtatctttgttattctggttgagttcttttatactaaggagaaaaaatggagtagagacaagccagtgtaccgaactcgcctaacttgttgactttagaagaatcgtacgacgtcaacgtgttttcggctttttcattcccaacggcttactttcgttggcacaccataatgggccttagcactaacccatcaacggaactatcaataatgggaggaggtgcttctgtaggccaactgtgtttttctggaacggctcaacgttgttgctgtaaatggcagggtaaaaaaaagccaacaaaaataactccgttacttttctactttcttttgattcacaaattcgttccatggacttaccattttgtgccattttccctctttgaacggcacactatttcttccgtttgttttgactcttttgggatgtgtgttttgcgattctctaatttcgtttatagaaaaaggaccgagtggctgggtctcatctgtgatctgtcggtgtactaaggcctatcttgtgggcttaattattaaaatatgggctttaatgagaagagccgacccatttgtgacgaggccctaaggtagaaaaaaaaagagagtaaaaggaagtagaagcgttgacttgtccgcatcatcatgtgacatctcataattgagagactgttaggttttgtccacatccacatcatgtgcatggccctctaatttattacatgtctatatctcccaaagatccactttgacgttaattttgtagtgtatatagtgtacactgtcacggaattatagaacgattttttcttttttaaaaagaatacccatcatgtaattaataaataatacaaattattgcattgctttcaatattaaacgatacaaaaaacacaagtctcttcaatacttcaactaccgaccacgatatagattagtattcatgcatgaaccaacatctgtatccaataaatcctaacttgaattaccctggtttagactctttttgtcaaaacaattgataaaacaacgaggcattaaaaaaaaaaaaattcaagtaactttcttaaactagtttggaaaaatgaaacccgtcattgttacattataatgcaaatgttaaagtgggcatcaaagctcttctttatgtaaatgtacttagggtgtaagtaagtaaaagagaagtgcacatgcattgcctcagcgatatagcattatttaaaggcacaaaaacggaacacccatgtgctgtgtgttttctgtttttctttttaaatttgtgtgtataattttttgtaagaaattattagtattaattataaggctataaatccttaacgatagataaatgaaaggaaaagtaatgttagttggtagaagaatcaagaatgaatcatattgcttgcaaaagcatattacaagtttcattgtgattgtgatgtgctactaagatcatcgataggtgattaggtcaagtagaaatgatgtaaattgccaatgagtcggtacaggaaaacgatgagctaattaatctgaggtaaatgttttggaaaaacaaaaatatttggttggaaaaagtttgggaatgtattaaacagatacagcgaaaggttgaaagatgcctagttaatggcagataggggtaaaaaggttgaaagatgcctagttaatggcaggtaggtacaaaataaataatatgagctttctttagcgcggcagtttccaagtcggagaaggctaataataataaatggaatgagagagcagagggaaggaggattttgccagattgcaaaaatctcacaacgatgacggtgcagaaaacgccattaacaacgattacaagagctgttgtgcatttccgattattgaaaggctgatttgtccacgaagagagagagagatactaggagaaattcgtcgcttcccctggatctccttcttggggtttatactttatagggcatccggagctacgcacgtcctctgaggtatgaaatttgtttgaatgccggctaattttacgcttccggatgtgtaatcgtcgaatttgaaggtccattgtgagtcattgtcccttttttataaatgattatcggctatcctcctctcctcacccaagcttagaggttcatgctatagcaaatgcatgtcacaatttccagatgattctgttttttattaaggggctaaatgtaatttggattgttgttgtttggaagcaggtaggtaggtgtctttgaaacaaggacgaataattcactgcacatgtgattccttgagagagccagatcgaactttctacagaagaggctgtgatatatcatcttcttaagtcctcccctcttcttcttcttcttctaaggtaattattcatttcattcattagtttttgttttgttttctagcaaatgcaattataatatttatagcctcttaattaggcaattgtaatttatgtaacaacactttgacagactgctcttataggggaccaattatctccatataactccaattcctctcctccttatatctttttttattatttgagcttgtgtttgtctctatctcagacacttctatgactaaggaatcttggttttctgactttgctttggaatttgactggactttccagctgcaatcattgacttgttgattacaattattcgtgtttgtctctcatattacagactttgcctctatctctctctctatatatatataatgttgttgtcattgtttcctttgtggtagaggtagggtagaagatg

SEQ ID NO: 2141 - DNA, 3000 bp, Unknown
  misc_feature (1)..( 3000): cDNA_ID_3594375_gDNA_ID_1620493_Annot_ID_158666 3000 nt of promoter + ATG
aatatgatttgggcccattttgtaggctggtggcccagttgatgattaggtcatatgaacagaacaatctcataaccaacaatatcgagctatgagaattctatatgcagattgcttgggctttacatgttgggtcatatttatagagcccatatgatacgataaacaaatgaaagtgatctcgtaggcccgtcttcaaaatgaaaacaacctaacaattaggctgtacaaatagaaaatgacaaaacaaaaggggtgttccttcataaaggaaatggcgccaccattcattcattcatttgggtttcatcaaaagtcaacactatgagtagatgacaacctcctctaatgtctcatacagtatattcttagttttcactttcggtacgtctttttagatagttttgattcctcaaactcgtttcatatacaaaagacaaataaaatttgcttttcttttatatttgaaaaaaaaaatcgtaatgcaagaaggtgagatagtttgaatagtctaccacggtcagtatgtgacaaaattgaatgattttcattttcccgctccaaggtttcgaatttgatatgttgtctcctttgctttctatgtcttaatgcataaaaccaaacaagtgtttcttatttacattaacaaatcgctgtcaattttgttttttctctatttttaatgaacaaattcatatcattggtggtacgatccattccatagaaaaaaatgggagatggaagattcaaaagtggctaacaattctcgtgggactttttagctcctctctctcacactctctgtcatagcttctcttactattcttcttcttcttcttcttcttcttaatttgacatttcaaaatttaaaagaaaaaaaaagtacaacaaacataaagaccccatatcaagaaacgcagctttgccgacggatacgtcgaggctagttttgtcatttaatatttagcattgttacaaaatatttatcttctcagattatccatttcattgacagaattagagtgatttatgaatatacgtgttttaatttaggcaagagtgtgatgattttccaccctaaataattgtgaaaacaaaacatcaatggattagccgtcggggaattctgattggtcgactcacgtcaaatgcatgagatacagccaaacagagcacggcacgtcagcattacacgtggctactacttctcaagccggcggctcggctccgaagaccttttccactttttttttttttttttttttatctcacctaaatttaaaactttcctaggattgcattttaatcctttaagattgagacaaaaatgtttaaaaatatttgtatgcacattttggaaataaagtatagccaattcattttgatgtataattacaacgatgcctttgtttggaagtcataatcatcacgcattttccaaatataggggggagatttccattgctctaaaattcaacagttttaaacaacatgcagattctgtatatgatacaaataaatgcaaaatgccaaaactattgttcaaccaaacaaacaattaaaattaaaggctaagcaatagtaatatttactccgaattggataatgctaactaataaaattttatccaccaactcaactaatagttaccaaaagattagaagagaatctacacaatttgaataataaggcagaaatttgtagaaagaagaaaagagaatctccaaagatatttttcttttatctattttgtctgaatggatattttttattttattttgtaaaatgaagaataatgttttttaatttgaaaggtttgaaggataatgtgagtgagggagaatcattttctcgtggtgtgttagaaggacaaaagctggcccgccatttgtcttcggtttctgcatcatctcagttcctcactttgcctttactccgaagacatgcttttctccattattactctttagggttattttcgttatttcaccttaatccaaattcacactgcttagtgctgcttacaataaaaatactttagtgttggggacatttaacttttttattctaaataaagcgttttaacttaaagatgtgaaatcaaaaaccaatgagcgggaagtattaatttcccaagatgagcggctaccaatgcggtcaagggcaaattaggaaagacacgtaactttttatttttatttttaaaaccaaatctttgaaaaataaaagaaaacgagtgaatatgattttaattcgaagctttaggaaagaaatactctgatgatgactgatgaagatcttattttatctctgtaattgaacagtgccgtttttttctactgatacataaaatttatagatttattgtcagttatttcctatcttaaaaaaaaaacactttttttttggttgcccttttttatgttttaaaagaaagaaagagagagagtaaaaagcgtttcttctagagataagaaaaagaggagtttttagtagccaagggagaggctgagattaccaaattgaatgctttaccaaactcacataaccatctcttcttgacccttttctttaatctttaatctctttcttcttcttcttcttcttcttcttctcgccaccgctccttcctccctccttctctctgtatcaggtactttttcctaattcctgtccaattttagggttttcttttaagggtttcgtatgtctcttttcatgttcttttgaatttgcttcgttcgttgcgttttcatttcagtctcgtgactgactctgtttgtgggtcgttttcgtaattgagtttccccggtcgtcttttttttttggggttcgtgattttttttattccttctctctctcttggaattgcgaaaaagaggaacgtttttttttacgtttcgtttgaaaaagaatgtgaataaattggacataagtattgaattctttttttcattttttttctggttgttgtttagtttttttctcgataggaaaatg

SEQ ID NO: 2142 - DNA, 3000 bp, Unknown
  misc_feature (1)..( 3000): cDNA_ID_2992143_gDNA_ID_1620494_Annot_ID_158682 3000 nt of promoter + ATG
atcacaaaaggaaggggaagctagtcagcagcatgagatccctgctgggacttaccatcacccagaagcatcaacagtttccaatactacaaagtccatgcaaccagatatgcaggcagttagtgttgctcaatctcataccgagacagctggctatcctacaccggcacatggtgaagcttcacaaccacctgctggagcaattggttacacacaccaacctcaaagtgtagcgggtaattatagcacgcattcacagcctgggaatgtggaagaaagtacacaatcatatgctggaacagatagttactcacaacagcaatattatgcagctatggggcctactactcaactccatgctggtggatatattcaaaaacctcatgaaattgggtactctcagcaacctcatgatgcggcaaccgggtactctcagcaacctcatgatgcagcaaccgggtactctcagcaacctcatgatgcagcaaccgggtactctcagcaacctcatgccgcatcaaccgggtactctcagcaaacctatgctgcagcaaccgggtacactcagcaaccccatgcggcggcagccgggtacactcagcaaccccatgcggcggcaaccgggtattctcagcaaccccatgctgcagctaccgcgcacgctcagcaaccctatgctgcagcgaccgcgcacgctcagcaactccatgctgtagctactgggtatgctctgcaactccatgctgcagctaccgggtacgctcagcaaccccatgctgccgcaactgggtatgctttgcaaccacatgctcaagctgttgaatacacaatgcaaccacatgctcaagctgttggctacatgccgcaataccatgctcacgctgttgtatacagtcaacaaggtgtgacgcaaggttctgtaccaagggctcctgggacaactgattgtaatgctgcaaaccaggcatattctgcaacaggagattggaatgcagtgcatcagtcttattaccctcagacagcagatgcaaccacaacgtattatcaaacatcttaaaacgttaaagcaaagtgttgctactctggtatgccaaagaggattctgttaagtctcgtgtatttaaagcattgtttcggttcaggtgagaaacgatttgctgaaaacctatttgcattggtattgcaggatctgagaaacttgtgcgtgatgggtgcggaagcatggactcgaactggtgcactcagtggaaaagaaggtcaaggacataaaactagagtctccagctccgtttactgtaagtttaaaagttctatgttacggtttgatcatattcatttctgagctgcgcatgaggaaattcctcaaaccatcaaaacttctttaagtcccgtttcaggagtgcaatctgaaatgcaattctgattgggatttaaagttaataaaacatattataactctgttatcattacttatgctaaaacatttcttttagtatggtcatgtttaatacttgggatttgctattaagaatactaccttcaaaaaggttcatcttaaacactctctcaaacgaaacctagggaccaagaatatgcttattggctctaagattaagtggcctaaaccctaagccatatctattggtagacaaaaaagaaaagaaaagactcctaagtctcccactatgtatgtttgagcacttgcactgcaattcacatgttctttgttttttctctttctctttcaaaaaaactttttatctatttctttcttctccaataaaaaagattttaaaagacacctatctcactctttccacctactttgttttgtttgctacagaatttacttaaggctctggtcttgccctcttgtttctttttttttgggtcaagggtcccgtatgtttacagctttgttggttgtgtcacagatcatcaaaatattattgacgaaggaaaaaatactgaaattgggaaaaacatgatcagatccaactctctgaattgtctcgaggtctttttaattggaattgaaaaatgcaaattttcctgataaatttggagttaacgttggcttctttcaatagatgtctattatattatctttatccactttttgaaagttatagtccccatctatcatcatttactgatatgatctgtgggatttttttctacaaaatttctgagttgtgtgaaccttacgatttgtgttaaagataaacaaagtatgacctccatggtaataaactactaattatctttgtaaaatgttctcacgtgaaactctctcactatttcctattgctcactttatgtccccatagcaacaacgacttgtactcgtctgaaaatttctcaaatttcatgtaaataataataataaaaaaattattacaattcttcgctaaaagcatcacagatccagttggcaaaaagaattatatatatactattagtgcattgcaaataaaattattaaagaccaactgtttgtcatataaaatattataaaggatttcatagataatatgtatttgatataacaattataatcgataacaatattctgatattgtaagctggaaagattatgtcacagaagttaattgctctaattaaatatgtctgaggttaatctgatattgaccaacacgtcgtttactacaataaatacaaaaaaaaaaaagagagcgaatttctcagaaaacagcttaacgtttcttggatatttcgtaagtcaatattaatcaaatgaaaacaaacaaaaaaaacctatataagaaggagacgctgtaaaacagagcgagtcaattaaaagaaaagaaaaagcgcgacttagacaagtgggtcccatttactgctctcccagattatcattttcttctgaatcttcttcttcttccgaaattcctcacaaaaaaatgtttgtctctgttgttcgatccaggtacttttgaatccgcagttttttttgttgggaaatcaaaaattatg

SEQ ID NO: 2143 - DNA, 3000 bp, Unknown
  misc_feature (1)..( 3000): cDNA_ID_2151461_gDNA_ID_1620494_Annot_ID_158685 3000 nt of promoter + ATG
accgatatcacttaggtttatccgatatatcttatgtaaaatatttttcagagaagcaaatagagaaattagaacttcaaagacctttttgcttctatctctcctcttctttgattgtggcttctcctttgattgtggcttctccttcgattgtagcttctccttctccaactcgtttaaaagatctgcttctgctgcatctgacttggctttggattccatattcacaatttcgttctggatgagaagagacataataacatatgagaaacaatttaaaggcaaaatttgacggataataaaatctctctgtatataacagtttcaaaccaaccagcaagaaaggtttaagcagttgaaggatataagtgcggttgtcaaaagcagaaagccttgtgaggttgtttagcaaactcatccttgaattatcaatcagcaagatctttgtatccattaaaagaacctgcaagtcatatagacacttttagatggacaatttcatgttattctgttgttaatgaatattaaaagatgaaccttttgggtgaccactgatttcagaaggtctatggcctgcaacactttatcgtcactgagacttttgtgctcacgtataaaattcaagcaatcttctaaatcgaggaaatcaagtgttggatgcaatgctccttcgaaaacatcccgtactgcacacacgaataattttgtagttagggaattttcggggactctctcttcacacacatcgcatagaagagatgcatatctgctccattgatcttccggcagattccttctcctttcattttctctcacacacatgttctcgacatcagtaagagctgcatcatagtccacgacctgtaatttctttgcatatttgtttcccagagtcctacaggtgaacttaacagctttcagaacagccaaccagatatcaagattgtgttccctgataggtctgggaaaggtcttatctactgaattgtagtcagttaaccaggatatgatatcatctccatgaactggtgtcttggcgtagtgaacactgggatcaaaaacattgatcgtcccttcatcatcatcgaattgatcatcattgattttcagcagtcttttatctagaagcagaaatgaaaactgagggtcaaagtcgatcttttctttaactcgagtacgacccaagacactgtccactgctctgcaaacaagatctgtaccatcattccttttacatttgatgtggtttagaaactcaaggatttgagtgagttcctgactttctagaaaacagatactatgaggtgtttctactaagcgagaatcgacaagactctgttcagaaacttcaagttttccaagatgcttagctggaaaacacatcatccagtctcgaatgctacaagagagaattttaaggtcgcaaaaagagacaaggagcaatttgatttccttgagtaacttactgcgctcttcatccacagctaaaggccattctttggaccatccattcttagctttagatgcaaacgctttcacatctgcgagctggttcttgatcatttcagtggcagcgactgcatccactggttcccaacttccaactattatcttacgaacccagtcttttcctatcctcttgactatatccttttctgaagaaggtttgaaatctgcagcatgttgttgttcaagatgattcttacattcttcagcactagagaacttcctcgaacacaaagttcggcatatccagaatttccattctctgtcttcctttgccgaagtgagaaccttctctaaaacttctcgttcctctttgtaatgtcctactccctcaacaaaacttgtaagctttgcaatgcttactttcataaaatcccttttgatcttgacatccaatcccacccagtacgacctcaatcctttaaacgcatcctcacgcgggtcttgacttttctttgactccacaacttttggtttagtgttttttacagtagaaccaactagagtcttggaagatgcgatctcggactctgcgtcattgattaaactcaacagtgctttattttttttgtccaattctctttgcgcttgcaaactcagttgagcaacagaatctgacttgcttgggagagagttaacagataaaccttgtttcgctttcttcaaagacttcttgtaatacaatactgacccaagcatttggcccaacaggaagagtgaactagcacaaattggtgataacgtaccatcttccgagaagcattcagcagaagccaaaaagtaagcaaatttcacgtcaggatcctctgttttcttcgctaggtcatcaaacattttaccttctctgatatgaagacgccatgcggttatatcttccccatggactaaaatcaaatcttcaattatctccaaagccttgatgtgatctccattatcaaagagtttttgagcatcttcaaggagttgtgctccctcatcatcttccatgaaagaagaatccatagtaaacgaaacgattctcaagattcttttgctttctttttctctagggtttttcttcttcggagagaaatctgaatcgcgagaagaagcagagtcgacgcggggaaactcaaacgaaagtaactgactaatgacagcaaggcaccgtatcatcacgtgaaagacacgtgacaaggcttgatagcaaaacagagacacaattttgatcattggggaattctatcaaacaccttgtgtgcattacccgtttgagaatttcccggaataaatcatcaaaataatgagtgaaaatcttcaaatctagctcaataattgaatctagaatcgtcttcatgttgggtatgaacaaaaattcgaacttgaaaagatcagcaacaagagagagattcgacaaatcaagtgaaagaaataaaaaagtttttttcatttatttactccactaccactaataaagataaatactaaagctttggtttgagacaaaaaaaaatg

SEQ ID NO: 2144 - DNA, 3000 bp, Unknown
  misc_feature (1)..( 3000): cDNA_ID_3066165_gDNA_ID_1620494_Annot_ID_158688 3000 nt of promoter + ATG
atgagcttaaccgaacattctaaattggtgggttaccgagcattttaatcggattaaaccgacttgaactggtatgatgaaaaccttcattgaaggaattggacacgttgcttacgagggggaaaccaaaacgttactccagttaaataatggcagaagtattttttgattgaatgtgatcattatttaaatgatactactataaaatgtgtaaaagaaacttgtaatgaagccaaacaaggccaaacagaatcattacgaagtggaagtataaaatgacgtaaggtctgaccaaccggtttctatatatctcagattttcaaaaatggtttttgtttcatccaatactaaaggcagtgtacttaaattcaatggaataaaagattgcattgtccgacggagatcccaacacaaaacacttgatgaatctttaagctaaacaagtaaacatttatatactctatagagtagaatacataaatagtaagtaacatttaatatggatcacataaactaattcaaagataagaagctgcagtttttgtaaaatacattcacagacgagatatcgtacacgacactcaccttcagccacatttcacggccgattggctagctacgtgaatgcatttccattctattcctttttttttttttcttcctatttttgcatgttaacttgagacaaaaagatgaatacatgcattaatgttggataactattttttttatagtccaataccagtctccgatatttataccatcttttaaaaacgttttattttagatcatcttttgatatttccattaagtagttcgaacctagtcatgctaaatctgataatatggagagatttaaccatcaaacaaatcaacttcacttgaagtcttcaatagatgctagctgattattattagtatttagtagtttatttttgttatggcgccattcattagattgtactacaaacttgtaagaatataaaagtgagacttgacttgagaggtagggaaaacaacaaaacaagaatgataaagacagtgaatatagaagtaaaagcaatgattcaatctcgtcaataataaaaaaaaactaatgaatgaaaatagcgtttataagatataatcttgaatcaaccaaccaaacattatctacaaagattattcaatgaccagatgaagatttatttctcggtaacttatttagcaacataagtatcttttttttttttggaacaaacataagatctatttatatctcaaacaaatgtgaccatatataattgttataataagatttctttttgggtttaaaaaataaaatcacattttcaaattttatttttgcaaagagtaaagaaaccttaaaacaactagtaccaaacatctttcttaaactctaactaatataggattaatgttctttttgcatttaaaatcatgtacgagactaaaacataagcaaaaatgtgtcaactaaaaatgtcaactatatcaataacattaaaacaaccttttaatactattttcttccataatactaagatttgaaattctaactttaatttgtgcaagtaaagttttgtagataaagcaaatgaatcacatgtttaaaaagaaaaccaaatggtccattgttttcatagccggctactttggttattagccgggactcgacgacttgccgtcgagactctcgtgtgagtccgtaattatttattcttcaactaaaatcaataaactattgagttataatcataatcgaatggtccagattcaagctcataccataccactaaatccatggtacatacaacgtagcagagtccttctctccttccttccctcttttgttttttcctctccctctcattttttttgttctctaaaccaactaaccgcaaaaaccaaaaaaaccccccaaaaaaataaaaatctctctctcctctccgtttctctctctgtcggagggagtgccggaatcgcgcgtcgacgggaagaatatcgccggaaaagctcaaaaatcatcgccggtcgcacgaattattcgttggaaacaacgcgtcgtgagaggaggggaaattcgaaaagagaaagaaaaaaaattgaaaacgccgattcactttttttatatatataatataaaaaatttcttttacggaattaaatattctgtgatggatgcgattggatagaaggaaacaaaaaggaaaggaggaagataaaagagagaagaaggaattattctcttctctcttctctttcatctctgtctacatcgctgtttttttttttcttcaaggatcgtgatacctgaagaagaagaaggtaaaaaataagagttaacgagatccactgtttgttgaaaatctggtttgaatttgtttaagaggaagcataattgtgtttgtttgtgattaggtaagttttcttatttttttggtagctggtggtgattagggtttttatttttatggtttaataatttggaaatggtttaattccgtgccgaatttgtgaattaggtaagagttggttcgctgtttgattataatgagctgcacaaggatccggtattaggcgaattctactcttattgcttctggatgtacctaatcgtctcttctagatatttctatgagcttaaaatgcagcgatttgatatgttttgcctctctagtggttgaagttgctaactttgttttatccttggacttcgcgtaattctagtagaaatcttctgtttctctacttttgtagttcttttgcttgatttttttggcttgtacgtgagtaattgagcacttttatgtgtcgtttttgcaagatcttcctcgcaattgagaaatgcattttgtttatgtagacactggttttgacttgaccacttttttttttttttttcaggttttttcaggggaagtgatatggttcgttgaaataagtttaaagttttaaaagattttgattctggttttattagtcaaattttgtaagatg

SEQ ID NO: 2145 - DNA, 3000 bp, Unknown
  misc_feature (1)..( 3000): cDNA_ID_3066159_gDNA_ID_1620494_Annot_ID_158690 3000 nt of promoter + ATG
tctgtgaatgtattttacaaaaactgcagcttcttatctttgaattagtttatgtgatccatattaaatgttacttactatttatgtattctactctatagagtatataaatgtttacttgtttagcttaaagattcatcaagtgttttgtgttgggatctccgtcggacaatgcaatcttttattccattgaatttaagtacactgcctttagtattggatgaaacaaaaaccatttttgaaaatctgagatatatagaaaccggttggtcagaccttacgtcattttatacttccacttcgtaatgattctgtttggccttgtttggcttcattacaagtttcttttacacattttatagtagtatcatttaaataatgatcacattcaatcaaaaaatacttctgccattatttaactggagtaacgttttggtttccccctcgtaagcaacgtgtccaattccttcaatgaaggttttcatcataccagttcaagtcggtttaatccgattaaaatgctcggtaacccaccaatttagaatgttcggttaagctcatagggctaagtatggcaaaatttaacgagaattctcaaacaagatcgaaactgaattcaaatatttatattgtaaaacgaaaatttacttaaaaacaattagatcaatccaactagtcacaacattcatatttctagcttaaatttcttttggcaaatatcaagaagtggtgatctagtagtagatcatatatagtcctttttgaaaagggttgaaacattgtatttataatttgatatttgttttaaaaggattactttactgtaactttaatttccgtttaaaagattgtgtggactccattcaaaagatttcaaataacaaaaaattgcttcttttagttcgattatgcttgcttactaaataatacaactagacaattagttagaacgtaaatccaaacttattaggggcttaaggccaatccaaaaacgaaaaataatggaaattaacaaaataaaataaaagtggtccaataatgtttcttaaaatagttagagttagaaaatctcaagaacaggattagagaaaatttctattctagtattagtcggccaagccaagctgagctgacaaaaaataagccgagcgtgagagtggcgtgagagagagggtcactgtccgctattttaaatgctgggcgctgcgtgaaggattagaaaagcatttattcttaaaagatgctcttctcaacgtaatccacgtgtcaacttaccattagtttacacatcaaaagctgaccagcaaatcccaggatgggctgtgatcacctacttactcctccatctaaaatctctgtgcaccttttctcccacgagccgttggattcatccaaattacgtgtgcaacactcacttttaagacgatgttagccgtatttaaccgaacctaaccggcgctgaaccgtcttccagttttgctaatcaacaagcgagatttgattatataattaaaaagcctttgttatagacttagtagtgtcacgctggtctcacatgcctattgcctacatgcttggaagtttgaaaatctttaatcatttatttatatgatacttaagttaacatctaaagatattcaaaacttgagaatgaaatcattgctaagagaataatttattttctgaaatactattcttactatgttaaatattttaattctttcaagtacattgtaatgctactagatactttgcctagcaaaatagttttatattttatctgttgtaaattgtatcaatatacactaactttcattaagaattacagacataaataaacacaccaaattttagtttttgagagtcaaactatatatgaaatatcgctgcagtggaaattgtataatatttgatttaaccggcttgaatgattcagaactaataccatggaaatataaatagtataagagagacttcacgtgctaaatcttgaagaagacgattggacagaacaataagacagaagcaataaccaatggaattatggaacatcatataataaacttttttaataatcatttggataattaaacaaatagtattataatcatttttgaattatttggttgttaatatggtccacgcggtctcttctccagatcccgttatctgttctaagatttccgtcggtctatttatttattatctttaattttcagtatcaattaataccttaacataaattattattccatgctattttcctaatttctacaataattgataacaaatcttatggtttaaattaaagctgactttataattattacgtcaaatgtataaggtttaccaaccacttatctatatgtgttgaaaatattaaacagctaataagtctacggatatgtgtagtttttgcctttctagtattatcaaaggtggatatgtatagttttaagatgagtacatataagttcatataaatttatgtagttgtgtttttacatgattgtaaactttttgtatacttctaaacaatttttccaaaaaataagtatatcccaaaataaattcgttgcgcaaatggaaaataagcccgagaggctgacattaaatgggcctggtcctaagaggcccatatatacccagattaatctggacttgcttaccaaaaccccaaaacctcaaatttcttcgtcacccacccgtttcgtttctaagtctctcgtccttttcttttaaccacactccttgcttgagattcaatcgaaaactgaaattcgcaagcctccactgctcgccgtcgcactcatcggaatattccattggcaccgtactaccctgaaatcatctcatcagatcaaaagtatggaattagttgagctcaatttctattgtttggtttttatgaatccctcaatttaaatatcgcgtggtgatttatttttcttcttttggtgtgtttcttcagcgggagtttaactagaattgcgtggatta

SEQ ID NO: 2146 - DNA, 3000 bp, Unknown
  misc_feature (1)..( 3000): cDNA_ID_3066169_gDNA_ID_1620494_Annot_ID_158687 3000 nt of promoter + ATG
tagaagcaaaaaggtctttgaagttctaatttctctatttgcttctctgaaaaatattttacataagatatatcggataaacctaagtgatatcggttttaagttctcggaacaagtcaataacgtcttcctatcttatagggatatcatatcttctatgtagatatcgtttccttacttgtaggattccatggtttgtgtatatactacttgtgagattgattgatcttcttggcgaaacagaaaccttcaacgagcatatctagttcccttgataagactgttgaacagtaagtacctcaatggccagtttcgcatgttataaattgttttcgcgttttctctgaccaaaacgttttcttacatgtacagtaaaccttctgtcaaccttaaaccggagagtacatcttcatcactaagaacgatcgaagaaggttctatggaaccagaagatgctcttgcaagtgagacgggtcaattgaaaatttcatccaaaactgaaattcaagtggaagctactaaagatgaccctggtagttaaaagcttctcgatttgagcaataatttgaattatattcttgtgaggttcataacttcttatttctttcattgaccattttaaagatatgcgaaacatgcctggagaagattcactgtcggaacatttggagtcagtagctggagaagctacaaccagatacaattcagcatttgacatgacgctgaaggtaaagcaattatcaatcaaaacaagattcaatacctgaactctcatcttttgattccttattctttttgagaagttcacaaaaacatgtggtattgcaggccctcttgaacattaaggttctcaaagaagatttgctgaaccaaccatttcaagaccaccaggaagaacaagttcctattgcactacaaaatttatttactgctgttgtttcagaagcgatacaagatgagggtgtctacagttgcctcttgagggacttacttacttcccaagaagaagttatttccatggttcgtgtggagaagatatgcttctaagcattattttgttaattgtttgttgtcattaatcttatttaatatcctaaaggtattctatttttttgctctttgcagtcaagtgatgctgctaatgtagtagtagccatccttgatttttggcgttgctggaaaaatccagaaagggagagcttggtaactcgcctctttacctcggcggaaaataaaagaatgagttgtataaaatgcagaaggattacaaattatccacagcaaagttgttatggcattgttacggcagcagatacaatcagagaactgaaggtatttatcatttatcatcctcgttgtctttccagcagaaactgcaggtacttccccttatatagttgttttgtgcttaaacacatgcagtgtgctttggggaatagaaattttgtagatatcctaaaggtgatccgcttgagatataaaatggtatgtgacgcagaaggttgcggaaagacgaactctgttcagcacatttcaagtagatgcccgcctatcttcacaatcggtaaggttttgacccccatgattgtgatgttttttttgtactcatatcatatatttatgttggtgttttgtgggtttgcaacatcagtattggaatgggagaatagtgcaactgaaaacgaaatatctgaaacaacaaaggcttttgactgggagatagatatcagcaggctgtacgaagaaggcttagcaccaaacactaagtacaggcttgtgtcaatggtaaaacatctgaaacagggtcatatatgtttgtgctattgttcttttgtatttcttagttacagtgtaagaatatctgggatgtgatccaggttggttacagtgaaggagatgaagaacacatatgcttagcttatgaagaaaaccggtgggtcaatctcagacgtgagtgtatagcaggagaggtaagtcgaaacagttaccttttgtctacctcagaattgtatagtgaatttagataaggtagacatgaatgattgatatatgtgtggtgatggcataggatgttggtgactggaagaatgtggtcagattctgtggagagaggaaggttcggccagagattctgctttacgaagctgcctgatcgatggcctaacaagtgacaatgtggagaagtctagcattgatgtttccatctaccagaagacacttttttatctttgctttggttttttttttgatgagatcgatgtgatccaagtataactacggtacctcttaattcactatcacttgagtcttaagagtgttgttacacaagatagaaaacatagagagcgagaaaaaaaagattgaaagaaaatgcagagcttgagctaaacgtcttatagcgattacctcaaacgacatcgcttaacatcatcaatagatacaaccacttaaccggctcggttatctttctggttcgtttaaatccccgaatactccgagcgagttagagtctttccttcaacggcaaaaccaaaacctctcaagagttccttttattgttttttcaacatcactctccattttttgtaaaaataaaaatatctaatttttcttgtgtggctctccaaacattttcacgaatgttgttcatcatcaacatgaagaccattccacattcaattcttaacccatattcgaagattcactcaatttttgggtctttttttgatttttttattccgagaaaatcccaaacggataatgcacacaaggtgttcgacaaaattccccaatactcaaaattgtgggtctctctctgtttgtttaaggcttgtgtcacgtggctctcacgtgatataaaaagccagcctcttcttcttcagtaccttacggttataatcgttgattgttcccgcctctactctcacaaatctctctgaatcatcgtgatccacaaaacaaaaccttcgagagcaagaatcatcgtgaagaatcgttact

SEQ ID NO: 2147 - DNA, 3000 bp, Unknown
  misc_feature (1)..( 3000): cDNA_ID_2151453_gDNA_ID_1620494_Annot_ID_158683 3000 nt of promoter + ATG
aggacgtcaacgatggaaattcagaattggcagttacttctactactacacttatacaagaagatgatcgttgcaaggaagagaagaagagcttgaaggaattaagcttcgagacgatggagtcatggtttgaaatggttttaggggtcaggaaactgatggagagatacagagtgtggacttgtgggtattgtccagagattcaggtgggtccaaagggacacaaagtaaggatgtgtaaagccacaaagcatcagatgcgagacggaatgcatgcctggcaagaagcgactattgatgatgtggtcggtccaacctatgtgtggcatgttcgggatcctactgatggttctgttcttgataatagcttgaagaggttttacgggaaggctcctgcggttatagagatgtgtgtgcaaggtggtgcaccggtacctgatcagtacaacagtatgatgaggctcgatgtagtttaccctcaacgcgatgaggtcgatctagtcgcttgacctctttaagtattcagcattgcttaatgatttagtatggacacagtgaaatactcccctgtaatcttaggttcaggttcatctcaattcttaaaccttgaaccagttcaatttcttgaagtcctataaatttatacaagaaatcttaaagttccagattggtatcttaaaggcgttcactgttcagaatagaactagcgattgtctattagccagattcgtagattaacccggtcttgtttttcgatgaactgacattgttttacacgagaggcactaaagaatgtattaagatggctgaagacaggttgaccaaaaaaaaaaaaaaaaaaaaaaaagatggctgaagactctttgtttaggcggtagaataatctccttcgtttcttctacattggtgtttaattctcagcagatgttgtgatcgaccattcaagcacttctctaactcattactctctatctttttttcagaagaaacaggttgatatagaaaaaatgaaaactcatatacagctttgatcctcttgcgatccttgcggttcttgtgatcctccctatatagaggagcctcttggtcagcctacaaagtaaaaaccattcaattctcgacagctttgttccttgcggttgagatctcacttcgcagcttctcaatcgctttaaccgctccaattatcttcctctccatccctttcaattgcgcaagtttctctacgttcccactcttctcttcctcgaactctttcctgttccatcaaaccaattggttaaaaaaactgatgatgaatctttaacagttacttgacacgtaaaagacaattcttttaccgtaatctctgatgctcctctttcaaccgctcaagctcttgactcgacgcctctaaactctctgcctcaagacaaaccttcttcaaatctttcattcccaacttcacctttgaagcaagctcctcacgttctctcgccaatctatgagcctcaatgtgagctgattgcacttccctccttatattctctcgattcttgaccataccctccattttcgctattttctcaagagtcgatcggatctgaatctcgtggtctgtttccgtctttctgatgtgagctcttagcccctggacttcgcggtcagccacggttaagtcttccttgagagctacgtagcttgaagctagttttcggttgtcattagagagccggtctatctcagcagcttgaactgcaatcttgttttctagaatatcagaaagtgaaatctggtggtctcgaagatgacgaggatccgaagtcgaagaaatggtatcgtggtgcctcgacgatgatgatccactagttgacataccttggctaactcggctatgatgatttgaacctatcctctcccttgaagacattctggaagaaagaaaaagacaagactccactcaaaaacttagattgaacaaagaaaaacaaagagttcctttttaacctaaaaacttaaactttaagaagcgaattgagtgcaaattctaaattcaacactatgctatcttctttcagacaaattatctatgcaatgagattgagtaatcgaagacaatggcaaatctgtagacatcgtatcttgacacgagctagaagaaaacccagaaagaggaattacgaattagattctcaagctaacaacaagacccaatttaccaaatcctaagaaacccttatatcatccttatcacaattggacgaacctgaaattcacaaagagagatgatcttcgattaaaattagctgaaaccgaacaccgaaatgagataagtgtcgcaaaattaagagctttatgctctaaaacctgatctctaatcaaatcaaagacaacgatcgattccacaacagcaccagctttggtctcggcttgtcagaaaaaagttccagttctctgtaaattgtgatttaaaaaccattaaagacgccaaattagtttcgtttatagatttgggccagtattaatccattaaggcccattagatagtaattggcccattttaatagtttcccttccatgcctgtcacgtgaccttcagcttccttctctgaaagtcatcttcttctcccgacttttttgaacaagggaagaagaatccaacttcatcaattcagattcgcacgcttgaaattatctgaataaaaatcgaaagctaataatgagctgatcgctaaaaatatctctcgaattcaatcttcctgattttcaatttctgtctctagggtttcaatatccgataagtaagttttgttcttgctcttcttacctcattcacatatctctctttgattttattttttctgaaattcaagaagctttttctgttagattctcataacctaattcgttttgaggtatttattattatttcttgatcccacatttgtttcaatcgctttaagctccaaatttgtaatttcagtgtcatcttcgtacttgtactgaaatgcattgaaaatg

SEQ ID NO: 2148 - DNA, 3000 bp, Unknown
  misc_feature (1)..( 3000): cDNA_ID_3066185_gDNA_ID_1620495_Annot_ID_158694 3000 nt of promoter + ATG
tacagttgatgtatctgtgtaacaacattatagctcttttactctttcttattcttcaattgagataaccggtttcacattatgattccggttcacttcggtttggttggttaagttaatgccagtgattcaattgattcttctctatgtagcttgataacttcaaatttaataggttacaaatgtaattatatctgtttgcttagtgacatttgttattggtttggttttgtagaagcaactcctaaatcggttctgaagctgatgggattaaaaggtttaacactgtaccatctcaagagccatttacaggtccaaatttatacaaatttgagtatataataatgtataatgtctacaaattgttggtttatattctctcttatgatgtgtttctatatgcagaagtatagacttggtcaacaacaaggcaaaaaacaaaatagaacagaacaaaacaaagaaaatgctggtatgtatgattattatcaagaattcaagatttatatataattcagcttatagtagagtataatatatatatacatatgatgtatttaaggaatattaatgtagataacatttgagaaaccaaagattgattgatttttgtattcacaggaagttcatatgtgcatttcgacaattgttctcaaggaggaatctccaatgattcaagatttgataaccatcaaaggtatattatatatgaatttgccttctctcgacataatggatttgtaaagcttgagtttgacataatgttaatgaacacacgtagacaaagcgggaatgtaccttttgctgaggcaatgagacatcaggtcgatgcgcaacaacggtttcaagaacaactcgaggtaacaaatctcttctttcttctctcacaacaatgaataaaagttttaaaccgaagtttttgcggtgttataggtgcagaaaaaactgcagatgagaatggaggcacaaggaaaatatttgttgacattactagagaaagcacagaagagcttaccttgtggtaatgcaggggaaacagacaagggtcaattctcggatttcaatctcgcactttcgggacttgtaggaagtgatcgtaagaacgagaaggcgggtttggttactgatatctcacaccttaatggtggtgattcctctcaagagtttcggttatgtggagaacaagagaaaatagaaaccggagatgcatgtgttaaaccagaatccgggtttgtgcattttgatttgaactccaaaagtgggtatgatctcttgaattgtgggaaatatgggattgaagtgaagccaaatgtgattggagatagacttcaataggttaaagagacactttctttaattttttattttattttattatttctttacatttcttatagaatgttacaaatttggcttcatggtttctcagtcaaatatcaagaacatatttgaagtccaaagtagttgatatcagctaaatacggaataattgggtttaactaaataagttatttttgtgaataataaagtgtagcatcttctctcgcttgttctgcaaaattcaaaacctatttgcttgtttcttaattcttttcaaaaatatgtctatgcatctaattgtctctttctaaaaaatgaggatcaaacaaagatgagatttgattctcatgattgattttctcagttaaaaataagggaaatttaatagagtaacccatattttatacataaagacccaaaaggaatgctaaaaatatgagttatttgagtaataattatacctaaattatccttgttttcctttgcagagaaaaacaatattacagaaatgccattactatttaattccagcaaggcaataaaaccacatttatttacgaaaatgccatcgtcgtttttgataaatctgtggctcttgttgcgacggatttgttatcgatcacagatttgttggtcaaccacagattttttacaacagacttgttttgtaccccagactttcctgtgttatgttacgccagattttttttttttcgcagattttttaaccgtgactaatttgtttcatatagtctccacagattttatttaaatttcaaaagtaagaatgttgaaaccaaatctgtcactgatttgtttttcggaccacagatttttctttatggcggcaacagattttctatttgcacccaaaaatctgttgtgttataacagatttgttaacctcgaaaaatgttatataggcatgacagagttgttttgtgtaatcacagatttaattaacttgttaacaaatctggtgttttacaacagatttttgttaaaaaataaaattactacacagtcacatagtgataacagatttgtttttagtgatgacagttttttttttcagtgtcaaaacataacagatttactcatgtcaatgttatggccgatttgtttatgactagaataacctttttagtaataacagactttttttggcagatttatttttaaaatttcgaaattttttgttatatgagatttattagctagccctcaattaaattatttccggtttgattgtatgttaaatccggtttgacttgattttttttttttttttttgaaaacgttatgacagacttttattaggcgacagatttttccgaaatattaccatatttgagtcaaggaatattctcgtaacgcctagggtttccaatgaaaaaaactgccattgtcgttttcttttttcttctgtaacgcctaccaaatctaatttcaatacaatccattattcttctacctattcgagatcttagttgcttcatctttgacacaaattcgattcccttgtttatcgattctctctttggtatggatcaagtaattctcgtgtgtggtaaatgggtatatgagaaaacgagatggatttttgtggttgatagtacaaaaggttgtcgtgtacttgaaggtaatagtcaaaccagttatgatgatttcatccaaatg

SEQ ID NO: 2149 - DNA, 3000 bp, Unknown
  misc_feature (1)..( 3000): cDNA_ID_2151548_gDNA_ID_1620495_Annot_ID_158697 3000 nt of promoter + ATG
gaataaggtgttgttaccttcaaatgtgcgttgtggcgcttgccttctttccagcgacggatggtaccatcatttagtggtttaaacctgtctttgaatgacctgagatatagattcaacacaaaaaaaaattgttgagagagacgcccaaactattactaacaagatttgttgataatctgggaatcagaagtttcagcacgtacgaataaaacttaatcttgactttcttgacttttgatgtgattggagtcctaggtctccacttcttcttccattttgccattttttccttagaagtgatatttcgtacttgaacaaactgaaggcagagagaatcaaacgtacataagataagcaatcagatataaatcaatgttggtacttcgtagtgatgatactcaagcacaccgcctttatcatctggcttaacgaacatgatatcaaaatgcaagagctactatgaacaaataattctattttcggaaaacacgcaatcaaagccatgacgattcttctttcctatgatcaaacaaggggcacaaaattcaagaaccgtacacaataaatccgaatgttaagattccaaagaaaacatgtatgtatcttatgagattgagtaagctctttttttttttttaacaaaagagatttagtaggttaaaacttgcaacgtagtgatatatgcaagcactgacttgtatcagttggattcaaaacaaagtgcaagtaagcttattaacattctttgaattagtatttagtaatccatgttgttgattttgtttcaacagaacatatagaaaattcagaagaagctaaaactatataccaattcaaactatctagctcgtcactcgtcagatcttgtcctcctaagatttgtctcaatcagcagatatatataaagcaattgaagctaaattctggaaacttacgtgatgaggaacaaaggtagtgcccatggagctaacattcgacggaaaaactccggcggcgggaacgaagctccatttggtggaattggcaaaacctagggttgttgttgttaagtgacgactcggagaaggagaatggtgaatgagacggtgaggagaagcaccgtaaaaagagagattccgattagattggagagaaatggaacgtagcttagtgcaaaacctctgcattgtcgtctccaaggggaagaacaattttctgattgaaatgcgaattttataaaagagaagaagtgtgtgtgacaaagctttggggtttttgggaaatgattttgagtgtttggttattaggataactctattcttttttactctttttttttcttgtcatcattctcttttactttgataatggtaaaatgtctttgggaaaaaagccaaaaaaataccaaactaatttgttttttttttgtaggcgaaggggacaacgagtccccttcaaaatattattataaaattaaaccaaattacaaacaaatacgccgtgaatacgagatcccacgatagtcttcatcaaaaaaagatgagatacaatccgaacaagaatctagtaaatgcaaccctaaaaggcataaaaatgcataattagccaaaccatccgcaaagtgattcgcctccctatacacatgagacaattggaccaaccaatcctttgataaaaagccatagcacaagcgtgctaggaacgacaagggatgagtatcgcatatccccgtcttaagaaaccccgcaaccatcttcgaatcaacttccaactttaaccgagtaatcttgttctcccatgcataataaagcccatagtagaacccccaaagttctgctaaaggagccgtacatacccctatattaaaagcaaaaccttggacccagttccccaccgcatctctaatgaccccaccagccgtggctaaacccgggttacctcttgaggctccatccgtgttaagtttgaaccatccttcatccggtcttgaccaagcaatctgacgctccactctaaccctcttaatctgacctccattcgcaagacaatgtgcttgatacacatcttttgatatctctttcacaaactgggtacgatcacggcacttcctattctcaccaaaaacgttcccgcatctccactttcacgcccatcacattgccatactgaacactgtcccccacggtatcccctctctaaccacctgacttcccacgtttccataaatccactctagtaatgtttgagtgtaaaaaggtctctggagagtaggtggaacaatacggttccatatccccatcatcgccggacaatccctgagaatatggagaatagtttcatctccactcttgcaaacttggcaaatagctgtatcacataagtgtcttctctgtctctcagtgttagtcataataacctgatgaacaactagccaaagaaaaactcgcactctttccggtgtccgttaacagctgggtttgacaccgttaaaatttgacaccgttagatgattccgtaaaatttaacgccgttaaatgattctgtaacgtccgttaacggttgagtttgattccactaataatttatatctgagatattttgtgattacaaataattaaatgaggtatttttactctaatttaaaaatattgggtattaaacttttaaattaaaattagtttttttttttttttttccaaatgtttttatattctagtgtttatgcttattagctacgtagacaaattttgatacatttgggcctgtgtagctaaataaattgggcctttcacatgagtagataaaactaataaacctaaaagaaatcgtcttgttgaattcgccgtttggatctggctccattggaaaaaaaaactagaagcagatctgttgaagttaagccgagattcatcaattcgtgttatttgtctctcttgataagcaaaaaacatcgtacgaagaagaagaagatgaccttaattttttctgaatgaaatcttaaaattcccagaaagaaga

SEQ ID NO: 2150 - DNA, 107 bp, Unknown
  misc_feature (1)..( 107): cDNA_ID_3066219_gDNA_ID_1620496_Annot_ID_158700 3000 nt of promoter + ATG
tctaagagagaaaaaaacaaaccttttttgcagattgagagagaaatttgaagtaatttaaggtaacaagaagagaacaattttgttctgttatggtgggggcgatg

SEQ ID NO: 2151 - DNA, 3000 bp, Unknown
  misc_feature (1)..( 3000): cDNA_ID_2151501_gDNA_ID_1620496_Annot_ID_158702 3000 nt of promoter + ATG
ttccaaactcaattgaatttagatttcagcttattttttcgtttcaaagtattacataagtaagagttagcatatacactatttaaatacataaaaataatggagtttgtttgaacataacaattaatacagctagcggagtacatcatcaatgaaacaaaaatacataccaaagccaagaacatacagggtcttgcagcggttgatcttctcgataaagatgatgcaaatttcccatctatcgcattaaagtttggtggcgagagtcacaaagaggaaagtgtgatgcattcagaggctttgcaaaatgcgaggaatacaatcacggttgtcgccatcttgattgcatcggttactttcgcagtggggatgaaccctcctggtggcatctatcaagagagtacttcctcgaaagggaaatcagttgcggcaaaaacagtagctttcaagatcttctatgtaagcaatagcatcgcgttgtttacatcattatggatcgtcattcttctggtcagcattattcctttcaagccaaaatcactcaagaatgtcttggttataacacataaaatgatgtcagtctctgtggctgccctggcaacttcctatgtcgcagtgggatggatcattttacctcattttgaaggaaccaaatggttactctataccactcttggtatttctatcgtcatgcgaggaggtatgtatgtttttctatggtttaagctggccaaacacatcttaaggaagatagatacggaaagagaccctgatgaggaggccgcaacgggaaaaggctatgtcatgtattggaaatcataaatccgagcacctatatcttaagtttattttgttagatatctattattgactaatgtatacaattaggttagtgatgcagggcaacttgtgttgctttcttagtttgttttcctatttcatgtttgatttctataaggttgtaatgtgtgatttgaaggcttgcgtgacttatatagccttcatgtgtggtgttaatgcacgaattaaacaagtacgggtgagtctctggggaaggtgaagaatcaatctctaatccacgagctgaacttgaagctgggcaattgacgggctgaaaggcttattgcgaactgagaacgtagttgagggcgctacgaggcgatgccgtttcgagctggtggttctggtgagctggctcttcttgctaagttggcttgtcttgacgagatgtcttctctcgacgagctgacttgtaccgatgagctggctcttctgggcgagctggctgatcttgacgagcagacttctcccgacgagctgacttgtgtcgatgagctggctcttctgggcgagttggctgatcttgacgagcagacttctcccgacgagctgacttgtgtcgatgagctggctcttctgggcgaactggctgatcttgacgagcagacttctcccgacgagctgacttgtgctatcctttctccaggtctcgaaaaagtcccctttcccgagactttctattccttatttatacccgtccgtatagtagggtacgcaaggtgaattctcgagagtgccccttttctacgcagccgaactcacatcctgaccaggccgggcttcggcctggtgggccggctcgagttctaaagtgatggtcggggctgggtcgttattccttgaaatgggccggttgatcactgaggcccaattgatgtatcaacatgtggtttttataaaaagagtcgtgagaagagttttctctaaaaatcccttgtgtttggtaatcaaacttcattcaaccaacgaattccaaaaaaacaactaaattgttcgggtatataaaatgattggtaatgatatatcccatagaggccgtagacataggcccaaaaagtttccataactagcagaaattgaaacttgcaagttgcaaatattattacactggaaaggcaacaagtcttgaagtacaaactacaaagacttcttgtttggatggggacgactgacgagtttgaataacttaagagaaaagggtcgcaatcgaaattagacaagaaattagtcctcaaaaagtaaattctgaagttgaagctccaatgtctttgttcaaagactttatttagatgtaaagttatgtcttgtaaccaccaaacagctccttttcatctacactcccaatttttttaacatctatgttttgcattgcctttgacttgtctttctctctccaacttctctccttcaacataaagccaaatcctaaatccaaatcccttaaaccgaaccgaattaaaccgaagctgttgaactatcgcaaaatttcagatcttactaatcataaacatgtgacgtttaattcattttaagagtttcatgatttgcactgaatggtattccgagtccaccggaaaaaaacttttcctacaagtagaaaaaggataaccccataaatccaaataacctaaccgatcaaacatataccaatataaaccaaaacaagattcagattcatcggtttagtaatcgaagtaatgtactaatgtgtaatattgattccaccaccagcttagagattcgaaccaaaaaccgaatagcgcataaccgagaaaacccaaagcttcctaacaaatacataaaaccgtggtgtttctaattctaaccaacacacgtttcctttttattcacaagaaacatcagagttatgatctgccattaataacctaaacacaaagcaaggttaggtaaatgatatggacccctaatgaataatcatacaatacataacaacgtaagatccagtttccctcttcgaacatccatctcctttcagacaaaaaccatacaaagacataataaacaaagaaacagaggagaaacagagagatgcagttacatatatctccgagcttgagacatgtgactgtggtcacagggaaaggattgagagagttcataaaagttaaggttggttctagaagattctcttatcaaatg

SEQ ID NO: 2152 - DNA, 3000 bp, Unknown
  misc_feature (1)..( 3000): cDNA_ID_3066201_gDNA_ID_1620496_Annot_ID_158707 3000 nt of promoter + ATG
agaaacttcgttgatcttggaacgtcatagaataccatcggacatgtcctagattttttaacaaaaacttttcttggattatatgtaatatgtcatatctatgacctaagaaactattgagaattaatgataatatagcttatatacttgggacgtacatgtagcgcattaggataagatcacaatgatttatttatctaaatcaatctattagttgtgcgtttacttccgcgatcaagctaatccgaagtagatgtcaattaccaaaaagaacttcaaatgaaaatcgaaccaagaaaataaacgaattgacatatacctataccattgtaatgtaatataaattaaggtttgttgttggaattaacaaacaaaataaataaataaaaatacaagtcaagagcatgcatgctgttgtagatgcggagactcgtctccatcattcacttgacacatgcacacattactgaacttcgaacacctaatccaaacaaaactccattcgtgttatgttccaaatgctcacacacaacctcatgcttattacacgtgaatgccatgcaaatgtcctatctcctccataaatatattcattcccactttcacttcacttcatccatccatcactcgccaaaaaccttgaaacctttaaaaaatcgaaactatggctaagctcattctcgttttcgcaactcttgccctcttcatcctcctagccaacgcatccatctaccgcacagtggtggagttcgaggaagatgatgacgtgagcaacccacaacaaggtaagtgccagagggagtttatgaagcatcagcaactaagaggttgcaagcaatggatccgcaagagagctcaacaaggaagaatcggatacgaagctgatgactttgagctcactcttgatgtcgatcttgaggacgatgagaacccaatggggcctcaacaacagtcatctcttaaaatgtgttgtaatgaattaaggcaagtggacaagatgtgtgtgtgtcctacactgaaaaaggcggctcaacaagtcagattccagggaatgcatggacagcaacaggtgcaacatgtgtttcagactgctaagaacttgcctaacgtttgcaaaatccctaccgttggatcctgccagttcaaggcatctccttactaggaccatgaagaggaccaaactataaaagcacacacgtacacatggtggttttgttaatgataataaaaagtctctctcttgtggcgtgttcgtgtttgtatagtagataaatgtttgtactgtatgagttagagtcttagtggcaatattacaccttctagtgtaatgtaacttgccctacccccttaaataaaagatgttcttgggtattcaaaaatctttagcatcacactcacactctcttaaatctcatgtttgtgttctaataaattattgagaattgtgtgacataagcttatatatatgtatacttgggacttacatgcagcggattaggataagatctacatgattagtcttggattgagaccttgacatggttcttttctataaatagatttggtactgaaaagattaaaagagtgtttgaacaccattacagctattgtcttcatttgatgatctttccggccggtgttcttcttgtactactttaccaaagacaatttcataggtggatagtgaagcagagagacatggtgatgttttacattttctcctacagtaaaacagaggagaagtaacttgctcgccaagttttcattttagttatggtcaaactaattatggacttatggtcaaacaccctccattaattagctacttagtgagcctaacataagcctaataattattcaaacatcaaatgtcgtatattgtcctccggtcagttttttgagctagtgaccggttcaactaaaccgagtcgaaccaaagtattttatttaaccaataaactaattaaaaacacattagaaaaaattaaactaatgaaaatcttcatctaagactagcgcacgtcacggaaaagaaaaaggataagactagcgcacgtcgtactaatttcggtggatttgattggtttagagtttatgaatgttaatacatataagctaaatttagttcaaactcggttcttttttttttggtcaaaccaccggtttgttataaaattaaatttaccacattaatgggtaggtaaacactacgagaattaaaatttcaattaataatttaggtttgtttggtttaattattggtataagtataaccaacaaaaccagacattctcaatgatttatgttaatttaaaatttgaataaaaatagggaaagagacgtggaaggtgagtctctctttctcgctgtagtaaatacaaagacgatacgtaaaagaacaacttaatccaaaatttgttttttgatatataaataagaaaccaaaaacaaatcatttatgaagttttttgaaacaacagatttctaaaacaactctttaaaggtcttcttcatcttcgctctctcttcttcttatcctctaaatctcttccccttttcttgctcttaaacgttaccatagtcctaatcagattactgtttccaaagtcttaatctttctttctgggtttttaatctcttctaattcttttcaatttttacaagaaaaaaaaaactcacaaatcatcgattcgttcttctgggtttttgtaaaaattcgatctttttgtttctttctattgattgtgtgtgtttcttgcttcgtgacatttcagagtttgcgtgtatttttgtttctatttttaaaagattctaatcgaatttgttcaatttcgctcttaaaaattgtaaatttgatctctcccccgtctttctcgtcgattcatttttgcttggatatatctcaggcgtcgatatagagaataaaaatcgacactttgtttcatttggaggctaaagatcaaagctttttgatagtgaagagcctcctccaccattatg

SEQ ID NO: 2153 - DNA, 3000 bp, Unknown
  misc_feature (1)..( 3000): cDNA_ID_3066205_gDNA_ID_1620496_Annot_ID_158706 3000 nt of promoter + ATG
cagagctgtgaagacaacgacttttgcccatctgttcaggcttcagcgcggttttactaatgcggtaagcagagcccttcacttacacatgttgaaaaatgtgatacttatttatttaccttaatgtggattttcaggtgatacaagacatatgtttcagcaaggatagcaatttgattgtggttggttcttcaagagggacaagtcatctttttgagattaatcctgagaaagagggggatgctccggttcctatgtctgcaatcagtaggataagaagcggaaacagcagcggatggattgggactgtgagcggtgcagcatctgcagcagctggaatggttgcaggctcggttccgggtacagtcacatccactttctgttactgcgatgaaaagagtaacaataactactatggttctgttgctgatatgtgctccaagacaaatcttctggtgtttgctccttctggatgtatgacacagtatgcgttacgggaacatcaggttggtgttggtcatgagactgctgcaatgacggggtttgattctgagtcaggtctagagacagaaggaaaattagcggtagatccaataagaaggtggtccatgatccaaaaccaatctagaagagagacgcatgacccccacagtgacatatatggaggtggaacatcagtggattctaaaagtaaagtgtttccagaggttgttagaaaacaaagtgttgaggaagcttggaaagtatctaagaaaggaactacccgtgtggtggataagcgtcatttgtacatatatgaagcagaacaacagcaaacgcatctgccgactcagctacccttatgggcaaggcgaaaggtaaagtttccttttttggggaatatggttatgtgttgtttggatgatctctcatacttcgtatattttgcacaaaacagtttaggtttcaagaattggtattgaatcggggtgaagagattagtggtggaggtggaagggagatggagattgaaggaatccaaactcgaactattgaagcaagaacaagagatttggttccagtctggggttatctccaatctccaaggtctcagcaagtgataaacgagtgagttttctgatactaattatactcgacacttgaaagtttttgtctctgtctctgtcacagtttcttgacaatgatactatgacacagatcaatacagagtccaagtaccactacacaagatgacaaagtggctactctggagggtcatggaacagagactgatctcggtgctgtacatagcgaagaacagacacaaagcgagcctgtagataaagaaggtattgcagaggagaagaatcacagtgaagatgaggatgaagagcaagtggattagaagattggtttattttttctcacacatactcgacttcaacaacagaatagcaaaaaaataactctggaaaattgtatagaaaagaaagaggaaaattgacatatcttttagatgtaaatagctttagtactttttcttcttttttttttacagaatattattagcccattgattcatgaacatagttaaaaaaaaaatacattattttactaccaccttttgtattcaagtttggaaagaaaaaatttgtcatgctaaatttttgtatgtttaagaaacaagcaagaaaaaaaagaggaaccaacgaactagtctgccattacaagaacatggctcgatgaaacataatccgagccatgttgaaattttattttaaacataacgatcattactacttctactataatagtctatccaagactctccataataatagtcttgaatagactataaaccgtactcacctagttgaccctactctaaacaaagcctacgcaaaagaacttcaattggcttgtcccacgaaagttgacccaaaagtcatcattaacattgacccggtaagccccaggaagtttcacaacatctactttaaaaatctgcaacacggcaaatgactcttcacctctgaccaggttctcttcaccgacaaccgcagcagaccattcgttgatgcttgggctaacgactcacttgccttcaaccgcgcctttgtcatctccatgagaattaaaactcggccgcgttggcatcaaaaagtcttaaaatatttggcttttatcaaaatcttgaccgactataaaattttaaaatgtatttttggaaacactaatatcaaaaatcaatttgaaaaaccacaaccatttgaatattatcccctaagaaaaaaatagttaaagaaacaaaaatcaaatcatttgacatcttaaagggactgctatttaatatgttagatgcaagtggttgtggtttgacttcttccaggaacaaacggtagaagaaactctcaggaaaagagaagcaagtggacttgagacttgagagttgagacatatatcaataaaccctcaaaatgattggaacttagaccatacacacatattcatttctatctctcacagaaaatgaatctatacggatcatatctagacgacattgcagaccagataccggtcgacaggagtcggagtcagatgatcagaaagtacttaggtaaacaacggaaaaatttagatttgatagatgaagtcgtagaggccagacttatacgtcagttggaagccaatcaatcgattttggagaaaacagacaagcataaatacgactacgaggaatatgcgacgattttgcatagggaagagtacgaggaatatgcgacgaagataatcgacctctgcccttcactcgttagagttgctaacgtcgacggaaacactcctcttcatttagctgccgaaattggaaacgaatttatcctctggaaaatgttgaggtgtggagaagcagactgcaggaagattaataagcaaggacaaacagcattcatattagcatgcctcaacaatcacgtcgctgttgcacttaccctcctacaatatatgcggtctatgacgatg

SEQ ID NO: 2154 - DNA, 3000 bp, Unknown
  misc_feature (1)..( 3000): cDNA_ID_3066215_gDNA_ID_1620496_Annot_ID_158701 3000 nt of promoter + ATG
aactaatgttagttatattttaatatgcttgtaatatttagtacttttcgaaaacataaaaacgtgaaaattgactaatactataaatagtaagaatactggatcattttttcaaaccatgaaaaagtggtatacttttttttgtgtgcaaaatcttgtttccattcagtagatcaagtagttacagaaatgaatagtttagcaaattcaaagtttaaatcaacaatactaaacgcatttttgaacaacaataataaaggagataggatatatagaccgacggtaagatcaaatggtttccagacaataggtatgaaccaaattgtcacatgcaagccaaaaagtcgatataccatttatctttcctttttctttcaatcaaggtgtaatcatatatatcatatatgaagcaaatttggaaatggaaataacacataacagaatgggacatgacggcattttttgcccactccgaggaacaatgtattccattgatcaacttgaaaccccacttgattagctggttctagataaatgtttgttttctatttaggttgttacagatttcgtatagttaaattgagctacatgtacaccagataaaatcaagatgttgatataagaatcattagattcaatttgacttgaatgtggtgtgtcaattgtaaaaacaattgtgatagggtcatactctattttccctataactataatcttgttttgttggacactggagtaatatatatatataattctgcaacaacttaccaaaaatatttgaaatcatggatcatatgtcattttttttcttccaaaaatgattttgccatatgattaatgcattacgctcgtatgtttgataaatctggttcgtcacataaatatcacttcgaaaaaataacttttcatagttcattatcggtacatgtaaacgttaattcaattatagtatttcatatgttccaccatctcactattatattggtcatttgatatttcactactaaaccagataactattgttcttaccagatttcacacgtaatcattgtattttctagaacatcgaacgaatatagcctacaaatattatatgatttagtcaactcctgttgaatttcttctaaatattgagataaggtaaactaaataacatctgaaatcatggcaaaattcatgccttcacggaacttgggaaaagaacaagtcaaactttaaaatatttgtgtaattacttgtttattaacatttgtttcaaaatattgtactccaaatagtcaagttgatccataatgccgcttctgcattcattaatcaaactaaaagcaactggcttagccgatcataatttcaaataatagtagtgaagagtataacaagaagaaaatgataatctcctatgaaaaaaataataataattgataatctcctttatattttataaaatagaaatatagaagataacaagaaaacaagaactataaaaatataatttagtacaaaacaagagaatatacctcacagtatgagtggatattcctaatcaatagttgataaatctatttatttatcaatttgggtttcgttatattcttggaagaaaataagttgacgcgtataatttgagtactggttttaaaaagaaagaggtgctattatataatttggggaagatattaaagattatatatcgtacataaaagattcttctattttttttctttctatttcttggaactaccgttcttaattaaattacccatatattgttaaattttggattttgaacctgagatgtcgatgggcatcttatcttattatgttaaaaagttgaaacgaataaatggtctcaatgctagttgagaagtttatacttttagtgtgtatcttaaaaaaaaaaaaaagttcgtatctatgtgtatgatatattattgtttatcaaatgtgctaatacgtaaagtattattggaaattttcatgtatgtacgggaggaagcagaagaatgtataatctcctagatcacgaccaaacgaccattccaaccatgttctcgaatattatcggttcgttccaacgaacatggtcacaagttttctttatcaatttaatttgttaaaagctaaacggacaaatagaaaacacatactactaaaaccaaagaatattgaaacaaacaaattaatcaaaaccagctttagtggtgttagattgataggtctttagattcgtgcttcttacttattattgctaagatagtcgacacacacaaaaagaaaaatccattctcttttgttagaaaacatgaatacttgccactataccgattttgatttaaaaaaacaaaaagattgttaatggacaaattttgtctttctagtgcatatttacttaaaaattgaaattattaaaaaaaatttaaaacgtatggattatatttgactatttgttttggaatttaatccaaaacatatgaaaattttgaccgtttatgaaatgttgatttttattttactctttaactcacacacaaaccacatactttaaaattcgaattagagaattcactaggttaatgccctgattagttaagtttgttgtaaaatgtattgatatttgatttaatatatatatgatgatgtaacacataaaataaaataaaaacacgtaaaatgaattaaaaataaactaacaaataaaataaaaacccttggtatgatgggccttggaaagcccaaaaaaaaaggaagagtgcgcgtgaaaaccactctaatttctctggattccaagattccccaattcgtctcctccaacagttttcttcttctcttcttctttgggtgttccttccaccaacggcagaaatcgatttggcttaaatctccccctcctttcgatctctctgatcgccgccgggaacattcaatttcccgggagttcaacaaaaaaaaaactctccgtttttatttttccccctttttcaccggtggaagtttccggag

SEQ ID NO: 2155 - DNA, 2300 bp, Unknown
  misc_feature (1)..( 2300): cDNA_ID_2151725_gDNA_ID_1620497_Annot_ID_158713 3000 nt of promoter + ATG
gatcctctctaggtaaatattcttactttggtcgattttcgtatcaaagtaatcaatattgaaatggttgcatgtaaggtatatataagaacgtgctatgactttttttttggtggaaaaaaaattagatatctgcaaatttggtcacgtgcttcatgtttcaatacgagggaaacaaatatttataaagaaaaatggtagtttttctttttctttttctagtgagtatatgtatatcaattttgagtctgaagaagtattaagtatatagagtaatgtgaatctaatttgcaattgattgtgagtggtgtctttacaatatttttattttacatgctattatgatttcaatgatccataagttaaataagttttattatgtatgtgtaaatttaaaatgtatgtttgttttttcaatatatatttgtgttgtctttttgaaattttaacgatcatgtgtttgaaaaaaatcaatataagacttgtgaatctgacttttggatttgtgaaaagattggccacatgtagtgtttgtgccatgtgaggtttggagcgatttggtttaatatactttccacaaatagaaagtcgaaccataaatttgagtggtgagtggatttcttaaaaaaaaatttgagtcattagggaatacattttctgaaagcaagattaaagctaaaggtaggtatagaaaagctgatatagtggatgaattaaaacacgtgaagcatgttttacaaactattcacaatacgcaagtcacgtgtttttctctttgtttacatgattttgaacatgggtcattaatatgactttgatcaatattgatattgaaaagatgtgttaaagggttttgatgtttagtctgactttagtattcacgacacggaccatttggcccacgactttatggcatgaccttatgaagaacactacattaattcatgtactaagagaggatggtttgagcaattctttttctctaaaccgagtttttatagagttgtctaattgttttagggaccttttatttttttttgtcatctaggaagtagaaattcttgaattaaacttgtcgtggaaccatacaaatatacaatatgtaaaacgtccaaacgaaggaaattatgcccgtggacgaatatacatccccggaaactaaagcgataccaagagatataaaaattacagagcaaaaaatttaaactcgaaatagaaagaaatcgaaaaatttaagtctgaaaaacataacgtgattgctttttgggatctgaatccattaaagccattacacaccaatctatttattttgttgtcgaaagcatatgtaaaacgtgattgctttgtttaacaaaacacccctttgggttgttagtttcttgatggaagtttgagtttgggcttatgggtccctattgatacctccaaatgaaaaaggcattgataagacggctcaatcacgtttcattatgtttttgtcaaccaatccaccgttttgtacacaagtataaacctcccatgtgtaaattatacatatcaagattgatattagcaggagtaacatattagtactaaggtctatgtgatgcagtgatggtgtttaagattttcttcaagggaccaaaacacacaagttgatacacttgcaaagtaggcaagaatgtattcacaatctactttaatcccttggaattctttgtatttttctttgtttagcaatatacatcaaagtgccagaagacaaggaaaacacatcctatcaagtacgaggggattatataaataaataagaagagtatatgtgccaaattgataacttctaataaatggagggtgcaattaataaataaggagagacggaaaaagagacgccgttgaaacaccgcaaaacagagaagcgccttttgattgtctctctcccggagatctctctttctcttcttctccatccttcttctctcggcgcgcgcttcatccccaccaccttcgaattcgtgtacgatctctaaaatccagttttgctatcgacttatctcttattgcgccattgttatgcataagaaggggattttaacaatctagggccggtgaataagatcatacttgaaaaatctgattttgtagatgaaatcgttgtgggcaatttgcttgtttggttaggtattgtttttgagctagaccctttagatataatcgccatggaagcgctctgctttgtttggatcgagaaatatattgtaagaagaagagaattgcatgttttggctatattgtattatctgatgttggtttgtaatatg

SEQ ID NO: 2156 - DNA, 3000 bp, Unknown
  misc_feature (1)..( 3000): cDNA_ID_3066260_gDNA_ID_1620497_Annot_ID_158720 3000 nt of promoter + ATG
atattggcttgtgttattcttcaagagcaagttagagatttaggttatattagattagaatttgtttttttttggttcttgaaaagtcctctgttccaaaacagagatttgttgtcttggtcttttttttggtcaaatttttctaaagtcttcttccagctgcacgatattgttttctttcaaattttgtcaaactaaaaatctcaaccatatatgatacatcgatatggagacgactccatcaaggatataatgaatcaaatattcattggtatttttgttatgcaatgtaatccataattatgttttcttcgaacctttgtgtcgttaggcagagagaagatacgtaaaaaggaataacgaataaaaggagtagaattaaaatttaattcttataaatagggttttaactcaactataatcattatttattattttataaaaggggaatagacttttattccaaagaaaaacaaaacaaaaccctaatttggtaagccttccagagtagctaaaaccctactggtccgtgtagctaaaattcttcattcctattgggatatatccatatttatgttaaataaatatatttaggagatatatactttatgttaataaactttatctccaagtttagtttaccgctcttgtatatatataaagatgtaatcatatgagatgaataagagggaaaacatatcctaaacctagccgcctctagtttctacaattccgatcatatgatgatgtctgatcttcctttggatttggtagaagaaatactctcaagggtttcggccacatctctgaaacgattacgatctacttgcaaacaatggaacactttattcaaaaaacgaagtttcagccagaaacactttcatatagctccaaaggagtctatggttctcatgttgaaggagtacagagtttgctcaatgaatatcaatctcaatgtttctcctccatctgtagagtttcaaggtacacttggcataaaagatgattcccattctaatttaggacaagtcgagatagtcgaagtttatcactgtgatggtttgttgttatgcgccaccagggacaatagactcgtggtttggaatccgtgtttgggggaaaccaggtggatccaactcaaagatgaatgcaggagatactctacgtttgctctaggatacgaaaacaacaaattttgtcgtcgtaactacaaaatcttgaggtattggggttggtttcacgatcacataccagacgacggcggacgtttcaggtttgaaatatatgactttagatctgattcatggaaggttcttgatgacgtccctgatgaccgcttcccaccagtaagtgtcgtgtctttaaagggaaacacttactggtttggttctaataaaaaggacttcttacgtagttttgattttacaacagagagatttaatcatattggtcttccgccatctcgagatcatggttttatggctctatcagttgttggagaagaacaactctcagtgttacaagagattgagacatcaaagatggagatatttgtaaccaataaagttggtactgaagaagctgctttgttgtggagcaaatcctttatagtggatttacccattggcggtcattgttctgaggttttcgcgagtcttttaatcaacgaggagaagaaagtggccttgtgttgtaatttagatttcgagaccgacgggaacttgatattcactattggagaagacaataaatattactcagaaatcccttatgctacaaacaagccatggtggttatgtagattttctgaaaaatttacaaaaaaatggtggtggtttccatttatttacaattatgttccaagtttggttcaaatcttgtaagagagatagagagtaaaaaagagaagaaaaaaaactagtcgataaaaataagatacactagtcctctctcatttgttttccctttggttgaataatttaatgaaagttttttggtagtttattctttttcttcgtgttgtatagtttatgattcttacctttgagagcctgctctaggctggatttcagaaacaaatgacaatcatcttgttatcactctgtctggagaggtttcgatcatcgctagcggaatcaaaaacccgaggatatcctacttcgacatcgtcaagatggattcaaaatcatcaaattggggggaaaatcgattttattgcgaacattttgggtaaattttagtaatgatcagtttcatagatacactgagattcgtctatattgtttgaatggtggcggcggtcgggatggacaaatccactcagcagtttagtttgctctatttttaggatggataacaaaccgatgtagatcaactctatttgtatatataagcacaattctatgaatggtaaataactacagacacaatttatgaatggtaactaaatatcggtcaagtccataaacggatttgtccgccttaaccgctgcaaccattcagaccctatggtttgaaacaagtaattgcgtccatgatattcaaaccgagaaggttgtccaatggtttcaacagtttgcgacacagttattgttagatacatcaaagaaactataagacactacacaaatacgtctctgttttggaacagaggatttttttaactttttaattatattaatctaattaatcaaaacatgaattaaaacggctgacgaatatcaccagccaagtctatagaaaaaagattattactacaagcttttacttaaaaaatgtccacagtttttgagcataaacttgcggattagtttgtcttttcgtgtgctacaagtcttttagtcaaattagacgaattttacgctttcttgtatacattgatcctagagttccgtaattgctataaatagatgtcagtttaggagttaccaaatgcaaaaaaacaaaaaaaaaacactatcattaatcaagttccactgttcattttcgatctgcataatg

SEQ ID NO: 2157 - DNA, 3000 bp, Unknown
  misc_feature (1)..( 3000): cDNA_ID_3066252_gDNA_ID_1620497_Annot_ID_158723 3000 nt of promoter + ATG
tatggatatttaagctaaaagagtagcttcgacaaaaacaagatccgagccgacgaataagagataggagatcctccaggtggcattttagtaattaaccacgtggaaatagactgaaaccacgtggatattttagaattttgttgtgcacgcgctttgtaggcgcgtaacgttaaaaatgtgaaatctactggttagagttactccactgttattaattattagtaagagttatgaatcctgaccattgaccaaagattgttggtgttttcaaattcaattaattacacaaaatctatattttacgtggggcctaatccatgtcactatcattcttatatttaactataatcactaaatttatgtattattttaaataaatatagagtattaaacatttgaaaatactgttattgggttatgaagtaaaaatagaaatcctactgtattcctagtttccttttatattcccacgaacgattttgctgtatgtactcgtatgtatcttacgaagtgacgttttacaccatgtcagaatatgttaacagtggtattaaatagaaataaaactgtactttaatttagttatttttgttaattaaaatattaatatttaaatacaatatcctatattctaattagtttacaaaaaaagtcaaagttaacacttttgcttaactgtaattttatcttttcaatatgttaaaattattaaatggaaaccaaaataaaattcgaaaacaattttttttaaaaagtgaatagaaatacctaatatttagaaatatcaattcaaatttttacccatcagtaaccttggaaaatagcgaaacaagccaacttttatttttttttggcaacataccaacttcttcagaaatacttttcaaaagaaaaataatttataagtgggggtaattaaaaagagataagagcagtgaaagatgatttccacaaaaggaaaaaaaaaaaaagggaaaagagaggtgaaaaaaataaaaaataatgtaaaaagagcggtgaaaaaagtaataattgaaaagaaagaaaaaagatgataagagcaattccacattggcagctaactgtggaccccacacttctcggaagttccgtgaccgcgacttgagtgaataaggtcccacatgcatttccctctcttcccatctcagccgtttaatcttttctaaatcgaacggttcagatcaacgggtcgggtgccaactcaacgccttttttagtttttattttattttatgttttttttttggatgatgttttcttctgccaagtcagattgtttaaaaaccaaaaatagaagaaaataaaatactaatataatataaaacgatctaacggttgtgagagcatttagctaattggcaacaaatggtattggccgttgatttgtaattaatgagttaaattattttagactatggtaggacctgtttccttactttataggtttattgtttagcttaccttccctaatagaattaaaaaaatctaaaggatattatatggtttattactattttagaaatatccaaatatgaccagatttaattagttttatagaaatttatagttatgtcaatttgactaatctaacctaggaattatcaagatttaatttctcttttagattttttcattataaattaagaatgttgataaattagtaattaaaaatgtggtagatacttccaatattattctccatatattttcatttttaattattagattctaagaatttaaaagatcaattttgcaaacctggcatatttgaaaaggtaaatttaatttaacagcttttattgcatgcacgtaagaaatatcaaataaatcaataagaaggaaagtaaatatttgaatatttattttccatgagttgaagaaaaaaaaatagttagtggcaagtaaaaaactatttagccatttgatcttaatggagaaaagtaaaaaaaaaaaagatgaaggtagagaagtggaacctgatgtgattaatattaccggttggatcggtttgtataggtggtcacaaagattccattctgatcgtagattgcctttaccaaggtctctgtctaccggtaatagccggtgatacatcttctcaagacacattttgaattttaataattaaaataacatcatatttgtgcgtgtatatgtcagtatttttgttttcttttcacacgagtcatcgcgattagtggacaacagtacactaccccaggagcctttttattgcacaatatactattgatgattatttttagatttaaatattattatcttaatctttccgactttcaatatattttattgtttttttatttgtttgtttatttctagacagtgcaaagtcaataaaatattggtagcgataatatagacggaagcgtgtgatgtcaaactcttgacacgtggcagcttctgtttaataactggtaacagtccaaaataattttttcacatgaatccgactccgaaaataatattcttttaaaaccgaaaaattaaatgttatcaaatactaaaatatcataacaataagatatcatttttgagtgggtcctacctacggatgctgactaataaaataattaaagaatacgttttttaatttaataataaaataataatcggtggtaaaataattaataaaagaagaaatatcggttatttattattatatgcgagatctcttataacggagggccaagattttgtcacgctggtatatagcgtatcgtgaccgttggatgtattcacaccgacggtgaagattgagaaaatgttttacggcaggagatatgagccgtggatttattcgctactctgcttttatgaggagcacaaataaaggagataatgggaagcaagtagagagatagaggagagagagtttgataaagagagagaaaaaggggttgcgatttgggagaagagaaatagagaggagaagcattagagaagaagaagaagaag

SEQ ID NO: 2158 - DNA, 3000 bp, Unknown
  misc_feature (1)..( 3000): cDNA_ID_3066241_gDNA_ID_1620497_Annot_ID_158732 3000 nt of promoter + ATG
gatcctctttaccatgatcagtttgagtcgtcacagatatgtgagatcgatcttttcgctaacgatgatgaagatcatgtcgacatttcgattaaagggaagagaaacggtgatgatgggatattcttgagacttagaatatctgatgctgaaggtatagtttcaatctttttcgatagttttaaaatcatcggtcttaaaaacgtaacacgctttcgagttttgggtaatgtaggacggataaggaacatttacttcccgtttgagacggctattgatactgcatggagtgtagcggttgagatggtgtcagagctcgacataacgaatcaagatgttgcgaaaatcgcggagatgatcgatgcagagattgctgcattggtgcctgattggaaaaatgatacagaaagttcccaaaatgtaaacaacaacaagaacaacaacactgcaggattctgtggagagtgtgcttcaaacgggtatatacaagagactgtatcatcaggagaaaaatctcatcataatcatcatgagttcgatagttctgaagacaagagctgttcttcggttcacggtaggtttgcggatatgtggggtttgcgagaatcatattctgatgatggagaaaaacagagctcaaggaaggttagaagtggacggtggtcggagaatgagatgagacgagaactgagatggcttaaggcaaggcacaagattcaacttatgaaaatgagaggtcaaacgatctgcgagacaccgatagagatctctcttacaccgggaacttcagtttcgttacctcttctttacagggctatatcacttcctgtggatgccgtggatatgtgacattattgtaaagtctgatgatagttatcacttatatttgtatgtttcgacatttttaacttttgttaagttaaaagttaatgacatagtgtactttatttaaagagaagaagagtaaacgaaaaacataaattaggcattgtaaattgtggactaatcatctaggttttttccttgatggcacatatctcccatagactacatatgtctcttcatgtgcaataagtctagatatgttttcatcatcacatcgacgtttttctagactgctttcttgtttcctttggcatcctggaggttgcttgatttgcactaaacttggaacataagagcacacaaatagtggggaaaagtgtttgtcaacatcaacaggttgtcctagatgcagttctttaacgtttccagcctctcccacgatgtaaactgtctcgcgattcatcggtatatcaaaaatcatagcaactttctttacctcgtcaatgaaaaaactcccttccagaaggtcaacatacatattcactgtcaagaacttgctccacgaaatcttgtcagtctcaatcttagtcgtaatccatacctcaacagtagcattgttacaaaacaaaaccgcaagcttctcttctctaacacaagatagagtcacaaggcttccggacgtatatctaacaaacggcaaaggcataagcggaccaaatctctcacttgtaaaatcaaaacagattatgtgatcaagatcaacaaaccaattagtgtttgacttccttcttatagcacaccagtaagtgtttcccttgagagtaacaccacggttataacaaccacggggagggaaatttataaaccattgtggagtaacgtcaagagtcgtccacaaatcagagtcaaaatcgtagatttcataccaaaaagggaaatcgaatgcaccatctataaacctcaagattttgtgactacgactcttattattgtatccaagagcgtacacgtacatgtacctgccataacaattctgtatccgggaaaaatatctaggttcgatccaccttgtttgtccccaatacggattccaaacaacaagactacacttatcgtcttccaagacgcatagtaacaaaccctcgcagtgaaagacttgagatatcttgacttgttctgaatcgtcgtataggcaagtaagtttacctctttgctctgcagatggatcaatgtcaattccattgaagaagatgctcattgcaaacaggtttttatccatcaacacgatcatcctagactctccttcctttgctgctgcttcttctttcataaagctccggtttttgaataaagagtcccagtttttgcaagtcaatctcactgctctcgtagactttaatggtactctagagattatctcatctaataactccgttggaagatgagagattgtcgtcgtcatagtcattacaagttgcaacaaaggttttctcttccttagatctgttgttgcgcgcgcctataggaatcaaagacacataaaaggtaccacgtaaaccttttaatatcggtgagacatctaaatggtaaccgccttgtacaaaaaaaaaaaaaaaaagttctaaatggtaaccagaatctaactgattttttttgcttaattaatctagctcaagttttagtgatttttgttgaagataactgattttttattttttttcattggtaacacttaacagctgaattagttttactgattttaggcaaaatctagcaaaataattaagactttaactgaaaatatcttcaaataattatgaatattaataaaataactaaacaatatctaaataaaatagataaagttatccaatagtctaattaagtcttgtactaattaataaatactaatataaactaatattatataaattaattaattatctagtcaatgtatggtttggtcttagttgatgcatggttgatgtcttggaccggttataataaccaaactaaatcaaaatttcagttacttaaccgaaagtagtcaaattatttgtcggttataatgtaccggttcggttcggttataagtaagattctgcattagctcgagattccattagctcaaggagaatcaaagcgtcgtctcttgttccttccgctgccaacaaa

SEQ ID NO: 2159 - DNA, 3000 bp, Unknown
  misc_feature (1)..( 3000): cDNA_ID_2151775_gDNA_ID_1620497_Annot_ID_158725 3000 nt of promoter + ATG
tcaatactaaaaattaggcatctacttattctggtttatttacacttgcaccaatattgacttaaacgataagatgccaaatcaagaaaaactttggcctctctagacttgttcagaacttgactatgtagtttgatctttaaaataaaataaaattcaaaatataaatattttatttatagtactatttgcatatggtttagctagttttcatagtattgtccttaaaattttaattcacttaaccaagtgtcgttagctcaattggtaaagattctaggcgaaccttagaggtcgtcggtttgagtgacgcttgggacgaaactaatattacatgatatggtttcgggcctgaaagattatgggtttcgatccagatcctcctagatttttttttttaaaaaaaaaaaaaaacataatccacttaacgtcaacgttgtggcggatatttggggtaaatcatcagcctctgataaatgtctttatccataaaggttatggtttttgcaataaaatctagtcgttgaccacaagaaaacttggataatatatatataacgactgaatttattcgataattttgaaagattatggagatggacgaagattaagttatggatggaaacaaggatactttataaaatttgacacaaatttgagtatacttacttattctttttggtcctataaaaagaaatgttaagtttaaatcctttagtaaggcatctctcgatcgattctttcttgtaattttcttcacatgcttttgtaatagacacgagttttgtcagcggtgtctcttttcttttactatttactgatttgttattataattatcacgtttggatttctctttccataaggttaggttttgcttatatatatgaataattaatggttgtttaatttcctactatgattataaaaaggaaaagtattcggtcattgttttctctttgacgataactttctcatatcagaagccatccaacaatttgaagcagttgcttttggtttttcctccacggcttgatgatatgaagtgattgaagatttgtcaacgaaactttggcaaaatggttttgcttaccaaaatgcaaaatcctatacgagaaacatcaccaaagatgttctctgtttctgtatttctttcgttttattcgtttatgtaaatgttacagcttgactttcttagtgtgctttgggtttagatgttgcattatttgtttgcgatgttgcatgcatctttggttagtgaattatttagataaaagcaaaaacataacaaaacaagacaaacgtagacataaaagcaatagaaacagatagacaaatatagtctatactctatatgaatagttgaccatcctacatatgtggaactaaaatagaatggcagtttaaagttgatttatgatggctggctacaagtaggatggtcaactattgatgtgtcaatctcataactctgtactatttccagttgtgcctattgccaatacataagagaatatgaactatttcattagcttataacatacaagttttacaaaaaaaaaaaaatgatctctcatatatggaattcatataatgacttatattagtatcattatcttctcactaattaaattcatatttgacgaaatgtacgtagtatgtttttaacaataaaagtccatttcatttggctagctatttcattttctgccaaatattaaagtctatcatcagatagtttcacgtaggtaggtacagaagagaatgtgaagaaaatacttttcaaaaagaccttgacttaggaaaaagtcattcaatttccacagatacttactatagaaactttttcgatcaaaaaaaggagaggaaattgctaagttatttcgcaccgtacgactcatattattccaaattatgtatgttaataagttacaacattattatatacacacattcactcatgtattcaataattgattctcaaaccattagctatgtacgatacatatgcttgtttcttcatacgacattattgtttatataggtttcactaaaaaaaaacatgcagacggaccagatattaaaatattgcaacaaaatttttcatactctaaatttacaattttgctcatcttatctaaagctataacacataacttaaagcaatatgatgaattcattgatatgtataccgtaaatggctaaaccgcgtgaaatatcttagcaggtaaaaaataaagggaatttaaatcatatttatatctttatattttaatcaaatctaaaacatcttctaagactattagaattgataaacaaaaaatatagttttattaatatatcccaaaactatacatgaaattgttattcatgtatagactgactcaaaacaaaatttagtaatgtttttttttttgtaaaactctacgttttaatttaaagactaaattcaactttgcaaaaatatatttgttactatttttatttatttttcgttgttaacgtatgacaactagttgtaatcaatttactaggtacagtggacaaaatattacattaacatccatatttcagattcatctccttttctccaaaataaaacaagattcaactccttttctttttctgaataaacacggttgatatatatttcagtacataccacttggtgtatagttttgggaaagaaaaaattactagagttggagaaagaatttattgtagcaaaaatgtaaaaccattgtgactgttcagctctagctagattcaatataaatatagtatcagatttgtgttatatgcataaaaagaacattcttataatcacacatctctctctcttcattccccaagcatagaatctctccctctctatctatctctctttcaccttttcttgattcttactcagagaaaattctgcaatatatatcgccatgatccacaccgacatcgcagagatcttatgcgtcaaacccaagacaacgaagaagacaaaaaca

SEQ ID NO: 2160 - DNA, 3000 bp, Unknown
  misc_feature (1)..( 3000): cDNA_ID_3066256_gDNA_ID_1620497_Annot_ID_158721 3000 nt of promoter + ATG
gtctatagaaaaaagattattactacaagcttttacttaaaaaatgtccacagtttttgagcataaacttgcggattagtttgtcttttcgtgtgctacaagtcttttagtcaaattagacgaattttacgctttcttgtatacattgatcctagagttccgtaattgctataaatagatgtcagtttaggagttaccaaatgcaaaaaaacaaaaaaaaaacactatcattaatcaagttccactgttcattttcgatctgcataatgatgatgagtcgtcgctatggagccaagctaatggaaactgctgtgactcacagccatcttttgaatcctagggttcctctcgtgacggaaaatattagggttccggcgatgggagtcgtgagagttttcagcaagatgacatttgagaagaagaaaactacggaggagaaaggatctagcggtggcaaggctgatcaaggtaacaaaggggagcaattaatcgttagctactggggagtgaagccgatgaagatcaccaaagaagatggaactgaatggaaatggagttgctttagggtacattacatctttggtattatattagaactctgtggtcgatttatatgtatgatttgagtttttgtgtggaataactgtagccatgggagacatataaatcagatctgactatagatttgaagaagcatcatgttccatcgactttaccggacaaactagcttattggaccgtgaaatctcttcgatggcctaccgatcttttcttccaggtgacagtcttagctttctatggttttgtcatttcaaatgctttgtatgtttggactaatcttgccaacgagttaaccgcagaggcggtacggatgcagagcaatgatgctagaaacggttgcagcggttccaggaatggttggagggatgttagtacactgcaaatcgcttcgacggtttgaacaaagcggtggttggatcaaagccctacttgaagaagcagagaacgagagaatgcatttaatgacattcatggaagtcgcgaaacctaattggtacgaacgagctcttgtgattgccgttcaaggcattttcttcaatgcttatttccttggatacctaatttctcccaaatttgctcatcgtatggttggataccttgaggaagaagcaatccactcttacactgagtttcttaaagaactcgataatggtaacatcgaaaatgtgcctgcaccggctattgccattgattactggagacttgaagctgatgcgacgcttcgtgatgtcgtcatggtggtccgtgctgatgaagcgcatcaccgtgatgttaaccactatgcatccgtaagtagtgtgaattgtattataggaaacttacttatgtttaaaagatgattagattgttttcatggttttaataaaaattgcaggatattcattaccaaggtcgtgagctaaaagaagctccagctcccattggatatcattgaatctgaagagcttctagctttgttttgtcgttttgatacggtccagttttgttttccttgttcctaaatgggctttaatgggtatttgttaaaatttagtgggccttagagtaagcttatttgtgcttgctttctttttgcttcataaaagagtgttttgtttgttttcattctcctaataaatcagtgcttacatgatatgtttacatatacacttaggctagaaataaaactttacaaacccaaggctttgaagtttgaatataaccatagatatgtccattaaaccccactaaaatgaagtaggcttgaatccatcatatataaatgttaaattaataggggtgggaaaaaaaacgaaaaccgaaaaaccgaaccgtaccaaaccaaaacaaatggtttggtttggttatggttttgtataaaaacccatttgattgtaatttttatttaagttttggtttaggtttggtttgattaaaaaccgtaaaaccgaacgttttttttgtttttgatttaaattaaaaataattgtatatatatatatataatgttcatttgataacatgatatctatcaaactatcgaaaaacaaaaccctaactgtaacctaaactaaaattctatataaattacatgccgtcatttaggatttgagtttacaaattagattttgattttatttatgcatcacacttataattttttttggtaaaaacatgaaaaaaccggaaccaaaccggaaccgatccgaaccaaaatacatatggtttttaaatggttttaattttttaaaaccaaaaactgtaaaactgttaaaaccgaaccgtaaccaaaccgaattttatatggtttttatatggttttacttttcttaaaatcgaaaaaccgtaaaacctaaaaccgaaacgaaaccaaaccgaaaaactgaacacccagcccttaaatataatgaaaatcgaataaatttgtttgaaagaatcgaacaaaattgacaataaaatctaattaggactattttcgtctaattttgacttagttgaaacagaatattagcaaaaatactaaaacaccacaacgcgtaataatacccacacacgatatcattaaatttgaccaataagaatctagctcttggcgaccacgcaagtatcttccatcttgctctccaagaaaaatctacaccggctttaaatttacataaacaccctcagtcaaagaaaagtcgtaaacatagtctctctcatgaccacaagggtaacacagtcatcctaaatataaaccacacaagaaaactgttatactttatacacgtgtcatagtctcattacatctacgtgaagagtttcgatcatcaaccgttcgttttcttactatataaaccttgctcgagacctgcgtgtgaagcgtataaagacgacaaagtaaaccaaaaaaaaaaagagttctcctacaattttcctaaattcttggatttgagatttcactttttccgatttgaaaca

SEQ ID NO: 2161 - DNA, 3000 bp, Unknown
  misc_feature (1)..( 3000): cDNA_ID_2151741_gDNA_ID_1620497_Annot_ID_158717 3000 nt of promoter + ATG
gggatcaagcagccgttactctggtggttcagaccgctcatctggtttcggaagctttggttcaggcggttcttcaggaggatttggttcagaccgttcttctcagtcaagtggaaggagcagctttggtgggtttggatcaaacgatggtaaaagatcttactgagagaagtgttgtgttggttttgacccgactcagcaataatggagttgacttaggagagaactcggtatctcgagttgagtagtttacaaggagtcgagctatatataaattctgtagctacttcttgtctcataaaccaacataagttatatcattatttcatatcctctaattcatttttatttctcaatttgagtgaaatgtgtttcccttacttcgccacttccatttatgaatcttgttagattgtgagaaaaggaaataatgtggttgatcaaagattcaaatcatccctagttttgatttcttgttagatcttgcaagtttttggtagaaccatacacaagaaaaattgttttaagctttaattctcatatctgaccaacaaaaataaaacacagtcgacaattattgttcactacaaaaagcattactcttatgtttcacaactaattagccttcatttcgcaaaacttgatgcactgcatagcaagagcatgcaactagctgctgaacgaaaaggcttggctctgcatagctagcataataataccaagctccttgggtgtgatcccctttgcagtgaatccagatttagtttcatccagtcttataggcccaagaacgggttcttgtacacatacttggtgattctgagggttacaaagctgagatcccataaacgttgaaaggcgttcaggtggtggtataagaatcattgagatgagtaaaacagtcaacaccacccacaagggcatgcaaatcaatggtagccatctcaacaccatcccccagcttctccatttggagacattttgaaaaaaactcaagaacggcgcctgtacaaccgtcaacactcatccacagctgatctgaagtcagtaatactctggaagaagtatcagttttgaacattttaaaaattgatatttacgatttttttctttttagggtgttaaggaatggggattatcgacaaacaagtgatgaatcagattattaacaaaatatggcatttgttgggatgaacaaatacaaacaagtcggaatcggatcttgcaagtttttggatagaaaactaatacaaataagttgtttcaagctttaatttctcctatcggacaaacaaaaataaaacacagtcatcagtttggtttagtacaaaagcattactcttatgtttcacaactctcagcgttcaattcgcattacaatccacaaaagccttttgctttggcttatacaacataacgataggtaacataacgaccagccgtttcactcggacgaatgatcttcacgacttgcccacgttttagtccaaagtatcttgcgattggatcagtcacttggatccttggaagctaacaacacccacaaagttccaaacatttaataacacaacaaaaatttcatcaccaagaattcaaacaaagtttctatatactactaacctgtgtctccttcactgtgtatctctccagtaaagttttcttctcttcagtggtaagaacttgatgctcaggaacaagaacatgttctttaatgttcactagcatttccgcctcctgcagcatccaccaccaaatcatggtttagtaggattgtgatgtggatacatcatcatcaagagtcaagacacaaagtgatttgttttacctggaaaacttccagatgaaacttagaagagatctcactaatgcaagttcgagcaaacggggtcaagttctgttgcacaaccaaaatagctctgaacacattctctgatttcatcctgttcgtgtacattttcatcgtcttcacaccaactttcgcctcatcagggaagaatatatagagctacaacaagagcacatgaatcagcgactaaatcaaacacacataaacaatctttctaccatatccacagcttcttagagattaaagagatgacatttatctatacttttgtcaaaatctagctctctgtaacattccatgtctacttactattcacattcaacaactagataaataatgatagtctccagctaaagaacactaaagagaagctgataatcacattgaaggagagacatacaactacaaacctgatcactattatcatttcgcttagccttaagagtaacaagatcctctcttttcatgttatcaccatgtttcctaataaactgttgtttagtcatcgtaagttcagaatccgcgataaaatatccacgatcccttaacatctgcatcaacgtcttctggattctgtacaatcttttgagctcctcttccgtcaacatcttcttcaccaagttatctgcagctttaccaaaaccatatcaaaattagggtttttcaaaaattgacagaaacaattaagagtttatcaatctctttgagaatatatacacagatacgaaaacttacgaatagagacaaatccacagagatgattgaagaagcgatttacagagagaacgacagtggaagaagaagaagaagaagcggcgtttcaagctttctccttttacctcgaacccttttctcaattctattatattgaagcttttattgcatttgaaactcccaatttataccgactttatgttttaaccctcaactttattttcgatatttaaactccaatccttaatagcctgataaaggcccaatgggcttgtacgacccaacatacttaaaccctttagttgatttttctcaacttattacactgttcttgttggaactaaaaccctttgccttctttcttcatctctctaaatccctaattctccaaattttggggttttacattttccttatcaagagaacacctgaatctgaaa

SEQ ID NO: 2162 - DNA, 3000 bp, Unknown
  misc_feature (1)..( 3000): cDNA_ID_2151729_gDNA_ID_1620497_Annot_ID_158714 3000 nt of promoter + ATG
cttcattgataccctagtttttctatgtcaatatgactgactcgtaggtttttttttttctcattttgtttactataaattatcgtaatcaaattggaatttgtatcattttttttttgtagatgtcagtggacttaaagcgtggagaaactcttccaattcatgtaaatatgacgtttccatctttaccttgtgatggtaagagaaatccattgatcacttataagtcaagtctatattacttttcttccgccataccttctggaatacttgtcattgtagacgtaatcatttgattttttttctttttgtagtactgagcgtagatgctatcgacatgtcagggaagcatgaagtggatcttgatacaaacatttggaaggtaagatgaatccagatgctaatgcaaatcacaaatttcttcagatgttttcgtttccacctttttgaaattaccaaagttcattttgtttgattgcgcctaagacattatagctggtcatactgttcatatataggttaaacattatatttgaagggaactatttgaatatttctcttcgcatctttatctcacttcgtatggcattttgctctagttgtactgttttatactcatgttaattgctcactaattgtgaatatctgcagctccgtctcaacagtcatggtcatatcataggcacagaatatatatctgatcttgttgaaaaggggcatgagcatggccactcacctcacaagcatggtaacattctcaactttatgagcctttaccgagtttgtaccttttctgagagcttcttttcccttaactgttgttgaatgtaatttgtcttgaatcttttggaagaacagatagtcatgtgcactttgaaactaggttcatgtcaaaacttgtagtaacaatactcagatataactgataatatgatgtacgataatcaagtatgttgtatctggagaaccgaattactctaaattttgtgcttccaagcaaatattaataggaatcttacaagtctaattgaggcttcttagtaaggtgagtggtagatatgtaagagagccccagcgatagttttcatggtagctaaatgtttttgggtataagaagaaagacttaatcatgtatacactttatcttttctgcttgctgaagatggcaaagaagaacacaagaatgagactgaaaccgaagcattgaatattcttggctttgaccaagctgctgagactatgattaaaaaagtgaagcaagcattggcagatggagaaggatgtcgggtattaaccgtttctcttgtcattacacaaactagagattttgtgttcccggcgtttaagaaaacagagactaatatttggctattttccaggtttatggtgtcctagatgtacaacgggttgccggaaacttccatatttcagttcatgggctgaacatctatgttgctcagatggttggtatcctcatctcgctttattaaccatccccttactaagaacatgctttaaattcagattcgttaaagtagtttaatttagtaccgtatgatcattattgacgtttgtttccattgatttgtcaacagagaaagtataaagccagaatttaacttatcaataaccgataaattactctcataatttgtgtttgcacctcattcactgacttactacttgatattccttgttagtatataactagtctctttactctctgaacagatatttggcgggtccaaaaacgtaaacgtgagccatatgattcacgatctatcatttgggccgaaataccccggaattcacaacccacttgatgacaccaaccgaatactccatgacaccagtggaacattcaaatactatattaaggtgtttatccaaattcgttactcttcttgtactcgtatctctccgctggctgtatattttatatacttcattatttgtttactttgaagtttgaaatcatttacctgtatgatccattttgtttcacacaaatccgtatttgtaaggtaaggtcactaaattctttctaatatggcgcagattgttcccacagaatatagatatctttcaaaagacgtactgtcaacaaatcagtactctgtaactgaatatttcacgccaatgactgaattcgaccgtacatggccaggttagtcgatcaaacttcatttccagtatgcacctggttcttattactctctttctgttttctgatgtatctttttttcttccagctgtttacttcttatatgatctttcacctatcactgtgaccatcaaggaagaacgccgtagttttctccacttaatcactcgtctttgcgctgtattaggcggtacatttgctttgacaggttagtcccatctcagtcttgcctccaatactcaatctttcaaaatcttttgcctaatatagtttatctcataccttaaaacaggaatgttagatcgttggatgttccgctttattgaatctttcaacaagaagccgagtactagagcgtaaactagctgaaacagagacaaaacaatgagaaacaaaaaaaaccaaaggaaggaagaagaatctctcaaatcccaaaacttgtatctgccttcttcagacaacaacacccaccagagattccaggattgatgattacattactcagaaactctagaatccatggatatagtttttttttgagtctctcttatgtattactctgattatctctggttaaactagtagagttaatttgtaatttttattcaccttgcttcctgggattttaacatttttgcatcttttcacttgtctcagtaaaaaaacaaaattatactgtagctcaccgtaagataacgtacactcgtcacaggtgatcctgtcctcacaattctctctgatttcgcttactctttcactgaaaccctaatttggggtttttcagatttccttcaatctctcgtcgtcatttcttcgtctcaccgttgaatctgaaa

SEQ ID NO: 2163 - DNA, 3000 bp, Unknown
  misc_feature (1)..( 3000): cDNA_ID_3066268_gDNA_ID_1620497_Annot_ID_158716 3000 nt of promoter + ATG
gcctgactgagaagaacggtcagagccaaagtccccgaaaccagaggaacgattgtttgatgatccgcctgaacgaccaccaccaaagctgctccttccacctgactgagatgaacgatccgaaccatatccctcaggagaacgcataccgaagctcccaaaaccagaacggtcagaatcaccagaataacggttgcttgatccgcctgaacgcccaccaccataaccaccactgctgccaccataaccaccaccgcctgaacgaccaccaaagcttgaaccacgatccctcatgcctcctccaaaggaaccaccggatcgagaacctattccttcaaacatgcttgcgcttccacgttccacagcaatgctagggagctgaattcaaaacccaatggatacaaacattgacttcatacattcaggaaaagaaacaaagaagtaaaaagaaagtcagattatctaacctcagtgaatcggctcccaacttctctctcaattatttttacagccctggattgatcttgactgtagatcagaatagcacttcctttctttccagcccgacccgttcgcccggttcgatggacaaatgtctccgtgttattaggaagctcatagtgaatgatctattcacaatcacaacacggatatataggtttagttagatgagaaccaaaactcgttaagagcaagaaaagtgtagttttgactcaccaaatcgacattaggtacatcaagtccacgggcagcaacatcagtcgcaacaagaatattgaaatgcccatctcggaaaccagcaagcgttctttccctctgactctgggatatatcaccgtgtaaagcttcacatttgaagcttctagccaatgcatatgaaaggcgatcagcatctcgttttgtttgtgtaaaaacaatgcattttcctcctttggcatgctcctgcaaggaaaattgatattattaactctttccatatacaactgacaactccgaaaaaatacacaaataacttactcagttactgaataacacaaaatttaactcatactcgtttaatagcaaagtaaggaaagcataccgttacaagaggaccaataatggatgctcttccataagaatctgctatgatagaatatgtcgtaattccatctgctagtttctgatcagaatctccaacctgaataacacatcacagttaggcaaacaaaaacatagaagcacatttcacataagaaatcacttcattaacaactctgctaactccaagatcaattattcagaattgtgagaaatttcagagggtacaagactactcacaagatcaactgtcaaaggattattcaggtacttcttagtgagagatctgatccaactcggcattgttgcagaaaacatcatactctgacgtttctcaggcaacttttccaatattatttcaacatcctcagcaaatccaacttgaagcatctgatcagcttcatccagaaccacaaactgaacttccgatagattcaaagctcctctcttcatcagatcaatgacacgacctggagttccaaccgccacatcaacaccatagtcaagctgcctcatttgctgtccaatcggtgtacctccataaagacaaatagtatccaagctcggagcagactccctaaactccttctcaacctggcgagcaagctctcttgtcggtgccaaaaccaaacaaagcggattcctccctcgtctatcacatcaaaaaccacataaaaccccaaaaatcagtaaaccaaccagaaaacataattctctgaacctcaaatgactcagtaaacacaaacccatgtttagcgttgtatttgatgattttgtcaatgataggaatcccaaaagcaagtgtctttcccgttccagtcctagcacgaccaatcatatctcgaccctccatcgctggctccagcacagctttctactcaaaaccacaaaacttaaaacccacttacccttcttccaaaaacatgggaacacgaaaagctgaacaatttaaaattttgatctcacaacattacatacctgaataggaaagagtttctcaatacccttactactcaaagctttaacaatctccggagatatcccaagctcagatatcgcaagcccatcaccaccaacactctccgaatcaccaacccttctctcgctactctcagagatcgcaaatccagcttgagaaaccatcgaagctctaaaatccaacggcccagattgaaaatgaattcctttcgcttcaacaccaaacggaaacccagctttgacatcggaagatccaattaaggctaggtcggagactctagtggcggctggggccaggttgtgaaacagaacagtattgattgaggtcaacgaagcggagagattcctcttcgacgcatcaaggagagatcgtcgtagcactgtagtgatcattttcagattcaggtgttctcttgataaggaaaatgtaaaaccccaaaatttggagaattagggatttagagagatgaagaaagaaggcaaagggttttagttccaacaagaacagtgtaataagttgagaaaaatcaactaaagggtttaagtatgttgggtcgtacaagcccattgggcctttatcaggctattaaggattggagtttaaatatcgaaaataaagttgagggttaaaacataaagtcggtataaattgggagtttcaaatgcaataaaagcttcaatataatagaattgagaaaagggttcgaggtaaaaggagaaagcttgaaacgccgcttcttcttcttcttcttccactgtcgttctctctgtaaatcgcttcttcaatcatctctgtggatttgtctctattcgtaagttttcgtatctgtgtatatattctcaaagagattgataaactcttaattgtttctgtcaatttttgaaaaaccctaattttgatatggttttggtaaagctgcagataacttggtgaagaagatg

SEQ ID NO: 2164 - DNA, 3000 bp, Unknown
  misc_feature (1)..( 3000): cDNA_ID_2151733_gDNA_ID_1620497_Annot_ID_158715 3000 nt of promoter + ATG
cataatttgtgtttgcacctcattcactgacttactacttgatattccttgttagtatataactagtctctttactctctgaacagatatttggcgggtccaaaaacgtaaacgtgagccatatgattcacgatctatcatttgggccgaaataccccggaattcacaacccacttgatgacaccaaccgaatactccatgacaccagtggaacattcaaatactatattaaggtgtttatccaaattcgttactcttcttgtactcgtatctctccgctggctgtatattttatatacttcattatttgtttactttgaagtttgaaatcatttacctgtatgatccattttgtttcacacaaatccgtatttgtaaggtaaggtcactaaattctttctaatatggcgcagattgttcccacagaatatagatatctttcaaaagacgtactgtcaacaaatcagtactctgtaactgaatatttcacgccaatgactgaattcgaccgtacatggccaggttagtcgatcaaacttcatttccagtatgcacctggttcttattactctctttctgttttctgatgtatctttttttcttccagctgtttacttcttatatgatctttcacctatcactgtgaccatcaaggaagaacgccgtagttttctccacttaatcactcgtctttgcgctgtattaggcggtacatttgctttgacaggttagtcccatctcagtcttgcctccaatactcaatctttcaaaatcttttgcctaatatagtttatctcataccttaaaacaggaatgttagatcgttggatgttccgctttattgaatctttcaacaagaagccgagtactagagcgtaaactagctgaaacagagacaaaacaatgagaaacaaaaaaaaccaaaggaaggaagaagaatctctcaaatcccaaaacttgtatctgccttcttcagacaacaacacccaccagagattccaggattgatgattacattactcagaaactctagaatccatggatatagtttttttttgagtctctcttatgtattactctgattatctctggttaaactagtagagttaatttgtaatttttattcaccttgcttcctgggattttaacatttttgcatcttttcacttgtctcagtaaaaaaacaaaattatactgtagctcaccgtaagataacgtacactcgtcacaggtgatcctgtcctcacaattctctctgatttcgcttactctttcactgaaaccctaatttggggtttttcagatttccttcaatctctcgtcgtcatttcttcgtctcaccgttgaatctgaaaatgatcgccggagtattgcgccgatcttcactcccgtcgaggcagactctctccgccgcgttagcctccttcaattcgtgtatttcgcacaatctcactccagccaccaccggagcttccgtcagctctcgattcactctcgcgtcgtctcctaactcgtttggcatcagagcgaggaacatccacattagatctgagccgtcgatgattgttcccgcaggaatcgcgtcacaaggttacgccactgtcacaaaggatcgcaaaaacgagattaagaaagctaagattaaaatttctccagacaatgtcagaccattgagtaggaaggagatcgctctccaggtatatgcatttttgttcaaattcatagaatattattcaaagtgcttcatcagattcaaattcgaataggaatcggaatgtgaaattcattgaaatgatttagaactgttgtttatgttgttgttgttgtgtgtttggggttgaattgtagaaagaggcagcagaagaaagcacatcaaagataaaaggaacaaagatttgtatagcgattcggtcttttgttaacccggaaaagcaagcttggtgtcttcctcctcacactcgtaaagtcgcaatgcccgatacacgaactctgtacacggtgctaagatcgcctcacgtcgataagaagtctagagaacagtttgagatgaggttcaagaaacggtttcttgtcatcaaagctcagagtcatgagttgagcaagaagctgttttggttaaaacgttatcgtattcttggagctcaatatgaactccagttccattgcaagacccgtttggatatgactcaagtgttaggcaacatcaatggctccaccaccaatgcttactgagatggctaaagacatcattttgtagaagtttcaagacccaaccgggtactatgcaataatttcgaaccttacggatccatgaaaccagctttgcttcacatcagatcaagtagttattttcttgcttagtataaacatgtgtttttggacgattttgaaagatacaattgagtttcagttacagtgctttccatttattcattagccaatcaaagtctttatacatcaccaaggattgagacacatttagactgctaaaggtgtcattttgagaagttatagaaacctttgacccgaccatggaatgatgtcgaactttaaggatccaagagctcacattttaggtgtattcattcattaggcaattctaagacttttacattgtacataatcactaatgatttgagacatatggtataggttaatttgatagatctgattccgaacctgagctattgccaatttgccacactacacaaagttacaaaaaacagaactcattaactctttgcttcacattcaagaacacctttgggctcaagcaaaaaataataatcaactctgtttccttacacaagcttgcacgtgtaggaacataccatacactcacccgcaggtgattataacaaagttccctttatacccgcctttgattcttcttcttaaatctctaaacccttttgccgtctccctaaaaccctaattctcatttctggggtttcacatttcatcttcaccagaatccatcacactctctgaaatctgaaa

SEQ ID NO: 2165 - DNA, 3000 bp, Unknown
  misc_feature (1)..( 3000): cDNA_ID_3066272_gDNA_ID_1620498_Annot_ID_158745 3000 nt of promoter + ATG
tattgaatttgtccttttgtcgttatttaaagttgcttttcatctgttatataagactcataattgttttttcccgttatcttgttgcaggctatgtttgaagggattcttgttgatataccatttgcaacgtttttcctcagcaaactgaaacaaaagtatgtaaatttaatttctacctcaatttcctgtcacttcattcgttttttaagcccgcatagactttttgaacatgttgtgaaacttctattgttctttggctaggtacaactatttgaacgatttgccttctctggatcctgagttgtataggcaccttatatttctgaaggtgagttttgctgaacattctatttaattgttgctttgtagaacggggagatagttgctagcatagatgtgcgagaatgctgaaatctgtttgtttgtttttgtttcgaaactgaaatttgtttgtttacctacctacgataattttggctcttttttttttttttttttttgcttcttagctttatacacctttttatgtattcattatgatatttgcagcgttataagggtgatatctcagacttggagctttactttgttattttgaataatgaatatggagagaggacagaggaagagctacttccagggggccaagacatgcgagttacaaatgagaatgttataactttcattcatctggtttccaatcatcggttaaattttcaggtactggggaaccacttacctctcatttatcttggcatacctgaggtcaccctgtaaatcaacagctattgatatcatctcatttgcagatacgccagcagagttctcatttcttgagggggtttcagcaactcattccgaaagaatggatcgacatgttcaatgaacatgagcttcaggtgccaattaagtgtataattatacttgctttgttagttgttccctcgaggagcatgaagagagaaattttacctttgtgggctttggttgcaggttctcatatctggttcagttgatagtttggatatagacgacttgcgaaacaacactaattatgctggaggctaccacgcggtgagtggttcttcactgttagccgaaatgccattgtgaattagtgtagggacacttttggagtattgttatatatgattatatcgctatgttgttgacacttgacagggacattatgtgatcgatatgttctgggaagttatgaaaagcttctcaactgaaaaccagaagaagttcttaaagtaagcaaactttgcagttactactacagtctgtgtacgcaatgatttaccggagtctatgaattttctaagggaactaagaggtacctctatttttcaatttcaggtttgtgacaggctgctcacgaggaccactgctgggtttcaaatacttggaacctgcattctgcatacagaggtaatatacacagactcacaatcgttttgacttttgatgggccctggacaatagaatcataaaatatccatcctcgatggaatgtgtatcagggctgccggtagtgcgagtaatgaatcagttgatagactaccgacatcagccacttgtatgaatcttcttaagcttccgccctatcaaaggtttgtcctctcataacacaaactctttggttttgcttagctaagagacttgttttgttgccaaatagcttctcttggtgttgtaattggaaaaagcaaataaagcatgtcttgttgttaatgatgcagcaaagagctacttgagaccaaattgatgtacgccataagcgcagaagcgggttttgatctgagctgatggaatagcttcctgccttaaacacagacttcaatggccccaaattgacacccttttttctagcattcctcgttatggtataaaccgggtaacctgtagactgaggcaggcttgttggctctaagcatctaagagacggatctagaaggagaacatgtagtagagattacttgactaatgggtttcatttgcagctctcgggtattcgctttcaaaaagtgtgacaaaaaaaaaaaagtgattacagggaagtctttatttggaagctcctgagagttagtcttgggttaaaaattcaataaaagaaatggtaaataagactggtctcaagaggaacttaaatgctgtaaattattttgcttaattaatgcatgttacacagaacatagatgattattttgatacttatttgcatcataccatatatcttctataaaaagatgcattttagtgacttagtggtaagaatatccttttttttttttttttgtcatatgataattattaaaacagaaacaaaatgacagaaaaataacgagaaatacaaaatgaaatttaaactttactttccttagacacttgattgtgaagtcatgaaggctctccaagtgctaagtaaaacttagactgaaaccttctgtcttgaatcacactcccaagaaatggaacgcgcgatcagatttgcgtttgtggcaatatgacggaatgtacaagattcaaatgcactaacaatctcatggatttgtgttaaccaatttctatagaaaggctatttggacggctgcaaaacggcgttaagtgcggctggacagtccaactctattatcaccgtggtaagaatatctctatatacattttttgtcgcacttatcatgattaatcaagtaaacataattgttacaaacactttataaattaaaaaagcttcaattcaatttgcacagaaaagaaaaaaaaaagaagaagattcaatacagagtataccaggagcatctggtaatgtttatatctgaggacgttttatttaattttttggaacgaaaacaataatccgacgatcgtatttgcacgtcgcaaatccgctcttttaatcaaagatctcgaccgtccatttttagttaagactttagagagctgataagtggaatagtggagatttgcattcgcaggggataaggatcaaaa

SEQ ID NO: 2166 - DNA, 3000 bp, Unknown
  misc_feature (1)..( 3000): cDNA_ID_3066296_gDNA_ID_1620498_Annot_ID_158772 3000 nt of promoter + ATG
tgatcacaaagcttgtcgggatgtccctcgttgacggattcagatgtgaacaaaaaagattccatttttccgatctgattcacgaaagaaacctaatacagagcagagaaatcaaacaagatcaatgagaagtagtataaacacacataacaaactcgaatcaattaaaaattggaatctagattcaataaccagatctataaatcaacacttctctcaaacaaaaatcgacacttggttcaaattctacagaaatgcaggaatcttgagaaagtatgaatcgaagaaaagtgaacataccttaaaaggagattagtaatgaaggttgagctaaagaaatgtggtggtagtagtagtacgaaggtgaaggaggagcgtataagctttatatatacgagctcgtcgagggggttggtgtaagatcgtaatttcgtccagattcattcccagtttcatctaactgtgttcagacaatgagatctagatatctgacggttcagattagatctagaaatgtaagaaggttttaaaccgttggatttgcttcactggaccaccgcgtgcgagtacaacttgacagcatctaatgaagaagattgcgaatcacgacgattataataatagttatcggtactcaaattaatgctgcaaattagatatttttgagcatgtaaagtgaatttaaagagttaatgataattaatgtcgtaaatcatgaagaagttgtgtgattagagaagggtttgtgtgattgtgtcggtgaacataattagagattatacacacacaggctgtctctttactcttttatagaagggtccacttgccaccggtaaaatgacaacatagaattcttcttttgtttgctttttagtagtgtcggctagcttaggttgtcaaatatgactgactattgttgggtggtctaaatctgatcttgtctgatccgaaaaaggtaaaactgcacagttacgccaatatgcgaagttcatgtccggtctgaaaaggctagatttagttattgggctcaaaatgggccaaggccttgcaaataacgaaatacaccaagcgataaaatttgaagcccatgactatgaggcagttgttatttgttaagttagagaagaaattggaacaaaatacactaaaaccttctataaattaataggtcaagggactggcacctcctagaggattccgatccgctcttatccaaagatcggagctttacaaagaagcaccgtgctcaagccaaagcagcaacgaaggagaaattacctgcaaaaatgatgacattgtccgatcttccaagtgatttggcagaggaggttctgtctaagattccggtgacatctctgagaggggtcagagctacttgcaaaaagtggaacactttatccaaagatcggagctttacaaggaaacaccttgctcaagccaaagcagcggcagcaagggagtttatggtggtcatggtgatggattttcaggtttatttgatgggcatcaatctccataaggacgttgacgcaactataaacggtcaaggtaaacttattagcttagacgattccaatcaagtcgatatatcttacgtctatcactgcgacagtttagtcttatgcatcccaaaagactgcgctaggcttgttgtttggaatccgtattggggccaaaccttatggttcaagcccactagtcttcgccattttccgcactggtatatgtatgctattggataccagatgcgaagaggaaaccgagacgcgaaaacttcaaggtggttgttgacttgtagaccgacgaccaaaactatcacaaagaacacgatcgatcacctttgaaagtcaaaagatagatactcgcttcacatctatattttacaactttattatattccacacaaatcatatactatacatacattagtctccttttattaaataccagccgtctattttggtttttcttattacatgcttaaaaataccaaatgcacaaagaaggatacttttacccactacaaaatatggacttatctgaaaatttttatcgaacacatttttcttattgaaatagttacctatgtattagtacatatattttgttacgggaaattcaaaaaattttatatacaaccaatcaaatggctaattaataagtggattaagacctttgacctcaaaacacgaccaagtaaaataacttcaagttgattgataaaggcgtactataaagagtagacaaattgctaacatgcgcctaagcgcaccctatatatcatttactgtaaatttccgccgggaagaaaagtctgcgtttcttcaccaaccctacacgaaccaagatagatagaaaccttctccttcttctgcttcttttatcatcggagaattcgaatcttcttttcctctttttgagattctctaattatccttttggaagaggtaattcgctatcttcttcttcttcttcttaccaactcgcttaaatttctcttttttgggtctttccccgtatttatctgtaaaatttgtttctagggttcgatttcatgccgattagattgtgttaacggatttttcggagtttattgatagttatttcagtttgaaatccattttaggggttacgatcgttgacttgtgataagtctaggtcaccaaatgtatcatttcttagtgtctcgatttttatcgaattatgctctcgtaatgaaacttcatcatcatgtagatgaaggattttactcttctgatacaaaaatttgttttttgtgaaaaaaaatctgtttccttttttgttctgcttaaaccctataattagaaactttcgtcgagcatttctctataagtttgtacagtttgctctatttcatttggggaagaaattagttacttctaaattttcgtatgttataaagtcttgttctgcaacaccattactgacgtttttgcgttatgaatatactgatacagtttcgtgtgagagagaagcgta

SEQ ID NO: 2167 - DNA, 3000 bp, Unknown
  misc_feature (1)..( 3000): cDNA_ID_3066330_gDNA_ID_1620498_Annot_ID_158757 3000 nt of promoter + ATG
aagggaaagcctactcaacaggaccagactttaatacttcgacattgtcacacctccaatctcatttggatagcaccaaacatcctctcacccttggagcctgaacatttagagtgcattatgggatatccaatgaaccacacaaacatcggtggtggaaggttggctgaaagattgaagttgtttgattactgcttccaaacagacacattgggttaccatctctctgtactcaagtctatgtttccccaaggtttaacagttttatcactctttagcgggattggtggtgcggaaattgcattggaccgtcttggaatccatctaaaaggcgtagtctctgtagagtcctgtggattgagccgtaacatactgaaaagatggtggcagacttcgggacaaaccggtgagctagtgcaaattgaagaaatcaaaagcttaacggcaaagaggctggagactctgatgcagagatttggaggatttgactttgtcatttgccagaacccatcaacaccacttgatctctctaaagaaatctcaaatagtgaagcctgtgaatttgattatacgttgtttaacgagtttgctcgtgtcacgaaacgtgtcagagatatgatgtagtgaagttgaccaagagcctttacgtcctcaagaacctggagacttgtctaatctcagaaggagtcttccattttctttatcgtggagactttcaattacggaactgtttttcttgttttgcagttgatgctttaatgaatcagtctgtaccataatcttcatagaagcgtggaatatcgtcttttttatttttttgctatgttacttctcggagagataagcagtgaatcatgcggtcaatgttgttgtgtactgttcacaattatgtataatattagcactttttttagctcaatgttgttgattgcataattcatactcatcttacgtcaaaagtaactggaaatgatctgaacttctgaagtgtctaatccaaaatataaacaaatctaagccagagtaaaaaaaaaactgtatgattagatttgaaatagagaaccacttgattgattgcacaggaaaatcctcaatgttgagtcactgaggcttctcgatcaagtctattattcaagccaacttagttgcattgttagcctacaagcattgactagagagatagagagagaataacaatgggagagtctgcaaccagactgcatcaggatctctggctaaccttgcctcctgtcagcttcgctgactcaaacaacatgtgattgatgagtccccgagcagcactacatatacagtaccagagaagtttgagtctttccaaacttttcaaatagatgtatacaacatacttatcccaagagtattctgtaatatatgatctcaagcagctgtatatgtgtgtgtttgtgtgaaacatcatcttttgcagaaacatgcctcaacgaacaagttttacatctgatctaattataaggttttaagttatcgtattcagtagagattggggaaaaaaagaaaactcactcatctttaagcttctgaatcttctcagggtctgtctcattcatgtgtttcttaaattgttgcctcaccataccaaccactagctcagtgttgtgttgctgcaagacacaaacgtaaacataacaaaaagttcacttcatatatctcctccactccaggatatctaatcctaatagaaacacacaaatctctttctcgaggaatcaaaacagaagtgacgataatatcaatctcaaccttttctgcttgcagcacatcaacacatattttcaggcttcaatcaaactgcattcgtgtataacttacctcaagagaatcgactgacacaaatgaaaacctctctacattttgctctaaattactaagtgactaaaagtgaaagcatgtgaaggtaacgaacagtgaaataaactcgatttagcttcaaagtaataaaaatgaaattctttaatccaacattatactacaaacaagaatagcaatcaaaccaaacacaataccatatattctgagtcagacaaagcaggttcatattcaaagctcagagaaacaaactagttataaacctcacctgcttaccaataaatttagctctacgaagacattctcggtacaactgcgcataaaaaagagacaaatagatcagtgaaatagcatcaaggaaaggtaaaacaaatcacaagtcaatgtgggaattgttactgaccctaaccacattgttagcgagttcaggaggcagagaagtttgcagagacggcattttcacaagagatcttgagcttcttcaattatagtttcttttcctgtaacgtaaaacacaagatcgcaactatcaatcagaagagacgatgaaatacacagaaccaaaaaccataaaccctaaagctgcagtcactcactgaagagcaaagcttagtcattgaagtccacaactcaaataaaagttgatcgagaaggcagagagattggattaaagagaagacatagaagaaatcaatacaacatttcaagccaaatagagagcgagaggaagagaaagacaaatagatcgaggcttaccggagaaaagacagggcggcgaaatttcgagcttgagagtctcggagacagcggtgtcagcttccgattttcagatttcaggtaaagcataaacgacgtggtttcatggtttatttcttactaacggcccaataagtaacggcccatttatatttgcacgtagatatttaaaacaatctcatccgtccattaccaaccgtagattttactcgtctcagagggaataaataatatcctacgtggttatagcttcagactccagtggcatttcccgccaaaatcatcactaagactctagcctacattgaaaactggaatcgtctcttcttcctttaattcgaaattccctaattctctctccgtaccgttcgtctcctctcctcccaaacagttgctatg

SEQ ID NO: 2168 - DNA, 3000 bp, Unknown
  misc_feature (1)..( 3000): cDNA_ID_3066313_gDNA_ID_1620498_Annot_ID_158763 3000 nt of promoter + ATG
caaaagaatatgcttttaaggttagactttcaatgaaacatcaatttatcaagaaagaatcaaattgtatcaaacaaagcgatcaaatggatatgaaatttaatactggaatttgccaacttgggttttccataaactctcaaatgtttgattttgataaactcttaaatgtttgattttgcaaggaaagaaaaaaaagtaataatgagagagagagagagaaaaaagaagaagcgacgaagaagaaggaaaaaaaaggaacgtggagagatgaaactttttttttaattataattttttaattttcaaggacaaattggtcaaaagtttaatgaaaaagttggaaaagtgcctcatccctgacaagtgcctcaaaaggaataaaattctctaaaagtacctaaacgtgtcacattcccaaaaacaagatcgatattatttaagcttaaattaccatatgaaagatttcacaaattattaataatatcgactgtacagttgccatttggacacgtagatgctagacgaaagtcgatcatatccgaatcttctacaatgttacttgtataataatttatgtacctctttttaaaataaaataaaacaaaataaagggtttttgattgaaatgcaggaaaaactttaggcgttaggatgttacatatcagatgtgggagatatacttactatatataatctggtataaaccaagaaaaaaaaacgaatttggtgtaaattccatttccatagtattaataaaaccctgataaacaatactaagtaagcacaatatggcttgaattttcacagattcacgatggattgtaaccactaaaagctatcaagattctaacagagtatttgattgttttatttaaaattaaaatatataaataattttaaatatctctgaataattgggtagactttaaacaaaagatccaccccaaataccagatcccccctataaatatttggggaaaatacaccagatgatattctaaaaattggatttatctatacagtatacgtttgataaaaaaaatgtatacagtatacaaaatttaagttttttttttttgttttcttttataaaatgtatcaactaaattagaaacctaagaaaatatgagttatctacaaatttgattagaaaacataattaagttcagaactcacgggcaagaatttgacgacaacaacaaatcaacaatagtaacgtaggtgggacgattgacgagcccttgccaaatcttcgccttgatctctccaaaatatgtaaaaagatgatacgcatcacacatatttatatacacatacattgtctactataattaaatatctttattttaaaatggaaatttgaaactcaagaataagtaaagatattcctacaaaaaaaaaagaataagtaaagatatttctttgcataaaaaagatatgttattgactgtcaataatttttttatggaccctgatcataacaaactaaatttggataagatgtcacaaaaatgatcttaactacagttggatgcattaaagtttatattataaagtcacactgtattatagtattaattaagtaagcttttacacgtgttcaatagtatgataccaacgtaccgtgtttagttatacttcgtataacacaacttttgaatttatttttaagatctcatatttatatctagaaaaaacttgtagatataatatctttaaaaagtttaaaaaaatattaaaatttggtagccaacctaaagaaaaacgtatcagttgaatgatttaaatgataaagtaactttgcattatacatttttactccttcgcaaagtgacttgagtccattataatgtaattattaatagacatttgtagttaattgacgtacttatttatataacataacgttcgaatttatttttaaaatacgttattcaaactaaagtaaaaaaaggtagaaagaaaatttgtatatataatgtctatagttaaatatcttcattataaaatgaaaatgaacaagttaataataaataaattaagaaatttaataaattgaaattcattgcattctaatataatatattttcttttaaaaaattaaataaatttaataaattgaaattcatagcattttaatataatatatatatatatatatatttaataaagtaaataaatttggttagatttcagaaactttccattgactagagttggatatgctttaaagtataaattatatgctttaattttttaaaagttgttggatattttatttttttctgtcagcattatatatttggtgtcattagatgaaagaagctagagtgaatttaccttccacatagagactcaacatagaaagggaccaaccgtatcagttagcaggtctacaaaaaaaactatgctcttacatacaatgaacatgccaattaaaccaattagagatgtcatacaacatatatttttgtccacagagaaaagatcaaaacctaacaatagaaaaggactttaaataaatgagacaacgtaattgttggaataatttacatcataggtggtaataatgctgtgataacatatatcactacgaatataatgtatgataaactaagctaatacaaccatttaataactacatcgtgtagagaagctaaccaagacaatgatcattaaactaaacattaagtttttttggggttaaatttgccaaataccctcaaagtctagtctccaaacttttagctttatcagtatacaacagtacaaactaattgttaaattcttcgaacccaaatcttttcaaagtcttcgaacccaaatcttttcaaagtcttcgaaattcaaccagacttgttttttattcattcttccgtaatatataaagtaacctgaattattcccgccactgatgttccccaaatttcatcagtaaataaaaaagtttggagggaagaaaatgaaaaagcaataagaaaaaaaagaaacgcaatg

SEQ ID NO: 2169 - DNA, 3000 bp, Unknown
  misc_feature (1)..( 3000): cDNA_ID_3409333_gDNA_ID_1620498_Annot_ID_158768 3000 nt of promoter + ATG
ttttatccacaactaagtacaagatacaaatttaacgatggtttctgagtgaaagctgacctataacatggagtttggttgtccaagagcatgattctttaaacaggcgaagacggtaaatcggagcaccatatgtaatctacagagaaccatctaaatatcactttgcattcaacaaacatagacacataagaataaaaagtgatacgaaaatattaccaggatatagactcctttatccttgaggaccctataggtttcatcaactgctttcattataggtgaaagaatcaagaaagaaatagaaaaagaagaagctagaacagataaacagaaaccattcaacatttcatgccaagtacctccaaacctcttcaagcatttgtgttgagtattgcctcgaattactcccacactaatacatgtaaaaagtataagacttagtgagaaatcgagcatctagagataacataagtaaagagaaagtagacctcactcaccaaaatggagtctaaggttcctgaaaacacacacacaaaaatccaaaatgttatacaaatgaaacataatgcattttaggctagtaatgatattcaaacaagtagtaagaacacctttatcgataacagcatcaaaagaagcatcttcaaatgctttcatatcacgcacatccatcttcaaatctgttttatttttcacgttatccaaaaatacacaagttcatgctaaatctagtaatatacccgattaaggcagacacagatatgtctcttcccaaattgcaacattaagtagaagaatcaacaaatgtaaaaaaaaaaccaaaaaaacaacgttacatttgagctgaggacgatcagagtatttcttaatcatggtatcaatcaccactgatgatatatcaatactgactacatcttcgtatccatcatccaccattccttcgctaaacgctacattaaaagttcgaaacaactaatgaccaaaacggatccataatacacacaaaactgtgaaatcaaaagagttgttttcttctatatacctgagtttccacagccaatgacgaggactcgttgattacgttgaggaacatagagattgatgagaggagctaaaggtgaatacttctggtaccaatcaaacggttcagattcattcttgtaacgatcgtcccaataccattgctcgctgtaagattgcgttggtgcctctgtagccatctccgtcgttaacttttccgatttcgcttcactctctgatcaaaaggaagaaggagacagaagaaagatacacgagcgaccacggtggtccaaatcttccacgtggcatatttatttaataaccgaccggttcaccggtttgattaaacatttaagattaaacccgttaaaaatcgaaataaccggaatacaaaccacttttcagcagtcacccctaaaagcaaacacaccaaaatcaatcagagggttacattgtttgataccatgctactcttctgcagtagcattgccactgcctttcttagttccttcctactgcataactgtggcaaaatatcacggaacgttatcgaactagaatacacaccattagaaaccatctcctggaaaatgtctaaggcggtattaaaatcaccaacttgacgaaacccatgaatcaaagtggtgtaagtaattacattagcaactattcctcttcgatacatctcgcagaaaagattcatcccatctttaacccttgttgctttacagtaaccattaatgagtgtattaaacgttgagcagctcttggatacctttctcgcctgagctagtttgttctgcttgcagagtccatggatcattgagttataggttatagtatcggggactagacctctacggatcatctctgcatataatttttcagccctacctaacgagctgaatctgatcatcatattgtaagtttgaacatcaggttgcaatccactgatgaggagattagtgaatatattccctgcttcgtcaaacttaccagccttgcacagtccatggatgatgatgttataaccagctgtatccatatccatgttactctcccgcatgaccttaaacattttcaaagccttttctagtttcccattatcgcaaaaagcagagaaagtattgatcaggaagctgctcggtctgggttatacacaatttcaacaccttgaagatccaattccactgttttgtgtgtgtttttgatgaagacacttcatctagattattagtgagtgactttgaaaatcatttggcttgtttaagactcttggtattgtttctcttcattgatatacaaactagaagatgcacactgaatcttatatatctgaatcaggaattaaatttcaacaagtaaaaattctttttcattatttccaagtgatgcttatcctcgtttatgtgtttttcgttcttttttttgggaatccccttgtttaaggggtgtagtatatatgcttgctaagttgatgtttattcttgctttttgattctgcaacctcacagggcataagtctaaacatggaaaaagctaaaatccttacaagcaaagtataaaggtttgatcctaaaaaacacaagattcattctataaatagaaatttaatatactgatgcttatctgtatattgactagttttctctctcgtttctgcatatcttctcatggccagttccggtgattatgatggtatcatctcactctccctctatattcttcacttaccctatctgattaaatacactgacgtaccagccgtgaatggtatatgtatatgtgcatatggtcctatagatagaccattgaatgatatacatcataggaaaccaagtgtgatagttaagatttcaacctttggatgatgttgttgccctgttttgttacggatagtgtaattagattgatttctccttccacttaaaggtaaaatgtataagtaaatttgcacaaaggtaacttttgtgagaa

SEQ ID NO: 2170 - DNA, 3000 bp, Unknown
  misc_feature (1)..( 3000): cDNA_ID_3066303_gDNA_ID_1620498_Annot_ID_158766 3000 nt of promoter + ATG
acttggatctgaagagaggaggtaatggtaggttcttgaagactgctgcctatggtcactttggaagggacgatgctgatttcacctgggaggtagtcaagccactcaagtctaacaaggtccaagcttgaaacctgtcagcctctgtttcacttctgtccagaatcagtcttgttctctgtattttaggctctttctgcctctttagtttcaactctgagatgggtttattcattttgttttcaactttgaagaaaaaagctaagcagctgggaatttatataattatttatatggtattcttgtgctaagaaagttaaattcataatatgtatttcttacttattttgagaagaaaatcatataagagaataatattcgacattagtctcctttgtttgcattatcaatatcaaatattttggctttgacgagtccttaaacagagaggcaagtgagactttattgtaagagttaaaacatgatgagattagattgcactggtgattccatgaacgcatacatcagcttcaacaagacatacatctttgagcaacagaccactgtttggctgcgtgaaataaaccatggatacatatttcacccatccatgctccgagcttgatcgactaaaccatttagtaactgtaaaccagagaacttacagatcaagaggtgaacacattcacattcatataacaagtatgtgattgagtttgcggtgtttacccttcccggcaatgtgtctgccttgtaactgatcaaatattcgaattgtaaactctacaaatatctttgtaccatctgaaatggtttcaggatcaacaagggtcagatagatagaaagatgggttcctgttccttgctttgttcccgtaggataaaactctatcttcctgcattagtagtaccatttattagcttaaagctacggttgctttgggattgttggcaaatttgtgttaccattttctatctccagcgaagaaagcattagagtcatagctctctttgtctaacttggagaaattctcaattttccagacgtgtttagagctagtagcatctttaatcattgataaacattctcctctcccacttcttctctccttagaaacaaacacatcagctccaaacatacatgtgtcttccataaggtaaccgtttgacgcatcagagaaggtaccggttgggatgaatttatcaaatccccattcgcgcttcaccgaatgaaaccgtctctcgtttcctgcaacacaaaatgcatactaagagtgggacaaggatgagagaaacatactgtttgaagaagttaaagataccttgtagaatcaaatagttatctttgttttgatccagtaaatacagacggaaaactgcataaacctcccaccctggacttaatgaactagagtccgcaagagacaagtaaacagaaacatggtctttcgtattcttgctcttgtttccatttgggtacagaaccagtttcctgcaagcaagaccacatattatgttagacatgttaatactaatgcacagtaattgactaaattcaccgtatttaattggacacaggaaaatagaaacaaagatgggtccagatttcacatgagaaacgatccactatgagttggaaaagttgaaaaccatgaccagagagactttatactagtccactacttagagagaaaaagaggatgtaacatttacttttgaataaaagaaaattttccaaaacataactactgaccacaccctaaagcaatgtagaatagaatcccatcaacaaaaagcactgaaaaagttgaggcatgttccaacagtaaacagggtttaagataccagcacgtgttatgatgattaatcttcaatcacaaaagggttttgttaattactaaagaaaaggttgtgtaacaatgatggcataccatttgtagccaccagcttcaaagctctcagtttcatatctctcaatagcatgctttgtaaggagtgagaaagactctatcttgaccatgtaatgtgttggtggggcatcagatatagactttataatttctgcaagcatttctcacaaaagttacctttgtgcaaatttacttatacattttacctttaagtggaaggagaaatcaatctaattacactatccgtaacaaaacagggcaacaacatcatccaaaggttgaaatcttaactatcacacttggtttcctatgatgtatatcattcaatggtctatctataggaccatatgcacatatacatataccattcacggctggtacgtcagtgtatttaatcagatagggtaagtgaagaatatagagggagagtgagatgataccatcataatcaccggaactggccatgagaagatatgcagaaacgagagagaaaactagtcaatatacagataagcatcagtatattaaatttctatttatagaatgaatcttgtgttttttaggatcaaacctttatactttgcttgtaaggattttagctttttccatgtttagacttatgccctgtgaggttgcagaatcaaaaagcaagaataaacatcaacttagcaagcatatatactacaccccttaaacaaggggattcccaaaaaaaagaacgaaaaacacataaacgaggataagcatcacttggaaataatgaaaaagaatttttacttgttgaaatttaattcctgattcagatatataagattcagtgtgcatcttctagtttgtatatcaatgaagagaaacaataccaagagtcttaaacaagccaaatgattttcaaagtcactcactaataatctagatgaagtgtcttcatcaaaaacacacacaaaacagtggaattggatcttcaaggtgttgaaattgtgtataacccagaccgagcagcttcctgatcaatactttctctgctttttgcgataatgggaaactagaaaaggctttgaaaatgtttaaggtcatgcgggagagtaacatg

SEQ ID NO: 2171 - DNA, 3000 bp, Unknown
  misc_feature (1)..( 3000): cDNA_ID_3066354_gDNA_ID_1620498_Annot_ID_158751 3000 nt of promoter + ATG
aaactctctcttcttcgacttctcacgtgtcatcaaatctggttccctcttgccacgtgttctatgtgctgtttacaacaccgttttttcagtgaaagggtttctgtttgggcttttgggctttcactttgttttattgtattttttctttgtataatatggcctgtttctttcggcctgtttcttttggttttgtaaaataatggcatatgatttggctttgtaatatgaataaagaacacttgtgaaaaaagaaaaaaaaattgtcactcagagaaaatttgattgtttacgtgtaactttacctagacatacaagtacactacataaaaaaattaggagtgtaaaagaaccatgtgtaatggtggcggtgtattggtaaagaggcctaattggtttgaaagcttgcactcactcatgtttcccacgtgttgctcactaatcaccattagacaaattaattattcattaatcttttgtcttaatttgtatttaacacttatttaatatttggtttgaaaaattagtgtgaacacacaagcatttaaaaacacctaaatatagtatttacaataagatatttttaccagaaacgtataaaaataaataaagtttattacatttgtcaaaaaatcatagaaataattttataccaaaattttttatatatatagtctcaaacatatcaaggtaaacctattttgttttcatttttttgtaatttatccaaaattaaaatgcgtacaagcaaagcttcagtgacccaaacatggctgctttacacacagctttgtctttggaaagatctcataatccgctatgtccgtcagatcataagaagagcaaaatcgatgcttttcagtcaaaacatggtcgctgattccgccgagatcagtgttatcgatgtcaagtctcatctctccgttgcgaaagatcctagtaactttcagattgccgaaattcgaattcatgattcaatttgtattgatattccgagctctgaagaaacgcctcttttagaatcggtatgtgtttgggtttttgtttcttttctcttttttgtgtaatctcaattttgttacttttgaattttttaggactccgtaccattctagattctccgttgaattcgaagttagaaattgaattggattggatagataaagtcttattctttgataattccgcttgctcttctactcatggatttgttctgttttgtgaattctgtgatggttttgtgatgttatgaaggagaaaaacaactaacactaaacaagctcttatgttacctttgttttcaaacagatcaagagttgttctgcaactactattgaagagcatgttactgagtttgtaccaaatataagctcagggagttatgcagataagggtgactaccgggagtacatggaagatgaacacatatgcatagacgacctttcagatcatcttgggtcttccttttacagatttccggtgcctatggctttctacggtgtgtttgatggccatggtggatctgacgcatcacagtatataaaagagaatgctatgagcttgttctttgaagatgctgtttttcgacaatcgccctctgttgtggactctcttttcttgaaagaactggagacatctcaccgggaagcttataggcttgctgatcttgcaatggaggacgaaagaatagttagtagttcgtgcggaacaaccgcattgactgctcttgtaatcggaagacatttaatggtcgctaatgttggtgattgtcgtgcggtgctctgcagaaaaggaaaagctgttgatatgtcatttgatcacaaatctacatttgagccagaacggagacgagtagaggatttaggagggtactttgaaggcgagtatctctatggtgaccttgctgttacaagagctcttggagactggtcaataaagaggttttcaccccttggtgaatctttgtcacctctgatctcagacccggacattcaacagatgattctaactgaggaagacgagttcttgattatgggatgtgacggtgtttgggacgtgatgacaagccagtatgctgttactttcgtcaggcaaggacttaggagacacggtgatcctagaaggtgcgctatggaacttggaagggaagcgttaaggctagactcatcagataacgttacagtggtggtcatctgcttctcatcatccccagctcctcagagaagaaggatacggttctgtgtttccgatgaagctcgagcccggttacagacaatgctagaaggctaactgatgaaggttttttagcggtcttgaggagggcacaatgtatatattatagcaacaaagatggggttttgagataacaaccctcccaaggccaaattatttgatgacattattacatctctctgatattggatgaaataaaaggaaggcaaaaagagaagatgaaggacttcttctttatgttgttaaaatgttcataagtgttatagccattttttatctatttattctgtaggattattgagcacttatgtacaaaaactgattaagattaaggaattcaggtgattaagttaatcaactaattctctacccatttctttgaaaattgtgatcagagttttgtgtctaatatctctttcattacatcttcactttgtatatgttttaaaaatcactaacatatttgtcccattttgatatatgtttgtgtagtggttgatcatatgatgatgatgtatatgatcactcagcttggattattagggttatattatatcatcataataatatgcttattgcttctggatcctcttagttatgattaacgaaaattaaaaaaaaatcagggaaaaagcgaagaggtcctttttgttttcgtctttattcgacttttcaaagagccaaagtctctcttctccatctctctctctctctcagaaacttcgacggaagaagaacaaaacaacaacaacaacaacaataacgatg

SEQ ID NO: 2172 - DNA, 3000 bp, Unknown
  misc_feature (1)..( 3000): cDNA_ID_2151635_gDNA_ID_1620499_Annot_ID_158785 3000 nt of promoter + ATG
ggctcccaaccaaatcctattatcgcctctttattcgccctcaatatacaactttggtttgtacgaaattattattttatttagttagtgatcatacttcttcatatggaaacttataattatagtttatgaattagaaaaccttattttatttttctagcatctggtatttcttcggcacatgcatgcatgatgcatccatggaccataaatacgaaaacaaatccatttcatatatatttacttcaataacaaattcgtttatgagtgatgatactattaattataatgtatttattccatagttttttttctggtttatgtaaacaaacttacatcaataacagagataaattcccagaaacatttacatgtgtatgaaactctaataatccgcaatgaacttagaaatataaaccggtaacaaaagaaaagagaaatttctgaaaaattatatatcagaaaaagaaaagaaaaaagaattacagtgagactgacagtgatagattcatgagcgccggcagcgagtgatggcgctgcagccacgagagtaaggattggcctgagcgccacgtcgacaattgtagtaagatgcgccgcgacgtgagcacggaattgtgtttctcctcagcgcaccatagctgatgtacctcctcgtagctaatatgcgccggttgatctctgagtccatctcgaactcctctcccatttctcctccgccgtagaatagatctcctccgtctccgagggcggcggaaacagagcactcggcaattgtaccgcggcactctgtttcgaatggagggaaatctccggcgaattcggtggattgagaagatacggcgacggaccagttatgaacggcgagaatgagtagaatcgcgaatatcgccgccgcgccggagtttctggagagtcctctcattttcttctgtacactgtagctttagctctctctgtgcacgaactatgaagaaagagatagagagataaaagaaaaggtttttaaaagagaaggagcttaatgaaatgccactgaaagatggaagtaattacgaataataccacttggtgtcgtaaagagacagctttacaagtggccttttgttagcttcagatctaaggatgttttaatgcgccaagtgtttttgatggagacatccactacttatttttcttttttttcttaaagattttgttggtcacttttacgatatactaaaatcatattcaccaaccatccacacaattttacaaattagtaaaatttcttttgttatataaatgaataatttacattttgctaatttattttggaaagtatactgttttaaattgttataatttattagaatcgtaagtagaaatacagtgttcttttctaccaaaaaaaaaattaataaaaagttctgtttatgtttttgcttatgtttcaaggtactactatactaacaagaaattaaaacgatagtacaaaggtagataagacttaagagtaatatagaacgcatttacttttattttgtacaattatgagtggtctccttccatgatttgagactatttcaaatgaaaaaaaaaactacctattaaaatgccaacatatattaatgaagggagtttaatgtacatctcttgtgtattgttcatatttgtgatttccaatttcatcaaaatggacattataagtttgtaactaatttataaaaaccaaaaagaaaatcaaaatggacattattaaaaaccatatcatgacaggcataacgacacaaagcaacaattatgaaatgagagtggacactatttggattatttttttcctaagacatgatccgaagcgggtttgcaatttgatggtttctaagttgttctgaattattgaatgatgtgtgtgtgtttttcatattgaaatcgtaggttctccattacgatgttttcgaaggttcgaatcctgaaattggaatcgatattgagaaagggaaagaagtttatatttaaaaatgttgatgaatcaaggcgccaagaatcatttatatgtacatgaaatttcaacaaatgttagtagctgatgtgttgagtgtaatggtctgcttgagtgttcacacaaggaggctggaaatctatatctcagaccattgcctgaaatttcagagatggtcattctacagtcaagaaaaaacgcaagattggttatgttattcatgatctacaataaaatatataaatacattgtaaattttgtgaaattatatttaaaaagatcttaaaagttttaagtattataaagtcatcttctaaaaaaataaagaaaatcaatggtcatattattcatgatctacaatatacaaaaagagatatgtaaatcgtttttaaaaaaactattctttaaaaaagtaatatataatttgtatagcatatgttgaagaaaattttattagctaaatgttcaaaaaaaataactcattttcttaagacattttatttggatttatatgcgaaggttttatagtttttaaatcgttgcaattttaggtttttaggtgtgactacaaaattttaggttcacaccgatttactcgtttccttcttatgaatactaagatttggagtataaatttcaatgactcttcaaaatacaagatacaagtaatttattatttatacaacaattttgttctcaaccaaagatattaaatctactgaaatttagtaatgaaaaatataaaagtaataccctttttgtccagtacagagaaaaagaaagtccaaatagactattaaaacgggccccctattaaaactcaaaaaaaaagaaatataatatttgaaaggcccaaacaatcaaggcccaacaataaatggcaagacgtaaaatatctggagaagcggcttttagtcaacttgacaaatacacgtagaaacgtaaaagttttgaatagtttggtactttagtgttgactgttgaccgcgacgaatccgtcggaaaccggaatcaccatg

SEQ ID NO: 2173 - DNA, 3000 bp, Unknown
  misc_feature (1)..( 3000): cDNA_ID_2151674_gDNA_ID_1620499_Annot_ID_158800 3000 nt of promoter + ATG
agggtcattacagaacttatgtagctgatgagatatgggaccttgaagatcatatcctttgtccaacctttctgtcttgtctcatcatctacctgttatgggagattctaaaagggaacagcgtagcttatgacaagagagcatgagaagccaaacctttagccagagttccaggttattgggatccagcaccattgcctttggtagctataacaagataaaacaaaccaaaattaatataagaggctaagagtgtgtttgctatcagtagctaatgggctatgtttgttacgcatatttatatatcaactggtgacgacaagcattccagtctcagtaatacataaatcccagtggacgcaataacactaagcaatctgctatatgaccttagctgcgtatactgtgatcccggacaagcgtaataattggatccattcaacgtaacacatttcccataaactataatgctaatcgtcacatggtttggtgaaactagcattttgagaaacaggcgtcagatcatgacttacaacggagctgatgggggtgaaggtatcctgtcctttagcaagcgtacatgggagaccagatgcctgaagacgagaatttaaacaccccatgatgatatatgcttaagtaaaaaattgcattaaaacattgatgaaaacacaacacaaatttaagatttctgtttacaggaaagtatggatagaaacatggaatcaattggcaaacatatgatataatcccacaggggaaactcaaccaaattatggcttacgagcttataaagaccgtaaaggacacaggacagatcaattagtaaatggcaaagctcgagcatgcactaagattattattagtgggaactatgtatatgtacaaacccatacaaatccattgataacaaagacaagtggttctctaccatggcagaaacttggagttccctagcagtcatatcaagagcaagcgcatatcctagaaaacaagaacaccttacatattaaaaagggatataaagactaagatgaagaacaaactcacaaacattggcttatcgctatctaacataaaagactacataccacaacacaactaacatcacatacaaaaaggttcacattattctacgatctcatatccttgatgttacttgtaagaaaatgaagcaggctagtaaaaatacctccaatgtaattcatggctaaccgttctgggacatctcttgctttctgtccaattactacagcaagttccacctcatggtgaagtgaatccagtggatgtgggatctctattgttccaccgttttccaggtacgacgaagttggctttaagaacacaatcgggtcctacttccagcaaatcacaacacaaacacagacagagggtttaaatcgagacccatttgtgttcttacaaatcaacgatcctgattcaattgacgcggcaactttcgaaaacaaaagaatgtgaagaagatagaagtaaagttggtacctttgggagggcattgccaagttctttggcgtgagaagcgtaattgagtccaacgccgacgatctttgtgccttgtttgaacaatctctgaatcatcgaagtcgccatttttatgtcaatcaagtcaacaatcacaaagactcttctttttctctctttaagatttgttgttgactgagttacttaccgagttcagtgattacaacattacaacattcagtgattaaaactatttggtccgaaacttatgttttcataatcgagatatatggcccattattggcccatataatgcaactatggaaatggaagggtttctagcgaggccggttggacaaagccaaagggtcataaaataaagctttgaaagttactggccaaaactggaaaactacttaaactatttggacctattgcaaataatttagcaaccgcgtgtttcacgaattttagacagtaggataccatgacgtggattttcaataaaactgattacttaagcctaaaattaaaaaattaacattttgctaatcaccacatagaaggggcatgagggcatatgtatgtagagtttaactttttctacatgactcacattagcaattatcaaataaccaaaacttgtgaaaacatgttaaggatcaagtctcgaaaatttgatctaaccatatagagaaacttgatagttctatatcaccaatcaagattactattttagattttttttttcctgtaggaatctttttttttttttgtgaacctctcttatactcattcttaagcttaaactttatagtatttttggagtttttggatcatactagtagttttagaaaacaaaccataaaatgtggtattttatttagaattatccatctaatttctatgtctattatttctgtttaactttgatttttttttttaagtttaggattagcaaaataatgtctcttattgatatattactatatacatgttcaagcatgaagtcagaggtatgtgttattttagttcaagctgtttttttttcttaatatgagtttaatttatttaagttttctaagagtggagttcacattaccggtcgatgtccgttaattatgttctcgtgatactacaactgttcaaatctttattaaatcactgttttcaattccaataggtcattaaaaattaagaacaaaagaagaaaaagaattattcaacctgaaaagtgagaacaagctatgcacgacgcgactttcatcctaatcaaatattcacatgctacacgagctcttttagtctagcattaatgttctgttcattttgctgtcttgaaagagaatttatatttcattaatattttaccaaaattaaatcacatatatatatttgtctttcgatatgtggaccggacaaacacaaagtagcgtccttataatttgctatctctctcatcctatttcaagtctttctctatctactttcctcagaaacccatcctcagagatg

SEQ ID NO: 2174 - DNA, 3000 bp, Unknown
  misc_feature (1)..( 3000): cDNA_ID_2151695_gDNA_ID_1620499_Annot_ID_158806 3000 nt of promoter + ATG
cacacacgcatggtccatggatgagagaggaaacggtattgagcaaagcaatgtgaaggattatagatatttgagggttttttgttttttttctttgagtagtatccgtatatatgaaggatcaaccagccattttggttaggcggtgaacagtacttctagcgattctattcccgggatcaatctttagaaccatccttaggtcttcagctccgagtttgtatttctccatgctctcgtataacagtgctcgttgaaccagaatggtcacattcttcttgtcgtgatcaagtacctgcaatcacgttttcaaagtgaacaaaaaacatctgtgaagcataactgacaatcagaacaagtttcgaagatgttggttttgttctgagtctacaagaaaccatctatggagcataacaaccaatcaactagctacgatgacgcgatcccaagaactgtttagttgtggtatattttcctacaaagcaagacactaaaactttctatacgtgcacagtatttctaactcgtaatctatcttaagattccataagaacctaaatctcatattgtcaagtttcatatacctgaaaactcttatcagtatcaatttcatcaagagtccttaaactgattccaatacaactagagacttcgtaaactaaggatctgagatgagaatgatatgaaccatggtccatgatgcatccaaagaaaaatgtgcctttcttaacatacctttgtgcagtcggctacagctttcttatactctccaacttctttgtaacacgaagcccttgttgaaagaacctcggctgatccagcttcatcaccagctctatccataagaatcacagcccaagagagccactttatggcatcagcatactgaccttgtctctggttatcaatgcccttgttcttagctgatgtagctgatacacccggtggaggcggtggcaaaccatcaagctcggtggtggaaccagccccaccgtcaaaactttcaaatccccaatcttcggtctgtggcgtaggtggtgcagctgagggtttggaattagagaacattcctaatggatcatcgtttgcactcgaagattgtggaccacttggttgcacaccaaaatcaacgtttgaagcattgaagctacctcctgatgagaatgtgtttgatttcgaagcctggaaacccccaaagtcgttgatttgagtagttgttcccgtagaaccgccactgttaaggttcgacactccttgaaaattcccaaaagtatcattctgtgcattgttgttaacctttcctggtttgcttcctgatgattttgatccgaaaccaaccaaagaaccaaatggatcactattcgaaggaagaccagacccatttagattgcccccagccatatttttcattgaaggacctccaagattagcattaaaaccaccggagctcgtgtaaccaccagaaaaaccactcggattactgctataacccataccaccaccagttttcatcgaattaccagatttaggcaacgaatcacccaaattccccatagaataaggactcttactcgaacctgaagccgaaacaggcggtgcattcttcaacggcacgtttctactagatttaccttgacctatcgcagaaccaaccaaatctccaaacaaactaggatccttattcacaatcccaatacccgaacccgatcccgaagctgacccccacgtcttaccatgaatatcacccaccattgaagtcggtccacttccgatctcagatcggatcgtactctgcttcggtgcaggttgatgcgtccacgacggcttaccaggctgccacgcaggtctcggctgcgaattcgagctcgaataagaagatgtttggctcttctgaccattcagaggtctaccttggctcgatccaagccccagatcgaaatcaaagctattggtcgatccggatgatctcttcccgaagttggaattcatgattttatcctcagaactttcagatttaacaagagcaaaattgattccagaagatgatgaaaacggaagatcaaaatgagaattgctcgatggattagatgatactagaggaatagagcttgatccgtcgtcaagaaccgaccgtgagagattcttcgaatccacaagcgatctagagatttctcctttagcgttgttgtccagactccagagccaacgaaggggagaaaacaaaatggaacttcacaaaaatgcccctcttttttaagttttcattcaattcatccccaaattttaccattacatttttttttgtgcgcatttagtgaattgttttgcaaaaagaaagttattgtagtaaaattttaattggtatttttttttttaaagcttttgtttgtatatacaaaagagaaagtacgaataaaaaaatttcattgatttgtatataaaaagataaagtagtttaaaatatgggtaaaatataatatatgaagctgatgtgaaacagggtttaattagactcggtttgaatttaatgagtaaaccggaaattgagctggttaagggttaattggagaaaaccaaaacacaagggcgacggcgtcgtttatgtcttcttcttcttcaatatcaagttatcgagatgtttagttgaagctgaagcagctgggttcagagaagagaagaaatcttatccgagagttagttagttattccaaccgtttgtaactgaaatcaatttagagtcgtcgagtgttaaacctctatatataaagcgcctgtgtgagaaatgggattaagagttaactatttcctttggtattcttgggttacagatacagtagagaggaatttagtttcttttccgtttcttcttttctcatatcgattcacagagagattgagagaggagagagtattcaattgacgatttcattcattgaatcgaggttctaatcggttagaatctaaaatcggcgacggaattgcagaagttacagatccatg

SEQ ID NO: 2175 - DNA, 3000 bp, Unknown
  misc_feature (1)..( 3000): cDNA_ID_2152010_gDNA_ID_1620499_Annot_ID_158809 3000 nt of promoter + ATG
atcattcaaaaacacaaacatatagttttttctaacctttttagcaaaaaggtaaaataatatttctggaacttacggaagatgataaaaaaaaaatatttgtggttttggtaatgtaatttatcaggattatttaattatctgtgtggggttaaaattgtaaattttgaactttggggaatccggtgaaaattttgaagttaacgtgaaagaggaggcagtgaagaaggagcaggcaacagagccggggaaacggaggaagaggaagaatgtttatagagggatacgtaagcgtccatggggaaaatgggcggctgagattcgagatccacgaaaaggtgttagagtttggcttggtacgttcaacacggcggaggaagctgccatggcttatgatgttgcggccaagcagatccgtggtgataaagccaagctcaacttcccagatctgcaccatcctcctcctcctaattatactcctccgccgtcatcgccacgatcaaccgatcagcctccggcgaagaaggtctgcgttgtctctcagagtgagagcgagttaagtcagccgagtttcccggtggagtgtataggatttggaaatggggacgagtttcagaacctgagttacggatttgagccggattatgatctgaaacagcagatatcgagcttggaatcgttccttgagctggacggtaacacggcggagcaaccgagtcagcttgatgagtccgtttccgaggtggatatgtggatgcttgatgatgtcattgcgtcgtatgagtaaaagaaaaaaaataagtttaaaaaaagttaaataaagtctgtaatatatatgtaaccgccgttacttttaaaaggtttttaccgtcgcattggactgctgatgatgtctgttgtgtaatgtgtagaatgtgaccaaatggacgttatattacggtttgtggtattattagtttcttagatggaaaaacttacatgtgtaaataagatttgtaatgtaagacgaagtacttataacttcttaactgttttgtggtagtcctgattcctgaaactaatgggaattagtttgtatatcaaacaggggttcctaacttgttattattaggttaggtggaataattctagggtttttattgacaaaaattaacaaatagtggtttttatggaaaaaggtgatggtaccagtatagtgggaatacacagaagaatttgcagcctttctcaattcttatacgtataattctcgtatgtctatgaaaagggttatacgtatgatgatttatgagtagtgagtacatacatctttttcactactttacatgtaatatttatggaaaaggtctgatccgtttgctctatcgagaattggaattgtgagatatcttgattttaacagtttcaagattaatgaagaacaaaaacaatggcaacaacttacaaattaacattcggaagaaagaaaaaaacttacaagtgagatcaaatttggatttagtattttagatgtaagttacaaatatttcataaactaataatctattaaaaaaaaattattcattgtattttactttataccgtaacctaaacaataaaatacaaatttataattgaaggattttaattgtttaaattactctttctaccatatttgtttttatttctttaaacttactctttctaccatgccatttaattatttttgattgcaaatattgtacgtacctttcaactgtgaactagtattatccttatccctatcgtttcccaaatttcgtcttacgtatagtattaatacatgcatgtgattaaatagaagataagaagatgttgatgtgttgagacttaagactttgatgcatgaacctctaaagcctagttggtaacttggtataataagatttgaagtgggtccataaaatgttttgaagattgacagaatctatttgtttcgcgatattgtctatttctttgacgttttagagaatcattagtaatttaattagtaataaactaataactaagcggcatcttttcgatgtgataaccaaaatcatataatgatgcgtgtcttagactcttcgatacatatgtagataagatagcctaataaatctcgattggtttctaaaatttgtgtttacttcatgttataaatagtaaacacaatactaatcgaatcatgatattcacggttacgacaatgagttgacaatcagatatacttcaaaagaattgtggttaatactaactaatataacttgttcgctcaatctatatatataaatatataatcaaccttcaatattatgaaaccagatgcttatatatatctacttcgtaacatttaatcatttatcatgcattcaggctgatcgtttacggtttacccaaattcaatatatggaaaaggtgatggcatagtgacgttattcaaatagagtaagtgaacttaagttagttctcttgcatagaaattcgagcatgacattatgtttgaattttaattaaaacaaactcttatgcaagaaattcgttgtgttatgttatgtcgtcaagaaatcgtagccgacagtataccatctctgtgtggttacttttctcaagcatccccaaactttattcttttcgatcccccacttggaattatccaaaatgattcgcatttatttgacttgcaatcaaataatgtaatccgtgtgcgtattgtatatatattttttcattgtcaatgcaaacgttattgttattcatcagttttcataaatgaaacaataatgggccaaagtaggcccatttataaagcgaacgggtcgaattatcaaaacatttctgtgtaagtgggtcttaacgaaattggagtggaactgaaattagacccaaaaaccctaaagaattgatatgtcttcgatttataagtaggtcatttttttttgccttaacaaaaaagccctaaacggagagaggcggagaggagaaggaagacggcgtgaagca

SEQ ID NO: 2176 - DNA, 3000 bp, Unknown
  misc_feature (1)..( 3000): cDNA_ID_4282274_gDNA_ID_1620499_Annot_ID_158808 3000 nt of promoter + ATG
ttttattcgtactttctcttttgtatatacaaacaaaagctttaaaaaaaaaaataccaattaaaattttactacaataactttctttttgcaaaacaattcactaaatgcgcacaaaaaaaaatgtaatggtaaaatttggggatgaattgaatgaaaacttaaaaaagaggggcatttttgtgaagttccattttgttttctccccttcgttggctctggagtctggacaacaacgctaaaggagaaatctctagatcgcttgtggattcgaagaatctctcacggtcggttcttgacgacggatcaagctctattcctctagtatcatctaatccatcgagcaattctcattttgatcttccgttttcatcatcttctggaatcaattttgctcttgttaaatctgaaagttctgaggataaaatcatgaattccaacttcgggaagagatcatccggatcgaccaatagctttgatttcgatctggggcttggatcgagccaaggtagacctctgaatggtcagaagagccaaacatcttcttattcgagctcgaattcgcagccgagacctgcgtggcagcctggtaagccgtcgtggacgcatcaacctgcaccgaagcagagtacgatccgatctgagatcggaagtggaccgacttcaatggtgggtgatattcatggtaagacgtgggggtcagcttcgggatcgggttcgggtattgggattgtgaataaggatcctagtttgtttggagatttggttggttctgcgataggtcaaggtaaatctagtagaaacgtgccgttgaagaatgcaccgcctgtttcggcttcaggttcgagtaagagtccttattctatggggaatttgggtgattcgttgcctaaatctggtaattcgatgaaaactggtggtggtatgggttatagcagtaatccgagtggtttttctggtggttacacgagctccggtggttttaatgctaatcttggaggtccttcaatgaaaaatatggctgggggcaatctaaatgggtctggtcttccttcgaatagtgatccatttggttctttggttggtttcggatcaaaatcatcaggaagcaaaccaggaaaggttaacaacaatgcacagaatgatacttttgggaattttcaaggagtgtcgaaccttaacagtggcggttctacgggaacaactactcaaatcaacgactttgggggtttccaggcttcgaaatcaaacacattctcatcaggaggtagcttcaatgcttcaaacgttgattttggtgtgcaaccaagtggtccacaatcttcgagtgcaaacgatgatccattaggaatgttctctaattccaaaccctcagctgcaccacctacgccacagaccgaagattggggatttgaaagttttgacggtggggctggttccaccaccgagcttgatggtttgccaccgcctccaccgggtgtatcagctacatcagctaagaacaagggcattgataaccagagacaaggtcagtatgctgatgccataaagtggctctcttgggctgtgattcttatggatagagctggtgatgaagctggatcagccgaggttctttcaacaagggcttcgtgttacaaagaagttggagagtataagaaagctgtagccgactgcacaaaggtatgttaagaaaggcacatttttctttggatgcatcatggaccatggttcatatcattctcatctcagatccttagtttacgaagtctctagttgtattggaatcagtttaaggactcttgatgaaattgatactgataagagttttcaggtatatgaaacttgacaatatgagatttaggttcttatggaatcttaagatagattacgagttagaaatactgtgcacgtatagaaagttttagtgtcttgctttgtaggaaaatataccacaactaaacagttcttgggatcgcgtcatcgtagctagttgattggttgttatgctccatagatggtttcttgtagactcagaacaaaaccaacatcttcgaaacttgttctgattgtcagttatgcttcacagatgttttttgttcactttgaaaacgtgattgcaggtacttgatcacgacaagaagaatgtgaccattctggttcaacgagcactgttatacgagagcatggagaaatacaaactcggagctgaagacctaaggatggttctaaagattgatcccgggaatagaatcgctagaagtactgttcaccgcctaaccaaaatggctggttgatccttcatatatacggatactactcaaagaaaaaaaacaaaaaaccctcaaatatctataatccttcacattgctttgctcaataccgtttcctctctcatccatggaccatgcgtgtgtgtattttttttctgagatttattggttcgtctataatgcggcagcttcttgtagtaagtgggtcatgagtgtatttttttggatggtgcatttatatgttgttgattttcttacacactaattttttttgagtttatcatgaaatgtttgatcatcgatgtcatatgaaatgccaaagatgaccgtaaatttcgcatcgtaactcgcaaagatgaaccttactttgagacgctgcctgcgtgatggacgtgagacgcataacgcatactattaaattaccagacgctcgtggacacaacacttcaataccgaaaactaaactaatcacattgtgatacgttttgtattcagagagccaaaaaaaggcttacaattttgtcgttatgtggattagccttcaatttgttgtaaccgtcatgtatcaaggaacataaaactattagaattattattctaatataaagtaattcatttcactcacactttattaccataaaacatttattttgcgcctataaaggcatttcagctccaccgtaggaaactttctcttgaaagaaacccacagcaacaaacagagaaa

SEQ ID NO: 2177 - DNA, 3000 bp, Unknown
  misc_feature (1)..( 3000): cDNA_ID_2151687_gDNA_ID_1620499_Annot_ID_158804 3000 nt of promoter + ATG
atgtgagatcattaagcttgaggtctgcgaatgtaaatatctgaatagccttactatctctcttttctcgccaatttcttcagatcttgaggatgtcttgatacgctccagaacagagtggttggaccatgaggatttaaggaacatactcggcaaacgtgaagatttacttacctctactgtacccgtcccattccctgaagaagggttatttctttttgatgttgatgagcaagatgtgctagatactacagtctgggacttaaccaattttaacaaaatgcatggagacttcgacatacggtatagagttgaccagtgctttttagttcccattaacgagggagtcagcagcacctatgaaagacgagtctacaaatgtgaacaactgtaagtaatatcttttctttcttttcttttttgtttcattaaattgttttagtgaacgtttgttgacttacttgtgttaatgtagctatgggacgtaccgggtggtacactacagacgctatcatatgagtgacgacaatgattacggtcacaacagtggtgaggacactgaagactcgcaaaatcttggcaacagtgataatgactctagtgatgatgacggcagtagtaatgatgatgacggcagtagtgatgatgagagtcacagtagtgatgatgaatctgccggagatgataatatagaagctcatgctaatggtttttgactttttgtgcatccggtattccaaaagtgaagggaaagattccatcttgaccaacagatttttttcttgcaagtaaagagttgaatttggagatgtaaaaactcttttcatttttaccaagttggctttttaataataaccctttccaggccatgtcacacaagggttatctccaaattaatgttcaaacatgtcataccagcaaaacacaagtccatccctcagctaaagcagacctgatgatctacgatgatgagcttttcatggtgagacatgcagaggtagaaaccaatttcattcccctataattttgtgttcaggtcaggtatgcttagctctgtcctctaacaagttattagtctggaaaaactatgtggcggaacttagagttctgggcacaacaactagacaaagataaaaaatctccaagacaaatcagatacataagaaaagaaaacaattgaatcgattggttgcctcgtggtgaagcttgctagatttgcactgagcttggaacgtaagagcacacaagtgaggcacaacttgaaactgtagattctccaagatccactttttcgaagtaccccttcttcccaatgatgtaagctatgttgcgagtaaatttataactgaacctgtctttatccagaaccatggcgacctttttcttctcgtcaacaaagaaacttgcagcgttaatgtcaaactgaaaaccagtgagtgatttcatatcaaccgctaagaaaaccttcctccacgacactgcattgggctcaatcttgcgactaatccatatcttcacggtagatgcactacatggctgaaataacactgcaagtttcttatctctaacactggatagagtcacagtatcttcaacaaaagagtggaaaggcagaggcaggcgcggtccaaatctctcccttgtaaaatcaaaacagagtaagaaatcagccatatctgatattgttatcactcttccgcgtggtaatggtggaagcttctcttgagcaaaccagtaagtattccccttgagagacaggccacggtgataaaactctacatcccagtcgggagtgacattaacaaccttccatgaatcagagtttaagtcgtagatttcaaactcacgaattaggcgcagtgccctgtcatcctcgtaatcatccataaatctcaagattttgtagcaacgacacgacttgttcttctcttcgtatcctaaagcgtacctgtccaatctgtggtaagaatttctaggtttgatccaccttgtttgcccagaataagggttccaaaccacaagcctagatatgtctttggtgatacataacaataaaccgccgcagtgaaagattttagatatgtcgacatgatcttcaacgtctaggctaataagtttacctatacgctctattgatggattaaggaggttgacgctgtataaataaaccctaaattgaatcatcatgatcacctgaaactccttcgtctgcttcttctttgctgctgctcttgctccacgcaggtgcttctttgtaaagctccgatctttcgataaggtgttccactttttgcaagtaaatctcactgctctcatagatgtcaccggaatcctagagagcacctcctctgtcaaatcccgtggaagatcggaaatctgaaccatagtttcgaatcgaatctgtaatggaatcaaccttccaaagctgtttccttttccaccgattgcttcccgactgtgttaatttactccatctgaaaaagaaaaaatctatctggcttcatcatcatcaggacggatacttccgcatccgaccaaaagtacccacataagtggggtttgattggtaataagtttttgacttattagtaatgggtccaaggcctgttaaagtctcaatacagcccaaattaattaggcccaatagtaacactatttgcatttgatgagaagcgggaaaatctagagaagtcaaaataattcgtatctctctttcccaaaactctcaatctctctctctctctcacagttcctttctatcttcactaatcacttgaaatcttcgtgttacatcgcacaatcccttcgtctcccagaaaaatttctcaaatttcaccacaaaatcagatatttctattgaaatttctctttatagttggaatcccaattcagagtttttagggtttcagctttttctttttgggggtttgggattagggatatgaattatccaatctctccatatagaagcttaaattccgtgagtcttcaccgagaatg

SEQ ID NO: 2178 - DNA, 3000 bp, Unknown
  misc_feature (1)..( 3000): cDNA_ID_3066374_gDNA_ID_1620499_Annot_ID_158795 3000 nt of promoter + ATG
cttcgtacggatatcccatacctataagtagaaaagaatttttgacaacagttagagaactcaaacatcaaaaatacatatgtttataaccacaggatacatcttttcagtaaatgtcataccctgcagacagagtctcgccctccggttagtacaacatcaagagtaggatgaagagctaaacagtaaacgccatgcaaatgaccatgataagatcgaataacctatcaaagacaaattccaaagacattggacatgaaaagttcagatcaggagaagagtaattaatatacagatgagatgaaatccatcatcgagtttaaaccttattctgctcaaggtcccagcatttgacttgcttgtcatcaccagcagaaaacatataggtatgtctattgcttacagcgaggcctgtgaaacaataattatataaacttagagagttgaaacttttacactggtacttttctacaagagctattgataaactaacaaattgagggggaaaaaaatagtagtctaacctcgtacttgccctatatgtccagtaagtgtgagtttcagaactccagtcgctacatcccatatctagtgaacaagagccacagaagcaatcagtaagattaattcatgagatataggtaaatgttgcatgaagaactaaaaaacgggacctagcaaatgacaattcatattatagaatccagaaaaggttacagaagaatgggaaaaaaggcattgaattagattttcaatagagttgatccgttaccttgatggtacgatcagctgaaccagtgcaaaaccattcattgcttgggtcaaacgcaacagatctgacccaacccaagtgtccctggagcacctgtcaaccaaaaaatgcatcaattcataagaacataaagtactctctggacgccaacaaatggcctaagaatacctacacacttaaatgttatatccataagatgcagaaatattacagtaacacagatcttaccctgtaattcttccatggtgcatgccactctggacggggccatctactaggcattctctccattaaagcagcagttgacagatttctgtaacacatagaggggaaatgatggacaaataatgaataactgaagcattgatacaagttagatgcatttcaggttaaataaatatggccaaatttaaatttcatgactctgaaccaccaattcaccttagtgcggctttatgtaccacctaggtatcgcaatctagatgtagtgtcgttatagagagtccataaaagtagataaggatgcgacacaaacctttcggaaaatgatccaggtgcaggaagaatggccgtgcttttgcctggattaccagtattgttccttcaattcaagaatcaataattatcagtatcaatcagcacgataagtagagcatcaatcacaaagacaaaacaggaataacattcttgagaatgtcgtaaattatttatactaactatatggactagtcacattccaaatgaaaatgtatactcacaagtctcttggcggtaaagttggaccaacaactaaagctttctctgttgcgctttttcgaagttccttggacccttttggacctgcggagaaaataatttggtctttcagaacgagaaacaatagtcatgaaaaaggctaaaagattacactaacagcgtttttagtgcagcagaagtttgtttgaaaagatactcttaagaggatacattactgaaacttgttttccaatcctaattatagacatatatgaatgaaactcacaactaatataaatagatatcagggaaactagaaaataggaaactagttttgtctcacaacaggaaaaacagataaaagaactacctggaagcgcaagggctttcaatggagccgtcttttcactgttatggtcagcaatacgtgtaggcttacttgcaggttctacgcctccaaatgcaacttgaatctatacaagtaacgtccaagtcattaacttttatattctacttgatgttcactaaaacgcttgatgcaaactaaacatcttactataaagatgagggtaatatgctagaaagcaaactcaaacaatagtagctgatgagaagaatctaactccagataaaaggtaaactataaaagtgataagccattgactgttcgatttacaccttataaaattttctcaggttcaacgtctctgaagcttgctataaagctatccattatcaaactcaaaacaaagaagaagcgaacaaaattttcaacacgatcaaagataaaatttaaaaaatattcgaaaacccccttaccttatggcagagccgaattcttttgctgcgagacaagaacaaaaacagacaagaagaagaaatcgtcaatacacataaaaattctgagaaatttcgagaaaaaaaagtggacattgcaagcgaaactgttgattaacctttcaggatcaggctgaggaaattggccatggacgggggagaaaatttcacgagctcgtctaacagattttagactgagttttttcagtgactgagtttcgacctccctgttcaaagctatcatcgtcattctagggttttacacgaacaatcagaaacagaacgagaaagacggaagagaagagagggaaataggattttatccgacccgaacactatttatacgtagcccaacactcgaatccccacccgttggaccaaacccggctcattaagcgtcggttcagatttatttcctttatttaaaaaaaaggaaagggtaaaaaatagaaaattggaaacagttaaagcccaaaattgtaatttaccgagaattgtaaatttacctgaaaaccctacgctatagtttcgactataaataccaaacttaggacctcacttcagaatcccctcgtcgctgcgtctctctcccgcaaccttcgattttcgtttattcgcatccatcggagagagaaaacaatcaataagcgaccatg

SEQ ID NO: 2179 - DNA, 3000 bp, Unknown
  misc_feature (1)..( 3000): cDNA_ID_2151652_gDNA_ID_1620499_Annot_ID_158791 3000 nt of promoter + ATG
tcaagtacccattggacgttcctctaatctcattgctcgtgctaatctgaataacagaggagcagggcaagtaagcatccgcgtaaacagctctgagcagcttcaacttgctgtggttgcacttgttcctctgttcaagaagcttcttacttattattcccctgagcaaatgcaatatggacactgatgagtaacatttaactgttttgattttttcttgaaacatgtttttctttttttagttgtcggaattcacttttgttttaagtctttgatgtttggttgtaacatatgtctgaaacttaaaatccattatcccaatgtttctaagtcttcttgaaacctgtattcgctcaaggaatctggtcttaggtcaggtcattcatcagcatcttcttaaacgctctcttacgttaagttcctctacagtgctcgtcaatttaacacgtctttacgcatcatgcaatgaagtggaacttgcacgccatgtgttcgatgaaattcctcatccaaggatcaatcctattgcttgggatttgatgatcagagcctatgcttcgaatgatttcgcggaaaaagctttggatttgtactacaagatgctgaattctggtgttagacccacgaaatatacgtacccgtttgttttgaaagcatgtgctggtcttcgagcaattgacgatggtaagctgatacatagtcatgtgaattgtagcgactttgcaactgatatgtatgtatgtactgctctggttgatttctatgctaagtgtggggaacttgagatggctataaaggtgttcgacgaaatgcctaagagagatatggttgcttggaatgctatgatttctgggttttctttacattgctgtttaactgatgtcattggattgtttttggatatgcgtagaatcgatggtctgagtcctaatctatccaccatcgttgggatgtttcctgcactaggaagggctggtgcattgagggaagggaaagctgttcatgggtattgcacaagaatgggttttagcaatgatttagttgttaagactgggatcttggatgtatatgccaagagcaagtgcattatctatgcgagaagagttttcgatttagactttaagaagaatgaggtaacctggagtgctatgattggaggctacgtagaaaacgaaatgataaaggaagctggagaagtgttttttcagatgttggttaatgataatgtggcaatggtgacgccagttgccattgggcttattctgatgggttgtgcaaggtttggagatctaagtggagggcgatgtgtacattgttacgcggttaaagcaggcttcatcttagacttaactgttcaaaacaccataatttcattttatgctaagtatggaagcttatgtgatgcttttaggcagtttagtgagattggcttgaaagatgttatttcatataattctctcatcactgggtgtgtagtgaactgtcgcccagaagagagttttcgtctatttcatgagatgagaacatctggaattcgtcctgatattacaacattgcttggtgtcttaaccgcttgctctcacttggctgctttgggacacggttctagttgccacgggtattgtgttgttcatggctatgcagttaacacaagcatttgtaatgcactgatggatatgtacacaaagtgtggaaaacttgatgtagccaagagagttttcgacacaatgcataagcgggatatagtttcgtggaacacaatgctgttcggattcggaattcatggtcttggcaaagaagctctttctctgttcaacagtatgcaggaaacaggtgtgaacccagacgaggtgactcttcttgctattttgtctgcttgtagccattcaggactagtggatgaagggaaacaactgttcaactccatgtctcgaggagatttcaacgtcatcccaagaatagaccattacaattgcatgactgatcttctagcccgtgccggatacttggatgaagcttatgattttgtaaacaagatgccatttgagcccgatattcgcgtgttgggtacacttctctctgcttgttggacgtacaagaatgcggaacttgggaatgaagtgtcgaaaaagatgcagagtcttggtgaaacaacagaaagcttagttcttctatccaacacctactcagctgctgagagatgggaagatgcagctagaattagaatgatacagaagaaaagagggcttctcaagactccgggttatagctgggtcgatgtttgattaatgatatgaaattagggttttgcagtggaagagaaaaacgtaatcgagaaggcaaagagaattgcttactctgttttcagcttcctacttgaaatcacagccgttaaaaacaatttaactcctgaaatcagataaggaccgttggattagtatgtgtgtaatatatatatagcaatcttattgggccaaccgactttactaataaagtttcgtagtattgaaggtatatggagaagaatatgttaatttgtttctctttaaaatatgttccttgcgatcgtctatttatttctctgtccaagccaaccctaacaacagtgcgattcttatcctcagactcgtatcatctttatactaattacgttccaataaattcggattctttctctgttcttgttctgccctgttcttacttttacctcctcgtgaataaggttttataaaccctaaacctcaaagttagtaatgtttgattgttcaatttttaagaatgcataatttcgataaaccctaaacctcataaataatgttgcttaatctggttttctatatatagctacagctatatagtcttctttgctaaaataaccgtttcattaactaagaggaactaacactaatgtcttttgcgtggcagagctaattctttttcttagaactcaaattcttggttctgagatcgaaaagaggtttaaggatggatgatacaatg

SEQ ID NO: 2180 - DNA, 3000 bp, Unknown
  misc_feature (1)..( 3000): cDNA_ID_3066376_gDNA_ID_1620499_Annot_ID_158793 3000 nt of promoter + ATG
tgcatatggccaaacaggtatgcaatgacattaatgttcattgggaaatacactgatagttatactcttgctaacagattccagtttttagaggataatagattaatagtttcttcatgctttcatggccctaatgatgttttgcttattcaggtagtggtaagacatttacaatgaaaccattacctatacgagcagttgaagatcttatgaggttgttgcgtcaaccagtatacagcaatcagaggtttaaattgtggctcagctattttgagatatatggtggaaagctgttcgatcttctcagtgagagaaagttagtgttctttctttttctcatttcttataaatgtcgtctttgttgaggggttttatgttttccttttcttttggcatatactttgttcaggcatatactagcttataattgttatttcgatgtcagtatatcgtaaacattggcacttattcatcctatcagtgtcaatactttccattgttgtctactactatcgcaaatgcatgtttaccattgtctaaatcattcagttattgccgagtaggaaactttgcatgcgagaagatggtagacagcaagtttgcattgttggcctgcaagaatatgaagtttcagatgtacaaattgtaaaggattttatcgagaaaggaaatgccgaaaggagcacaggttcaactggagcaaatgaggaatcttctagatcgcatgccatcctacagcttgttgtaaaaaagcatgttgaggtaaaagacactagacggaggaataatgatagtaatgaattgcctgggaaagttgtgggaaagatttctttcattgaccttgctggcagtgaaagaggtgcagacaccacagacaatgatcgccagacaaggtaaagattctctttgcccctgtgattgagtagtttgagaattgacctaccactaatgtgtagattaaaatttatgcctctgttggacttgtgggcattgataaagtggcactttgctgctacctttttactttaggaccaccacacttcagatctaaatgcttcattgttttcattgtggatttttcttaggattgaaggcgcagaaatcaacaagagtctcttggctcttaaggaatgtatacgtgcactggacaatgaccagctacatataccatttcgtggaagcaaactaacggaagtgctccgtgactcatttgttggaaactcaagaacggtgatgatttcctgcatctctccaaatgcaggatcgtgtgaacataccctcaatactctaagatatgctgatcggtatgttttgtacaaactatagcctcttgtgaaacaaattctcaatttcatcgtctattaacctctgttggttatgtatggaataaacagagtcaaaagtctatctaaaagtggaaatagcaagaaagatcaaactgcgaattcaatgcctccggttaataaggatcctttgttgggcccaaatgatgtagaagatgtctttgagcctccacaggaagtgaatgtaccagaaaccaggaggagggtggtcgagaaggacagcaacagcagtacgtcgggtattgacttcagacagcctacaaattatcgagaggaaagtggaatcccatcattctcaatggacaagggaagatcagagccgaacagttcttttgctggctccactagtcagagaaacaacatttcttcatatccccaagaaacttcagaccgtgaagagaaagtaaagaaagtgtcaccacctcgtgggaaagggttgcgggaagaaaaaccagacagaccacaaaattggtctaaaagagatgtcagttcgtcggatatccctaccttgacaaattttagacagaacgcaagtgaaactgcttcaaggcaatatgaaaccgcttcaaggcaatatgaaaccgacccttcgcttgatgaaaacctcgatgcactgcttgaggtaaagtactcacctatccctttaaaacatgagatgaagctgtgaatttgatttgcaagtaacggtagttctgtttatgtcttatcgtaaccatcacatgacttttttcaggaagaagaagctctgattgcagcgcacagaaaagaaattgaggatacaatggagattgttcgcgaggtatgtaaatcacatcattgcagcgcacaaaaaacgattgtagaatgttatcacatcattcaattttcttttctgttatatcattatcaggaaatgaaacttctagcggaggtggaccaaccgggaagcatgatagaaaactatgtgacgcaactgagctttgtgttgtcccggaaagcagcagggctagtcagtcttcaagccaggcttgctcggttccaacaccgtctcaaggaacaagaaatactgagccgtaagagagttcctcggtagttggtagaagaaggaaaaccaaaagtgtggtgttgtttaagtgtgaaaggttggttgggtgatctcttcttatatatgacaaagaatgacagaaatgtccttcatgtttgtgaatttgggcatttctttccttttatttttgaatctttattataaagttataccttttgtgtttcttatttttctcttctcctctatcctcccagaaagctggatactgtcaatgtgaatcaaactcttttatcaatcaactgaaaaagtataaaaccatttatcatctgaaaatgtttcaaaatttggtgagccatatataaaatcaaatttctaacaattaataagatcttcaaataccatctatatagtgacaaccaatgaaaagacagttgaatagctccaaaagaacaaataaagcaattctctcttgtcgtaaagataaaatggccaacaagattatgcagcccaactaaaaaggccttggcccacactttactattgatcacgtgacatgcctttttcacgattgcaatataagagccattttccaccgtccgatgttaaaacccaaaccgatttaaaccgtccatg

SEQ ID NO: 2181 - DNA, 3000 bp, Unknown
  misc_feature (1)..( 3000): cDNA_ID_3434240_gDNA_ID_1620499_Annot_ID_158794 3000 nt of promoter + ATG
tctgggaagtagaaggaaaggtcagtgtcatcgattctacttcaagttttgttttgattttgttaaatttttgttttcctgttctgaattgggttttgattttgttatccagtgggttactgtgggagctgtagatgttaacattggtgccaatccatctgctgaagaaggtggtgaggatgaaggtgttgatgactctactcaaaaggttgttgacattgtcgacaccttcagacttcaggagcaaccaacttatgacaagaagggattcatcgcttacattaagaaatacattaagcttttgacacccaagctcagcgaagaagatcaagctgtcttcaagaagggtattgagggagctaccaagtttttgctccccaggctcagtgacttccaattgtaagttaccccaatctatcgtatcttgcttgttatacatgacatatatttcatctgaaatctcatcaatgcttgtgttgtctgattttacagctttgttggggagggtatgcatgatgacagcactttggtctttgcttactacaaggagggttcaactaacccaacatttttgtacttcgctcatggtttgaaggaggtcaagtgctgagagagaagctctcgttgggttactgtggtcggtcgcagcgactctctaagtttatgtttctttatattgtcctgtgtttcgtcgtcgtcccctattaaaattacctgccagtttacttttctctcttcttgttttctgtgttggaagattctcaagttatttattccgcaaaaaacggtttatcatttacaattagttgaattttggtcgttactttttgtgttatttggtgtgatatctcttcagctttgcttttctaaattaaactcccgaatctcgaggcatgtttatagtagatgtctaataattttggattcagatcttatggacgtgaataaacgagtgggttactctaactgttagtaactttaaatcatggaatatgctgtagaatgattcttttgactttagtctaatggtgttttatccctttaaaaagaaaaagtttcgtacagacatgatgtcttgagacatcatcataggcatgttctgctccttatcaaggatttctatctcacgtgcggaatcgatactaactagagttctgtcatcttggttttagttgtgagacaaatcacaatgtggccgtaataataatgtattatgtgtattcttttactttgacaaacaacacaacctatcctatgctttactattcttttagtttgttggttttattattcgaactatttatttatgtatgtgtggtgtccgtatggatgagagggcaaccaaaatgcgttggtacgtatttgtgtctcacgtaaaaggaaacgtgatttggtcttggtcggtttgacgttgctccaactctcttgtatcttatgtatttatcgtcattatttcttcaaactttgttgttcctttcgttttaggcttttagcctacactatttaaacatttcttatgtaacaagtagtatcaacttctatctatatgactatattgacgtagccatacaaaggaggtagatcatctaaacttacacaaaactagagagaccaatgtttttaggaaggataaataaaggaaaagctcctttcatactggtttatatagtgattacttaaaatcaggaatcctttagatcggaatgctttaggctaaagcaaaagctttttgattcaaaagaaaggaacccacaagctgtattagccccacttcgctacttttgcatattctcgttcgtatattttattggattaacacttttttttggggtttaaacagtacacatacatacacaagattggtacttttgatatacactcacttatattcgcacatctaaacaattcaaaatttgaaaccgtataaaaatttaaacaaacataagaatatataagattagatcattgtcatgtactaaaattccaaaagttgtggatttcatgtcgagaaaaactcatgtcatcttcctcggacaatttcaaatttcatctctattaccatagatggtccaaaacaacatccttaaataccataaagtagctaaaatctgaaaatgcacataactgatcaacccaccaaggttatattattagttatactacatatataataaaccaatcaatgtttatgcaatctgctcaaaaaggtatgagattcataccgtatgattcaagatgagaacatcaattctatttttatgtcaccatgttggtatatgtccttgtgtcacgatctcagcaaaaaaataatatttcaacactatcttttagaatatataagaccgttcaaagaagattgtttcaaatgttttggactagactgtacaatcttaaaaagtaggacaaatcggtgaatatttctgaagttaaagggtgatctaactgtcacttttttaaaaaacttttaaacacctcaaactttttaatttattgtgtaagtgtcttatactttgtcaaatcttcttcaacgcccctctctttctcatctctctgcgcctaacgtcgcttacggaagaagacgaaaattttgaacagaagctctctctctctatctctctatctctctatctctaacgctattcgatgtgcgtaaattagggttcttcactcgtcggatctgattgtatattgtgaaaatctcagatctcagatctcttatctaacaccgttgcgtgtcttcgtttccttctggtaatcattactttggataacatcgatcttcttctccgattattggatgcaatttattgattgaatttcagattttgaaggaggtgaagcaaagtcgggagctgtacatttccgctttcatgttctgtgttgaatccgaattctctccacattgtgagtttctcttcgatttgaatctaacattctattgttgaaattaggaattttttgatttgtaacaaatgggtgattctggtttttgtatggatg

SEQ ID NO: 2182 - DNA, 3000 bp, Unknown
  misc_feature (1)..( 3000): cDNA_ID_2151638_gDNA_ID_1620499_Annot_ID_158786 3000 nt of promoter + ATG
acttctacattcctttgcttggagggttttagtcttgtttcttggtttgttttgttaaacactagtataatcgttaacaaacataatgacacttttataattgatgtttttgcatcttctcttcattttcttctccttccgcctcctattcaggtttaaaacgtttcacacacacaagttattatcaagcttaattggcggcatttgcccgagtaaactatgaaattctagagacatgaattgattgatgtttgattggtttaaaggattaagtttgtgcttctaagagatataaaaactcatcatggtttattattttgaatcggttatgtatgtttgactagcattgggccggtccgagtctaccgctcgagatagctcacacaagtctagtggtccaaagagtcggttgcttgatctatactccattggaatcacatcgtgtatttagctgatatatgaatagatggtaggtacaggatttgcttatatccaaatctattaatagttcacagatcccaaaataacaataaaaatatcaatgccagctgcagaaatttgatgtgaccaatgtgtattgaatctgcgaaaagaaataaaattgtaaacaatgctgtttgtaagagagaaattgtataagtgtgtgggaaagctaagtccgcgtgacaaggatgcggaagatgatgtgcttgtcgtttcttgttcatatgcacacgatagagacttattacatccatataaaattatgtatagatgagcctcattattggatcatcaatatttacatataataattctgaatgtataacaatcggtgagtgatggggaagtagtggtccaaacttttggtgattttaacttgttatcttcttgtattgttgtgtcaaaatgtgacaagaggaagtgttagacccgttagattttgagtgcaataaatcaaaagtatctctaattgaattgttgttagttgtgtgatatttaatgtctcaaaaatgggtccttaaccatctgtttctcttttaaattaatgtaacgttttttctttttctttgaattttttttcctacagcaacctttcaatttcgttaatcacgaagagcttatgtgtttggcttataggtatgagtccccgtgacaagaaattttcatatagaagaaattgatggtgtattaattcatagtgtgtgcaaaatgtatcatataataataaaatcaatattacagattatccctacacgtgtggttgctctgccgaaagctggctttagttggctcccaaccaaatcctattatcgcctctttattcgccctcaatatacaactttggtttgtacgaaattattattttatttagttagtgatcatacttcttcatatggaaacttataattatagtttatgaattagaaaaccttattttatttttctagcatctggtatttcttcggcacatgcatgcatgatgcatccatggaccataaatacgaaaacaaatccatttcatatatatttacttcaataacaaattcgtttatgagtgatgatactattaattataatgtatttattccatagttttttttctggtttatgtaaacaaacttacatcaataacagagataaattcccagaaacatttacatgtgtatgaaactctaataatccgcaatgaacttagaaatataaaccggtaacaaaagaaaagagaaatttctgaaaaattatatatcagaaaaagaaaagaaaaaagaattacagtgagactgacagtgatagattcatgagcgccggcagcgagtgatggcgctgcagccacgagagtaaggattggcctgagcgccacgtcgacaattgtagtaagatgcgccgcgacgtgagcacggaattgtgtttctcctcagcgcaccatagctgatgtacctcctcgtagctaatatgcgccggttgatctctgagtccatctcgaactcctctcccatttctcctccgccgtagaatagatctcctccgtctccgagggcggcggaaacagagcactcggcaattgtaccgcggcactctgtttcgaatggagggaaatctccggcgaattcggtggattgagaagatacggcgacggaccagttatgaacggcgagaatgagtagaatcgcgaatatcgccgccgcgccggagtttctggagagtcctctcattttcttctgtacactgtagctttagctctctctgtgcacgaactatgaagaaagagatagagagataaaagaaaaggtttttaaaagagaaggagcttaatgaaatgccactgaaagatggaagtaattacgaataataccacttggtgtcgtaaagagacagctttacaagtggccttttgttagcttcagatctaaggatgttttaatgcgccaagtgtttttgatggagacatccactacttatttttcttttttttcttaaagattttgttggtcacttttacgatatactaaaatcatattcaccaaccatccacacaattttacaaattagtaaaatttcttttgttatataaatgaataatttacattttgctaatttattttggaaagtatactgttttaaattgttataatttattagaatcgtaagtagaaatacagtgttcttttctaccaaaaaaaaaattaataaaaagttctgtttatgtttttgcttatgtttcaaggtactactatactaacaagaaattaaaacgatagtacaaaggtagataagacttaagagtaatatagaacgcatttacttttattttgtacaattatgagtggtctccttccatgatttgagactatttcaaatgaaaaaaaaaactacctattaaaatgccaacatatattaatgaagggagtttaatgtacatctcttgtgtattgttcatatttgtgatttccaatttcatcaaaatggacattataagtttgtaactaatttataaaaaccaaaaagaaaatcaaaatg

SEQ ID NO: 2183 - DNA, 3000 bp, Unknown
  misc_feature (1)..( 3000): cDNA_ID_3098960_gDNA_ID_1620500_Annot_ID_158831 3000 nt of promoter + ATG
caactaggaaattatgttcccctgtgtttagacctatattcaattattatagaattttcaagagcaataaaaaaagaaagatccaactaagaaagataacgaacacatgcatgagattgtggtgcatgtaagtgaaaataagtcgtaataatcaccgacaaaacgcgttaatacttattatagatccttataaaacgagtccaaatgtcttccttcttcttcaagcaaataagcaatcaattgtgaactcaaagctttcttttctcgacctctctttctttcatcacgaaaaatttatacttatctcaaataaaataaaaatatatatatatggatatgaagggaacatacttagtaacggttattctcttggttagtacgttaagtgtggggatgtgttctaacggttggataagagctcatgcaacgtattatggtgtcaatgatagccctgcttcacttggtaaaaaggccattaaactattgtttaatatacgtttttgttacttcaaagtttgtatggtaaatttgttttttagatacaattttataggaggagcttgtgggtatgacaatccgtaccacgccggattcggagcacacacggcggcgctaagcggtgagctattcagaagcggtgagtcatgcggtgggtgctaccaggtgaggtgcgactttccggcggatcctaagtggtgtctccgaggagccgccgtgacggtgacggctacaaacttttgcccaacgaataacaataatggttggtgcaatctccctcgccatcactttgacatgtcctcccccgctttcttccgcattgcccgtcgcggcaatgaaggcatcgtccccgtcttctatcgccggtaacttattcgatgctataggagtcaattgcttttttatgcatatagtgttcatcctttttgataagttaataaactgaaactatacattaaagtatattttggagttttttttttttctttttaaaatgtaaggtagagaacattatacaaccctatcattattttaagttattaacattattgtttaatttatttcatctacatatcattattttgctataatgatcattagcaagctaggtcattatatattatagcaaaatttataaggaaagaatggatgaagtttagatcaacatcacattataacatgtacatatacgtacgctcacaaacagaaaaaaaaaaaacaaaaacaaggccaatccttcaaaagaatctggaaaaaggtttaaatggactttagttaaataaaaatatagcatgtaattactgtgatatttatgcaaaatatctaatagttttgtaatgtgtatatatagggtgggatgcaaaagaagaggaggcgtgaggttcacgatgagagggcaaggtaacttcaatatggtaatgatctcaaacgttggtggtggcggctcggtgagatcagtagcggtgagaggctcaaagggaaagacttggcttcagatgacccgtaattggggtgccaactggcagagctccggtgatctccggggacagagactctccttcaaagttactctgacggacagcaaaacgcagacatttttgaacgttgtcccttcttcttggtggtttggccaaaccttctcttctcgaggaagacaattcgtttaactacaaaactaagtcgtgctctggtcaaaacgcaattctttgcttatttctgaacttgcccttgttttaattgggcagtgttcctttgtttctcttttattgctaaataatttcatgcttaattttatttaacggaacggtttctcatttatgtatgaagcattactcgacaagttaaagagttttgcagaatttatattaatggaaataacattttttacaagttcatttgtcaacaaaattatcagagctaatagacaccatgaaaaaagactattatcagataaaagcttcataaaacacagattagtatataaatgtaatgttacatgctagctttaattgaaaaagaacgacattgtcaggtacgtaacttgaaataactctttatcttcttttttttgtcaatgaaataattctttctataaaataataataataataataataataataattctttcttacataaagataaaataaatatataaaaactataataaataaaacagagcaataaatatataaaaacaatttttaaaaaacaaggtgctggcccatgctttttaaaaaacaatctgttgatttttcaaatacaaactaaatatacttagaaagttaattaaatatcactaaaacctacttttgggaaggttattaaaaatttccctccaacttgggaagaatgtttgtgagagattaacaaaaaatagatgaaggtttcacaccacattcagttccttatcaacagattgatgtgagcttttaatgaataaaaagctgttttctttttgtcatcaatttcttctatacataactctggtccattttttattcatgttttaataatataacaaagaaaaagtggaatcattgtatttttaatgaagtggatggcgttacagttgcagtcttgcagatctcaaagagaataagaacaaaaaaaagcttgattttaaaatctattcaaaaaacagaacaaagatttttaaattaggtttaatactaggattaaaggaaccatttaaaaatggtcataagaaatctcaaagcccataagaaccagacatggattcttttcatgtgccatggatgatataagattgaacagaaaccatttaattttatcttttaccaaaaagaaaataacttttaaacagaaaaagacataaatacccttcaagtgctttcacactctcttctcgaacaatgaacacagagaaagagagagagagaagacacttagtaaagaaggtctgtgtgctgttctctccgaaattcctttttttggtctcgagggtttttcagactgtgaagagacatagctgtggcaaag

SEQ ID NO: 2184 - DNA, 3000 bp, Unknown
  misc_feature (1)..( 3000): cDNA_ID_2025006_gDNA_ID_1620500_Annot_ID_158859 3000 nt of promoter + ATG
cacacactcgaattattttatactaatagatagatacctttcattcgagctcttctggcaacatttttggcaataatcaaaagaatatacaaaagccacacacataaaaaggacgcatgtaacgtaaattacgtgtttttatattcttttgttacataacttacgtattgctgacgataaattgagatggttattttagtgtctaaggtttccgtagtggtcactggttcgtgtgatgataacacagtacgttaaaaaagggtccttactacaacccaccattttgttggacaacattcatgcactttttttttcgtgttaaatattcgttccttgagattaacctcttgaatatgcgttcgcaatcgataagtgaaagctattgaatctaacgagagtacgagacaatatctcaaatagaatttgatttcgaccattaaaatatcagaatttagttttttctgtcgtccaaaattcatcagtagctatctattcgaaatagttcaatatcctgttatagatatgtttttgactacaaataaatttcccatggatgcagatgcatttacgaaaagaatagacttttcttttgttctattttgtgttatgtgaaaagaaaaatggtgtagcaagtaggaacgtaagctttagactttagtgtttgttattcaaaaaagatcacttaataaagccggtggggttaatgcctctccttctgtttcccatactcgttttacgtttgcttacattttgtcaaaccattggaccccaaaaattctaagtttatagtatatttctttacttttgcattatatatactattttctataaataaagagtgtgaatattcagcgggaagtttttttttaacatactttatcaaaaaaaaaaagtatgatctaaaatattagctaatgattatatctttaatttgttttccatacgagacagtttgtctacatcaaaataaaatataatggacctaattgagtaatcttggtttagaaacaactgaaacagaaataaggttagtttcggtttactagctgcagttaatatcgacgattatgagaaattatcggatttgtgtgtttaaaagcagaagatggaaaaagaatctagttgctgtctgatcgtaattacaaggggtctattcacctaacaactaaacaagaccacgattagcggagaatcaaatattaacatgtattagtataccacgtgtcgtcctgtaaagtggtgagagtgtaagatgtacggctgcaatttgatgaatgaacttaccgatttacaaaaaatcttacgcaacggatgttctctccttgtctgtgtcacctccacctctttgtccatcatttgtttcatcgcatttcttcaactatagtccataccaataaaatagatatcttggatttgaatgatgatagtatttcgagtggaaacaaggataatgttaatggatagataacatagatgaatggtagattaatcttactactaattaaaaatatcttcatcaacgtcacaacatggtaacaatattcacgatattttcatcaatattttctggatccttctctagagacatacacatttctctatttgttttgtttttttgtgtggaaaattgcaggcgatctcgaatctcggaacacagtgcatgcatgataatagacatatctatttacgattcaaatctcgcgtcgtctctgttggtagctccactggctatcaaaaaccatattttatacctgttacagtatttacaattttaataaaagagagatatttctattttctatattaaacaacattatctcgaagatgcatacatagttccatactttagtctttgtcgcctttataagctttctcatcttgaacgcgcttcttctttgaagagacttttacacatggtcagtctctctcagctaattctttttaagaaatttaaattttctgtctcagtgttcaaagataggatctgagtaaaaccaaactcactcattagctagtgatcatgtggtaattaaactacagaataatcagataaatattcttatctttttacttttagttaataatatttgtctcttaatctatgataaacaaaaatttcttaaccagttaacagaaaacaccataaattgagttaaaaaattgcataaatgcatcattaaataaaaccaaaattatgaatgtttgcattatcaaataacatgaaatagtggttcatgatactttcattactgtgtgaccttccacatttcgtaatttgtataatgcatggtgttattttacaaaaaatcactaaaagttagatcaactatttaaatttgaatcaagagctttaattagtgttcactgtaaacaagagaaaatattacgtatgaaaatgttatgtatacagtatttaatacttaaaggtatcttaaataaatttaaaagaaaaaggttagctaatgattttctgttagcaacctccaaattaaaaatctagcgactttacgggttttttaattcagaaaccagtggtttgaaaaatgcagaaaccgacaagcatagagtgaaaaagaaagcgcgtgaaaaaattgtaagaccaaaagttgcaaaaaaatatccctttccataattccttcctttgccccatttttattttcttcttcatccataataacttcactctctcccccccccccccccccaacatgttcctgtgacgacgatacactctttcactgacttacccctacctcaaaatcaccttcttcttcatcgtctcagctcaggaattgctaactacctgtttttgaatttgagatctgtttttgtttctagaagaaaacagcttgttttcaccgtctctgatcctctggtacttgctttttactttgtatgttagttattcagagtttgaaattcgaattttcaaatttaactaactcgtagatcggatttttgtttgtttttgtttgcatcagatttgatcggaatctaatg

SEQ ID NO: 2185 - DNA, 3000 bp, Unknown
  misc_feature (1)..( 3000): cDNA_ID_3066411_gDNA_ID_1620500_Annot_ID_158858 3000 nt of promoter + ATG
atttacaattttaataaaagagagatatttctattttctatattaaacaacattatctcgaagatgcatacatagttccatactttagtctttgtcgcctttataagctttctcatcttgaacgcgcttcttctttgaagagacttttacacatggtcagtctctctcagctaattctttttaagaaatttaaattttctgtctcagtgttcaaagataggatctgagtaaaaccaaactcactcattagctagtgatcatgtggtaattaaactacagaataatcagataaatattcttatctttttacttttagttaataatatttgtctcttaatctatgataaacaaaaatttcttaaccagttaacagaaaacaccataaattgagttaaaaaattgcataaatgcatcattaaataaaaccaaaattatgaatgtttgcattatcaaataacatgaaatagtggttcatgatactttcattactgtgtgaccttccacatttcgtaatttgtataatgcatggtgttattttacaaaaaatcactaaaagttagatcaactatttaaatttgaatcaagagctttaattagtgttcactgtaaacaagagaaaatattacgtatgaaaatgttatgtatacagtatttaatacttaaaggtatcttaaataaatttaaaagaaaaaggttagctaatgattttctgttagcaacctccaaattaaaaatctagcgactttacgggttttttaattcagaaaccagtggtttgaaaaatgcagaaaccgacaagcatagagtgaaaaagaaagcgcgtgaaaaaattgtaagaccaaaagttgcaaaaaaatatccctttccataattccttcctttgccccatttttattttcttcttcatccataataacttcactctctcccccccccccccccccaacatgttcctgtgacgacgatacactctttcactgacttacccctacctcaaaatcaccttcttcttcatcgtctcagctcaggaattgctaactacctgtttttgaatttgagatctgtttttgtttctagaagaaaacagcttgttttcaccgtctctgatcctctggtacttgctttttactttgtatgttagttattcagagtttgaaattcgaattttcaaatttaactaactcgtagatcggatttttgtttgtttttgtttgcatcagatttgatcggaatctaatgggtaaaaccaccgggaacagagattggactcagatctacgctatttacggaatcgaacaatggcagacactcgtcttccttctcttccatgctttcttcttctctcttctctctcttctcttcctcatctacttcgatcagatttgcttcttcctcgattccttcttcctctccggcgccgccagattagccgcgggtttcaccggtgctgtaaccgctctctccgcggtttgtctactcttcgccgcagctaatttcgtttactcagatgttccgcttcagtacgagatggctcaacgcatggttagctccgtcggtgactggtcttgtgtcaaaactgctctcgatctcggttgtggccgtggtatcctcctcaatgccgtcgctacacagcttaagaaaaccggtagctccggtcgggtcgtcgggttagaccgctctaaacgcaccactctctccactctccgcaccgctaaactcgaaggtaactgatcaatttctcctaatttcaaatcgaatttgagattctcattgtttttgtgattcaaaattgtgtaggtgtgcaagagtatgtgacatgccgtgaaggagatgtgaagacgttgccgtttggcgataattacttcgacgtggtggtctcgtcggtgttcgttcacacggtggggaaagagcatggtcagaagtcggtggaagctgcggcggagagaatgagagtgctcggagagattgtgagagttgtgaagccaggaggtttgtgtgtggtttgggatctcttacacgtgccggagtacgtgcgtcgtcttcaagagctaaagatggaagatatacgagtctcggagcgagtcacggcgtttatggccggaagtcacatcgtttcgttccggaaacccagtgaactcgtcgccgggccccgtgaagtccgcctcgattggagatgatgacgtggtgttcaaaacgacagtgatgtgtgtcggttcgttatataaaaaacggcacgtagttgaagaagtctggaggttcgacactataattgtaatatattaattacgaatctactactactacactagaaaatcaaaatgtatgtggcgtctggggaggcgaagcggaaccagatgctttgatgaagaggcataacgctgcgtttgcgtttttgtcttgtatttgtataacctatagtttttattaacatattaagctgaatcttaatatgtgattcagagaagagtctttttactgttgcgttttcaaacgcgggtaaaaaactaacgtcgtggagagaagtagctgaactttgaaactgtgtacgaaaaaaaaataaaaaatttggagctttgttgagtgaatttcaagaatgtcgtctgtgtagtagatatggttgggcattaaatgacttgtcattgtcacttcacgtcaatgtggtatctgttccctatatattattaatttattattttagtatacttgggccagatttgggccaagccttaaagctactcttgcttcatttttgtctgttaaacacccggcaaagcatgcacaagcgaattctcaaaacgttgagttgttttgcaagatgcaatgcgtgtcgactgtacaaagtagaacaccacgccgtttctcttaacttcagagtagggcacgtgtatccattcaaatacctccacgtaagcgtttcggagatgaggcgcgccaaagaagaaagctcatcgtttattctccctatccttgtctctgtaacttgcaagcttcccatcaatg

SEQ ID NO: 2186 - DNA, 3000 bp, Unknown
  misc_feature (1)..( 3000): cDNA_ID_3066403_gDNA_ID_1620500_Annot_ID_158863 3000 nt of promoter + ATG
tatatccgcagaaacgggccatatgtcggaagattgggttagaagctaccgaatcgaaagcccaacaagatatcgaaccaaaccctatagttttactttggcatactttaaacagattttctgtatctgacgccgttcatttgttttactttctccttaacatccgacgactattcttatgataaagaaataatatccaagttaaataaatatttactcgactaatgcgtccgctaaacactcgtgctttccttttatagcttgttgcctatttgtcggacaatgttttataattgttaaaaagtttattgaacattttaaaattgtatattttggagtcgagaagaatcaaaagttattactaatatttattaatgaaaatgactaacacaatttaaaaacggaaaagttattcgcaatctaaacgttacataaactataaactaaaacgttacagaacctatgaaatagcatacggcttagggctcactagttattgagagttctaaattttgacttaactaaaagtccttatgaatcaatatttttcattaacagtaaccatttcagtatttctacataggagagccttctttttctgtcatcacttattactgttgcctgaaactattccggtaaagattggtttttaatttcccttcatgcttaaccagatattcacctgattctcccagtacacatgtaatttatgtgctttacataaaacttaaaaaaatactgacaataattaaaatattcgtttgcagtttcataatttagtttatgctgcttatggacgtgggaacatgcttgtagtttaacttttatttggtcgtcaatttgattaaaaattataccttcattgattctttttgaaagatacgtattgtgaataatgtataaaggatttagaacataattatgatccttgagacttgtaatattttattaactaaccgaaaacataagcaagagaatcgtggataacgacctaacgtataagaaacatgagacatgtcacaatcactttaaaagttttcctatcaaaactcgagtagaagcacatgaaatttctggatattaaaaataaataaatcaaaatagccttatattattgctgtcaggaaataattctatttagactacctgaatttccagttgaacggcgtttttccaaattgcaagcatcatatattatgctcatcgtatcattagtgcataaataaactatggaccaatttcatggtgaaaaaggggcttcggatgaaatttttgatcaaattatatttgtttattgataaaacaaacgttttttttaaaggatgacagttgtgcgtttgagatgaaaaccaaacactgctcccactcaaaatttgtaaaaatggaatttataaatatttggtgctacaaatgtcgtttggtagcctttggaaacattaaaggtaaactagagatatgggagtatggaacttaatctctttatgtggttgtatttcatataatttcacgtggcccaacttgtttctgtcaatccattgatcaaagttggtagacaagagtgaacccacacacactcacacacatacacacggtcgatctttttttctattctcgtgtccctacgtcctctaaaccccatcattatacttcttgtgttttattggtatgctgagctagagatagttaacaactacccaacaatgcgggtctggcttagtttgaacctattcgaaactagttatactccgcttgaagtcattggttcgagactaactttggagatgagtatcataaacagctctaacttaagattacaatacatcctcttgttagtctaagttgagaggtgttgccattgactatatatttctttgggaatttggtttaccaggatgttgcaaagaagatttaaatagttataaattagtacaaattcaatccatatgatatgatattcaaaaaacaaaaaaaaaaaaaaactgatctaaaagtcgaaccaaattctaatttgattagagcatgtatataattgaatccctaagtaaaattcaacccaatacttgagaaggtagttatattcttataaattatggatatgatttgattaaaactcaaacctgaacccaaaacatactagaatatacgtttttactttgtaactatttgtcacattccaaaactaaactcggtactatatttgattctgatccatacaaattttgtatatctggtttatattctccatgtgagattaaagcggtgaccaatcaaaatcattgctggaatatcttactattaagctaaatgttgttagttatatacaagccaatccaaaaaaactgatgcaaagagagataaacgaacatatcccaaaatggtaggatttgatttaatattcccatcctcttattagaaatgcaaacaaatagactatagttttatttatttattttcactataaaataactaaataacatgaacttattgaagaaaaagtatactatagttgtgattctgtgatatactagttagaacaagaatctttacaaaaaaaaaacacatgggatgttaggagaaggagattcggattccaatgatccaacggtcagagaaaaatcagaagaaaatttcacaaccgtaggatctgttcccttaaccaccttgtaatgccggtctttattaattttgagaaaaaaataaaaacagcaccaaacttatgtctctcatgtgaccgaccaccgcatcctcagttgacctgtctctgcccccactttgtctccccacacaaactgaataacaagaagaagaagactttagatatcaaatgactccacgtgtcgatattggattggttttcattggttgtatcgtgtggaccaacgaagcaacatataaaaagcacgacgcggtgccattactacaataagagaagtgtaggagaagaaagttctcatttcataattgtatcaaattgtgagaggaaaaaaagaagttcaagaa

SEQ ID NO: 2187 - DNA, 3000 bp, Unknown
  misc_feature (1)..( 3000): cDNA_ID_2047614_gDNA_ID_1620500_Annot_ID_158836 3000 nt of promoter + ATG
aattttatagggaagacagtgacaaattcttgttatttataaaaaaaccaaatttgaaaatcgaagagccaaattgcaaaataaatttaacatttttttatcggatgttacaaaaataaattagatatccacataacatgtgcgaatgttattgataattttgtattaatcaacaaaaaatacatgtcgggaaagaaaaaaaagtgtttcatttattgttatgaaccctttataagttatgtattaccaaaatagcactcattgttttaaaattacaaattagtccgttcttttattcccgtactcgttccttcttcttcttcttcctctcatcgtcattttctcgattctcactcttccggtcaccgactaattctggttagctcacattccttatgctcattcatccacagttccctaattaacgctacgaattttgtttctcctcttatttcttctttcctcttgtagaataaggtttatcaaaagaataagaataaggtttatctcttaaatctccgataattagcagagttttttcaggattgagtttgatttgctgttttggaatcataaattttgcgttttagtggataaaaagctagctttgaaagagttattgcagagaaaaaaaatgggatcgagagggattatcaacgataagtggtcaatgaggattctatggggttgtgctatcggaagtgctattggtatgattgatccatctttcccacattttcatcttagagactatggtttttgttactcaaattcatgagctttttgtttgtatgggacactttctttaacccataattgtttaggtttatacatggttgctgtagagagacaaactcagaacagggctcgtgctatggctgagagtttgagagctgctgaatcacaaggtgatggtgataatgtctaatatctaccaagtagtgctcagttgaatactctcagttgagtttttttttttggtgtttgtttttgttataatgacttcttctgccaagatggtgttgatgtagtttcttttttgcaaataatcgtaataaggtttcgaaacttggagagttgaagttgctgaacatacgatttgtgttatcgcaaaaaaagttatttcttatgcctgtcatgctatgtttgtgaattcgatttttaatgcgtattttcagcaaggcgtcttgcgtttaggggatgtgttttctattaagtaaaagtcttccttcctataaaagcatgagggatcattttatcaggaatgtacagcaggatcaacttattacatagaaataatggctcagggacaccaaggcttatgctttgggtttatcttcttactatgcttcttcagctctacttttgcactcaggattcttaaggacctccctatgatggagccaagaaagctagatctgaaccatgaaatgatgcctgggatggttatgctacagccagatcatgaggtccaacctgagcacacggtcaagcctggccatacactccagtccatgtccggtgtatcagaacatccagagcacacggttaagcctggccatacactccagtccatgtccggtgcattagaacatcctgagcacaaggaaaagcctgaccataaactccagtctatgttgggagaacatcctgagcacaaggaaaagcctgaccataaactccagtctatgttgggagaacatcctgagcacaaggaaaagcctgaccataaactccagtctatgttgggagaacatcctgagcacaaggaaaagcctgaccataaactccagtccatgtctggtgaatcaaaacatcctgagcacaaagtcaagcctgatcagataatgcagaccatggcgagtgaactggaagaggaagatcctgaccacacaagtaagcctatggggtatggtgtaggtaggggctatggaagtggtgggtctggtgttggctatggcgttggaattggctctagtggaggcagtggctttggagaaggtattggctctagtggaggcaacggctttggagaaggaattggctctagtggaggcagcggctttggagaaggaattggctctagtggaggcagcggctttggtgaaggaattggttctggtggtggtacaggtattggcattggagaaggaataggatccgggtctgcccaacccaattgcggccctgtcacgggagctccaggtagcggattcggtgaaggcataggacaaggtagtggtccaggggaagggattggtatcggtataggacagggtggacctagtgtagtagtcccaggcacaagaatccctccgatagtggttccaggcgcacagattcccggttttgtgattccaggtatcacagttcctggctacggtactggatgccaaacaggtggctgcaatccgaacccaccacactactatatcccaccaagctgtccccattgtccacctttcacatcaggacaagacaaacacatgtcagacaaaggagccatgaccgaagctcttgcacccacttcaccggagatacatgtttaagctttaagagtccatgaaacaccagtctaataaatcactcataatgaaatctattttggtttataaaagcttcacagaaagttgaataatacaactttcttgctcaagtaaaaagatatataagggaaatgcatataagaataagtgagaagtactcagagacagaaaaagattgattaagaattaggcagctggtaattgcatttccatggctgtgtatctgtatgactgacaaatgagtttaaatagaccggtccacaaatcaagttaagctctctactttaatggaaaatacgaactttagcttatataatttcttaatttgaaatgacataaaaagaggtgaatttttcttaaagcattaaactttccgaaaggagagtggtggcactgtaataacgacggagaagaacgaacgaacgcgagagatcgagagagagagaaatattta

SEQ ID NO: 2188 - DNA, 3000 bp, Unknown
  misc_feature (1)..( 3000): cDNA_ID_3098881_gDNA_ID_1620500_Annot_ID_158843 3000 nt of promoter + ATG
ttcattggtgatctttatatatatatatattttttttaaacaatctacttttatagatagatgataaggtttccattatgtgttgtatgacagagaatggtgcttgtgattgatttgaagtttgcaataaactagattttaatagatgttgggatgaattagtcatagttaattttttcttttttattaaaatatctacgttaacgaaaaaattagcgatatgaccttgattttacctaaaagggtcttgaaaacatagtttgtaggttaatcatatatccagcggtagtttctcgtaatactttgtcactaacatgtattatacgttttaatttggatgatgacatatagacgacaaacaccacaaacatgaaacaactatagatcacattttcttatattatcatctcgtttggttttatttatgtctgcacaaaattatgctttcactcgtgtcatgtgttgcgatcaatgttgtactccatcagaaccagcccaacaccatcgagactcaaacatttaacttcgcaatgttatgtcactcttcaaagcttcgaattctttctgacatacctatatcctctttgtccatttaattgatttattgaaggtgtggttactaaataacgtgaaacattgttgtaaatgtatgcgttaaaccaagagaaaatgcaaacacagcaaaaagggaaagaaaaaacataatggcgcaaagagagctcagagacttttatatggaaatagaagatcctgctttttcatttattgtcacctcattttcactcatttataaattttattttccttcgatttcctagctttcattttagatattcctctgtggtgtatagagtctactaccaaacaaaacttcataatgcaatcttgggtttattcgcacgaattagcataaataaacttttgaattatcacataaaaacattcacatgtttcacatcaaatttcaaactattactaatgtgatatcatcaaatcatttggtgtttgttgacaaaacaaatcattttatgttgatgatttaattaagcatgcgacctcacatgtcgctgatacaaactgagttcaagaacataattagtacgtaaagaaatagagagctaaacgacacgaggaatcaaatctatgtaactacattcatgtcaagctctctcgagcttaacaaccatctccaagctaaactacacaatctaaaccggcgctaacgagttaactttagtcttaaccaatcgttgttaatatagaacaagatacaagtaaaccattatatatgccaatattgtggttacaaaagtgaatgatgtatacagtatatatggtttttgatccacgttatatcatatatttatccaactagtccaaaacaacctaaacaaagccaggaattgatatagatcttccaagaaatgtcttacaaacaaatcaaaaaacttaaatccataatagtctcgtgatttgatatattcatgtctttgtgtattaaacatgtttatactagtggtcggttatatcattagttgtcaaatgtttattttgtttttttgtttggtttaacgtttgccaagtgtttttgcataatgctcttgattagcatactaatcataatcggtataaaaaagaatggtcccggagagagagagaagaaacggtgttgtaatgtaaataacggtgggacgggagaaaatagagtagggaaggggaagagaggcatgtgttactgattagctgtcctcttctctgcatttactctttgtgggccttacaggcccatttctcctccctccatcttgtttccacttttttttttttttcaaaagttttatagtgtttttgaaacaaaataaaacctcgtataatcactaaaagattgagatttgagcgttacttatggttcttatttccaatttcttttggtgttgtgggccttttgaaacgaaagatgtgtagattttattaatcatcatctttcttaaacctttatgtgatttgatttgatatgttgggagttaaattgatggtttagtttttgatatacatgtagtactcacatttttttctccagttttttctttcttgtacacatatttgttcaatcttagagaaactactaagtaacagtgttattcttgttgttctatgtacctttaaaccgtggcaaatatttatgataaatttaaactcaattttaaataataacttcaaacttttaaatttggttttatgaaatatcactgaaattagtttgtgatgtattttatatataatatttcctgtaatatatatgtaaataaatactatatactattttgtggtaaatattttattttagcaagaaaataaatcaacttaaataatgctatacacgcccttctttatttaatggacactaatcaaagcatatggcaattacattattgattgtcctatatacatatcatatattttcaaaatcaaattaaaaccatataatagtatatataataccttctcttttgtcggaattaaaaattaataatttaatacttttaaagatctaatttctggatgaaaaactttggttttcagcgccttacaaagtgcaaaggtccacaaaccaaaaattaaaacagagagctgaacccaaaagaaaaaaaaaccgaaacaaaaaaaagttctctctctctctctctctccattgatttcttctacacagacatctctacgaacccccaaactcatctctctctctttgctcttcatcggatctgactttttcccgaaaacccacaatctcattcttcggatttttcaacgacaaaacccccaaatcacaaaatccccaaaaagtttcaatctttttgacttgagaaaccaaatatatttatagaatttgctttataaagtctgcgttttttttgttttgtttctgtttgatcaaattcaccggcgaaggaattttccgatgggaatgtcttcgctggcttcatcacagctacgaccatg

SEQ ID NO: 2189 - DNA, 3000 bp, Unknown
  misc_feature (1)..( 3000): cDNA_ID_1024969_gDNA_ID_1620500_Annot_ID_158847 3000 nt of promoter + ATG
caatcccaatcaaactcttatcttctgaatgatcgatctcttccctgagactctctaagatttggatgcaaaaacttagaattctccttcataactttctttctccgaagagcccttttcattttctcaaccttcatcgcatcagaatcggcaatgccgagatcgtcacttgaagccaaatcttcacttattgaatccgtagaagtagtgatgttggttttgtacttatgagaaagttcccttacaatatgtgtaatttcatctccccgcatattcgtgtttagaatcttgactatctcaaaacccacgacgtttccttggcgcaaatctacacactctttatcaaacttaagcccaaatctttgaacgaagaagctccttatgtgttgaagatcctcaagctcgccaattcttgatgcagcaaatataattccggccattgcttttttagtttcttccggtaacagatcaacattgctggcgagagaaacatgcggaaattagggtttacgaaccgttttggtttccttatgctaccgtatgttacaagatatcaataacaacttacttttcatatttcaaagaagatatattctgcaagatggttgtgcagaagagctcaacctgatcatatgccgataaccttctctcatcttcatagaattgcttcgcctagagttttaaaatttgcaaatcagaataagaaagatgaatcaagggataataaccaacaaattaagtgatgtgatagagattttgatcaaataagcaaaaatctaccaggtgattgagattaatctcagataccttaggaagagcttctgaatagcgaccataagaaaggagctgagcgatatcggaccgtgattgtctgaccatacactctcttctattccgatgtaagttaacagaacataacagattttggatatagagtttgctgcaaacaagacagattaattaattaaaaaaaactcgaaacaaaaacgaaatcttaaccgtgtaaagcaagtaaaccaagattcttaccacttcgaagcttttcgccatcttgaagaacgagaccgaagaacaccaaatatgttaaaaaagcacccaaactttgattctggtttcttggcaaacatgatttactttcctctgtgaagaatgtgaacagattcttataagtaaggcctaataatgagatgtgaatatatatagcaagaaatctacatatattatccttaaaaagtggtacattaaagataattactaggaggatttactttgtgtattaaatctggaaaaccccgcattttcctttccaatatgaaatgtgaaaatctaaatgcattaacgttccttgtattaacagattcatcagtaacttaactaaagggaatacaaaaagcatttcatgaatcatgagtttgcaatattccatttattagaggcggcaatttaatcgtcgcctgatattttttaatcaagatttcagttttagtaaggacaatcaatgaaatcatcgttgtgttatagtatcaaaattgcaatatacgtacctatttttttttttttatacctatgtttactaaatcctcctttcttaagtaaaatgttttctctgttttgtagcccattgggaatatatatcgtagactaaattcaaaattatcgatcttaaaataaataaattattttccatatcaaaccgataacgaaacaaatatttactgtatcttttaaatcatttattattttaaatctttaagaattgaatagaaaaattaataatcttttcttgtcaaaaataaaataaacttaatgatcatttaaagatatatacatatagtataattatcccaaaaaacaaaatctgtaaaaagaatcagtttttacaagctaatatttgtagtcttgtagtaaagctaatataaatatttattttggttctttttttttcattaataacttaggaatttcgaaccaaaactcaaactaattttttggataggtgcaagtcattttatgtctatagtcgtaaaaaaaaaaaatcgaacaatgatcttttactcgtaaatataaaattagtggaacaccatgattagttgatcttttaccagaagatataaactactctctctgttcctagaaaaatgatgttttgagtttttcacataaattaaaaaaaaaaattttaatattatttttattacttttttgttaatttaataatataagttttacttctttcttttctctattggttactaataaaaatattaataaaattaacctacaacattaatattcatggaacaaaaataaaaaccaaaacatcaaacttcatagaacaaaggagtattcattagcatagtcaagcccaagtatcataacaatatgggccttttatcagaaagtagcataaatccatcgtatactaaagttcacgaaacataagattaatgtgttataaaagtgatcattacgtactactatatgttaacaaaaaaaaaatcaaaaatatcattatgcgtgtatgactaatataattgcaaataagacacactattgaccgatttcttaaacactgacctgcaatcttattggttacttaacaattaacatacttctgtgaaaaagaaagccgaccgacaaaccggaagaatcagttaccggtaaaaaccgacgcgtattatacagcagtcgacagatcagccggttaaatctaaaccattcaatgtgtcttcttcgttaatagacggtgacttttaactaatccactttttaaaacgtttttaatttttgcacattttcacacttaatcttcttaaatgttttcttaaacagaattaaaaatatttaaatcatttaaattcgaaaattgggtcaatgtctctttgacttcatcgtcgattaagggagaaagagagagagagtgagagctgagaaaatcaccagaaagctacttgagagagagagatagagataagtgagctctgagaaaatccagcaatg

SEQ ID NO: 2190 - DNA, 3000 bp, Unknown
  misc_feature (1)..( 3000): cDNA_ID_3066416_gDNA_ID_1620500_Annot_ID_158851 3000 nt of promoter + ATG
tttataaaaaaagttaaaaatgttggcaacaacatcatccgatccatatactcttatcaggaacggaaaacaaaaaggtcaataacaaataaaaaaatataattggccataagtagtgaatagtgattaaatatgatttatcctacaattattcgttaataactaactaaaaatatattttcttataccaaagaaaactatacaaactacttaaatcaaacttgtaagataagatatagttggatgaagtgggggtttgatctacgatggtcatcttcattgtttgattccccctttttcgtttctattctattttaagaatatgaaaagacgtataatatgcacaagttggagagaatatttatcagcttttcagagtttagtatactatatatgatcttatcgaaatttataccttttctatatatatatatatatattaaatcgaaactttctttgttatcagtagcttaatgtttagaaatattcttattatagtgtttgattaaatatgtttctagaatcgaaaaaaataaaaagaaatcattatattaaattacgataaaaaaagaaaaattaatttaataaaaaagggaaacattatttcatttaactagctagtattttaacaaacaactaaatagttgtaatttattgtcataatatatatattctgaataagaaaaatccacatatgtagcaaatgtattatacatgtgtatgacaaaagttttacaaaatggttgaacttaaaaaaaaaatatgtcttaaacatacgtaagactacacgtaatatcaaaattaacatgcttagacatagtaattataaagctttatgtaaagcaagactgattctattaattaattgatggatcaacacttttagcaattggggatattgtactatttactggattatgcttgtggagggagctcatggtgctccagattatcaaattttatatatggtagaaaaataattataccattacaatgtaaagcattcgagttcgaatttcattggcgcactttgattttatataggaagattgaggttaagttgtaataagtgtgatattcatattattattggaagtttattggtttagccatatggtttattcagcaaaccattaactaaactcacatgtcaaaagttgaaacttataccaccttgatatccacgtcatcaattcttaatacacttttgtattttgacccaaatttacggggttacacgttatgtaattatgatatatgcatgacatacacgttatgatatatgcatgacatcgctaaaatagcataatgttaattagttatctaaaactaaagacctgtgtgtggatattatcttccaacattaacaaaaaaatcccgaaaaggagaagaacaaaagcttttaaaaaaactttgatcaccccgttctataccaattgatgtatctttaatggaagagaaccattataaatagaaacgaattaacaccaaatgcaccgtgacacgaaagatattgagtgtaagaaaccccaaattccttgttatattcgcttagaattatttttacagcaccatgtacatgtgatcacaagatatcaattaaagttagctaattaactttatttttcattttttgggctactagtttgctaattaactttttaccgagaaaaaactatcagtagaaagccaaaaaattcaatgaataagaaaaaaaaaaaaaaagcctaaacttacatacatatatgatatatctacgataaatttgctgataaacgatctgacttctaactaagattcctgttttacctattttaaaaaaaaatcgagaaccatgaatcaaagctcaactatgttaatcatgattgaaatcacgtacgttctcgaatgcttaaataaatatgttaatcaataaaccgccataaattggttaaatataaatctacttgcaagaaaattgtaattgaactttattttcaattggtaaaatgttcctttttcacgtacacaaaaaagtgtttgaagagaagcgtgtttgtgttatacggacttacgaaaatcttgtgttcccatttctcaaccacaaaagcctaatttcttggtacctctgattgtatactatcgtttcacaattacagtttcatctgatttcaatcaaaaattacagtctcatatggatcaaatagaaaaataacgagagtctgcatcatcaactcgtgtttgttgtttgtccctctctctgatctttaacggcttttgacgaaagaaaaatatcccgcctaactcaaccaatagacacaagacatgtgtcggcttgtggtagttctatccgtatgaaaaacgctttccatgttaccatccagtgaactcatcccatcattcacttacacgtgttttttcttcttgacgaccaaaaaaaaacaatttggcacatacccattaaaaaaaaaatacttcttatttttcataatacttttcgtagattgtcactgttatgtaactcattcatagaaatttaccgcgtaaattgcatgaaaaatcactagtcttaagaatcacctaatttgtttttctgaacttacaaatattcgcaaattactttcagttaactccctaatacttgggaagaccattgacaatacaaaaaaaaaatcataagaggaggtacagtcacacacacaatattacaacattactaatataaataatcaactttatggtataggttcaaagaaccaaagggatcgcataaatcacgacgctctaattgatccacgtgtcatgataaacataaagtgggacccgtattgaggctgcacgttaacgaagattgggcggcggtgtaatattatattatatatatacatacacgagtagcagagcttcgaaatctttaatctcagaatacaaaaaagaaaatcaaagaagatagttttgtgattgttttctataaaaagtgcagatattttctttgtcctagagaaagaggtgataggaaaa

SEQ ID NO: 2191 - DNA, 3000 bp, Unknown
  misc_feature (1)..( 3000): cDNA_ID_4254482_gDNA_ID_1620500_Annot_ID_158841 3000 nt of promoter + ATG
gaaccattctgctttcgtattgcaatctggacaggttggtagcttctgtttcacttaaaacctatcctgtgagtatattgtcgtttgccataatcactcatatttgaaatccggcacaggttctcacttgtggggataattcatcgcattgctgtggtcatttagatactagccgtccaatatttaggcctaagcttgttgaggctttgaaggggactccttgtaagcaggtagaattgataccaaccctatctagacctattgattttctaaattggttctatcaaacattgacaaacttatcttctataccaggtggctgctgggcttcactttactgtgtttctatcaagggaagggcatgcatatacttgtggatcaaatacacatgggcagcttggtcatggagataccttggacagaccagtacccaaagttgttgagtttcttaaaaccattggccctgtggtgcaaattgcagctggacccagctatgttttagctgtaacacaggatggctcggtttactcgtttggctctggttctaacttctgtcttggtcatggagagcaacaggacgagctccagccgcgtgttattcaggcttttaaaagaaaaggtattcacatactccgtgtctctgcaggcgatgagcacgccgtggcacttgattccaatggccgtgtaagttctttgtttctatctcgttctgtctccatttggtctcagaaaccaaaagaactcttgttttaataattctttcttgcaacttaggtctacacatggggtaaaggttactgtggtgctctaggccatggagacgaaaacgacaagatcactcctcaagttttggtcaatctcaacaattgccttgctgtccaggttagattcgtcccccatctgtaccatctcaatgtctgagataatgatccctttacaccttgttcctatattctctaagaccttcagcggtctctaagaactaataagtgatcagttcaattagaatcaaaacttagcacaagtattttagtttagaggattttcagtataacattcagtttatttttcggttttggtaaagaaaaccgaagctggatgtgttggcctttgtttgtatggagttttgctccgtttaggatcagttagtcagccctgatcatgactctgcttttacttgcaggtgtgtgcaagaaaaaggaagacttttgttttggtggaaggtggattactatatggatttgggtggatggggtttggaagccttgggttcccggacagaggagtttcagacaaagttcttaggccaagagtattggagtgtctgaaaccacaccgtgtctctcaagttagcaccggtttgtatcacaccattgtggtcactcaacgtggtcgcatttttgggtttggagataacgaaagagctcagcttggtcacgactcactccgtggctgcttagaacctaccgaaatctttctccattgtggccgttctcgtagccggctttgttgatccaaggtatagataaacaaccatgtttgtatgaaccggattgagattggatttaccggttagtgtatcttgtattgatttgtatctgtttgatttcttcaagttgtgagagtaatagaagatatttccagacaccttagtgcagagaattatgacatgagttaattaatctaagaagttttacaacttcaactacataataacaaataccttaactcttggtgatagtagatccactcaagacttagcaaaatatcttagtctttagaacattatagaatgtaaaagtaaaaaactgaaaacaacctagaagcaaatgaaggaatcattgtaacgaccaagatgcaaaagaataataaatcactcaacatcgatctcatcatcttcaggaaacatgtgtgcaacaacttcaatctttacttttatcttctccaatttctccagaggtgaattcaatatgctttgaatttcttcagcaaatgttttcatgatccctagatacggaggaacaccaacatcattgaggatttcgtagattgtggctttgatttgttcttcatcttgaccaatgaactcgtctcgaccatatctttgaagttgatttgtagtccttgttttaaccttactggacatgtagtcagattctccatcactatttggctcaggcacttttgtgtagacaacttcaaaatcaaacaaaaaagtctgacgatcttgagttgtttctttcgaataatagattggcgtcaccatacatgtactatccgatacatcatccacaatacactccataatctctatgcaatgatgggaaaaaaagaagttaagagagagttaggtttttcaagctatgagagtgtataaaaaatatttgtgtgaaaggaaaattgtaaccaggaatgagtaattgttgggattgaatacgagattttaggaaatagttacaataggaattcttcattaaattagattgatcataactacaaaagttaacattcatacatatcgttaaggttcgatgaaccataaatagatattccgatatttaaaatatcttatatgattgtattaataaaatatctcatatattcaaaatcatatttcacttaactatttcgctgtcaaaaaatatcctaccacttttccaacatgacaaaaaaaaaacatactacttttctatcgtggcacgtttaaaaaatcatatcattccaaaaagatttactcgtcagattaaatatctaatcatcattggattcacaatttgtttatttacctaccagacactttaaaaaaaaagattaactacagaataattttgtctaaaaagaaacggataagaacacgtaagacatgtcagtcttatcttaaaatccaagtcagcatctcgtgtaataataatctcgtacctttataaaacccctcattgtcttcaacaaaaacataacacatttcaagcattggattaatcaaagacaaagaaaacgaaa
